United States Patent Application Publication US 2026/0226133 A1 - sequence listing, part 16

SEQ ID NO: 36707 - DNA, 1347 bp, synthetic construct
  source 1..1347: mol_type = other DNA
atggccttaccagtgaccgccttgctcctgccgctggccttgctgctccacgccgccaggccggacatccagatgacacagagccctagcagcctgtctgccagcgtgggagacagagtgaccatcacatgcaagagcagccagagcctgctggactccgatggcaagacctacctgaactggtatcagcagaagcccggcaaggcccctaagctgctgatctacctggtgtccaagctggatagcggcgtgcccagcagattttctggcagcggcagcggaaccgacttcaccctgacaatatccagcctccagcctgaggacttcgccacctactactgctggcaaggcacccactttccattcaccttcggccagggcaccaaggtggaaatcaaaagaggcggaggcggaagtggaggcggaggatctggcggcggaggctctgaagtgcagctggttgaatcaggcggaggactggttcagcctggcggatctctgagactgtcttgtgccgccagcggctacaccttcaccagctactggatgaactgggtccgacaggcccctggcaaaggactggaatgggtcggaatgatcgaccccagcgacagcgagacacactacaaccacatcttcaaggaccgcttcaccatcagcgccgacaccagcaagaataccgcctacctccagatgaactccctgagagccgaggacaccgccgtgtactactgcgccagaaacctgtatctgttcggccagggaaccctggtcacagtgtcatctacgcgtgacggtaacgaggagatgggaggaatcactcaaaccccttacaaagtctcaatttcaggaacaactgttatccttacatgtccccagtatcctggcagcgagatcctttggcagcataacgacaagaatatagggggagatgaagacgataagaatatcggatctgacgaggatcacttgagcctgaaagagttctccgagcttgaacaaagcggatattatgtgtgctatccgcgcgggtcaaagccggaagacgctaacttttacctttatctccgagccagagtgtgcgaaaattgcatggaaatggacgttatgtccgttgctacaatagttatcgtagatatatgcatcacgggtggactgcttctgctggtttattattggtccaagaatagaaaggccaaagctaaacccgtgaccagaggcgctggcgcaggcggaaggcaaaggggacaaaacaaagaacggccaccaccagtgccaaatccagattatgagcctattcggaaaggacagagggacctgtactctggcctgaatcagagaagaatc

SEQ ID NO: 36708 - DNA, 1242 bp, synthetic construct
  source 1..1242: mol_type = other DNA
atggccttaccagtgaccgccttgctcctgccgctggccttgctgctccacgccgccaggccggacatccagatgacacagagccctagcagcctgtctgccagcgtgggagacagagtgaccatcacatgcaagagcagccagagcctgctggactccgatggcaagacctacctgaactggtatcagcagaagcccggcaaggcccctaagctgctgatctacctggtgtccaagctggatagcggcgtgcccagcagattttctggcagcggcagcggaaccgacttcaccctgacaatatccagcctccagcctgaggacttcgccacctactactgctggcaaggcacccactttccattcaccttcggccagggcaccaaggtggaaatcaaaagaggcggaggcggaagtggaggcggaggatctggcggcggaggctctgaagtgcagctggttgaatcaggcggaggactggttcagcctggcggatctctgagactgtcttgtgccgccagcggctacaccttcaccagctactggatgaactgggtccgacaggcccctggcaaaggactggaatgggtcggaatgatcgaccccagcgacagcgagacacactacaaccacatcttcaaggaccgcttcaccatcagcgccgacaccagcaagaataccgcctacctccagatgaactccctgagagccgaggacaccgccgtgtactactgcgccagaaacctgtatctgttcggccagggaaccctggtcacagtgtcatctacgcgtttcaagatccccatcgaggaactggaagatcgggtgttcgtgaactgcaacacctctatcacctgggtggaaggcaccgtgggaacactgctgagcgacatcaccagactggacctcggcaagcggattctggaccctcggggcatctacagatgcaacggcaccgacatctacaaggacaaagaaagcaccgtgcaggtccactacagaatgtgccagtcctgcgtggaactggaccctgctacagtggccggcatcatcgtgaccgatgtgatcgctactctgctgctggctctgggagtgttctgcttcgccggacacgaaacaggcagactgtctggcgctgccgatacacaggccctgctgagaaacgaccaagtgtatcagcccctgcgcgacagagatgatgcccagtattctcacctcggcggcaactgggctagaaacaag

SEQ ID NO: 36709 - DNA, 1272 bp, synthetic construct
  source 1..1272: mol_type = other DNA
atggccttaccagtgaccgccttgctcctgccgctggccttgctgctccacgccgccaggccggacatccagatgacacagagccctagcagcctgtctgccagcgtgggagacagagtgaccatcacatgcaagagcagccagagcctgctggactccgatggcaagacctacctgaactggtatcagcagaagcccggcaaggcccctaagctgctgatctacctggtgtccaagctggatagcggcgtgcccagcagattttctggcagcggcagcggaaccgacttcaccctgacaatatccagcctccagcctgaggacttcgccacctactactgctggcaaggcacccactttccattcaccttcggccagggcaccaaggtggaaatcaaaagaggcggaggcggaagtggaggcggaggatctggcggcggaggctctgaagtgcagctggttgaatcaggcggaggactggttcagcctggcggatctctgagactgtcttgtgccgccagcggctacaccttcaccagctactggatgaactgggtccgacaggcccctggcaaaggactggaatgggtcggaatgatcgaccccagcgacagcgagacacactacaaccacatcttcaaggaccgcttcaccatcagcgccgacaccagcaagaataccgcctacctccagatgaactccctgagagccgaggacaccgccgtgtactactgcgccagaaacctgtatctgttcggccagggaaccctggtcacagtgtcatctacgcgtcagagcatcaagggcaaccacctggtcaaggtgtacgactaccaagaggacggcagcgtgctgctgacatgtgatgccgaggccaagaacatcacctggtttaaggacggcaagatgatcggcttcctgaccgaggacaagaagaagtggaacctgggcagcaacgctaaggaccccagaggcatgtatcagtgcaagggcagccagaacaagagcaagcccctccaggtgtactaccggatgtgccagaactgcatcgagctgaacgccgctaccatcagcggctttctgttcgccgagatcgtgtccatcttcgtgctggccgtgggcgtgtactttatcgctggacaggatggcgtgcggcagagcagagcttccgataagcaaaccctgctgcctaacgaccagctgtaccagcctctgaaggacagagaggacgaccagtacagccacctccagggcaatcagctgagaagaaac

SEQ ID NO: 36710 - DNA, 1221 bp, synthetic construct
  source 1..1221: mol_type = other DNA
atggccttaccagtgaccgccttgctcctgccgctggccttgctgctccacgccgccaggccggacatccagatgacacagagccctagcagcctgtctgccagcgtgggagacagagtgaccatcacatgcaagagcagccagagcctgctggactccgatggcaagacctacctgaactggtatcagcagaagcccggcaaggcccctaagctgctgatctacctggtgtccaagctggatagcggcgtgcccagcagattttctggcagcggcagcggaaccgacttcaccctgacaatatccagcctccagcctgaggacttcgccacctactactgctggcaaggcacccactttccattcaccttcggccagggcaccaaggtggaaatcaaaagaggcggaggcggaagtggaggcggaggatctggcggcggaggctctgaagtgcagctggttgaatcaggcggaggactggttcagcctggcggatctctgagactgtcttgtgccgccagcggctacaccttcaccagctactggatgaactgggtccgacaggcccctggcaaaggactggaatgggtcggaatgatcgaccccagcgacagcgagacacactacaaccacatcttcaaggaccgcttcaccatcagcgccgacaccagcaagaataccgcctacctccagatgaactccctgagagccgaggacaccgccgtgtactactgcgccagaaacctgtatctgttcggccagggaaccctggtcacagtgtcatctacgcgtcagagttttgggttgttggaccctaaattgtgctatctgttggacggaatcctgttcatttacggagtgatcctgaccgcattgttcctgcgggttaagttttccagatccgcagacgcacccgcttaccaacaagggcagaaccaactctacaatgaacttaatttggggcggagggaagagtacgacgttctggacaaaaggaggggacgagatcccgagatgggcggaaagcctcagcgaaggaagaatccgcaagaggggctttataacgaactccagaaagataaaatggcagaagcctatagtgagattgggatgaagggagaaaggaggaggggtaaaggtcacgatgggttgtaccaaggattgagcacagccactaaagatacctatgatgcgctccacatgcaggccctgccgccaaga

SEQ ID NO: 36711 - DNA, 1506 bp, synthetic construct
  source 1..1506: mol_type = other DNA
atggccttaccagtgaccgccttgctcctgccgctggccttgctgctccacgccgccaggccggacatccagatgacacagagccctagcagcctgtctgccagcgtgggagacagagtgaccatcacatgcaagagcagccagagcctgctggactccgatggcaagacctacctgaactggtatcagcagaagcccggcaaggcccctaagctgctgatctacctggtgtccaagctggatagcggcgtgcccagcagattttctggcagcggcagcggaaccgacttcaccctgacaatatccagcctccagcctgaggacttcgccacctactactgctggcaaggcacccactttccattcaccttcggccagggcaccaaggtggaaatcaaaagaggcggaggcggaagtggaggcggaggatctggcggcggaggctctgaagtgcagctggttgaatcaggcggaggactggttcagcctggcggatctctgagactgtcttgtgccgccagcggctacaccttcaccagctactggatgaactgggtccgacaggcccctggcaaaggactggaatgggtcggaatgatcgaccccagcgacagcgagacacactacaaccacatcttcaaggaccgcttcaccatcagcgccgacaccagcaagaataccgcctacctccagatgaactccctgagagccgaggacaccgccgtgtactactgcgccagaaacctgtatctgttcggccagggaaccctggtcacagtgtcatctacgcgtggaatgaggactgaggatcttcccaaagctgtcgtctttctcgaaccccaatggtatcgggtgctcgaaaaagactctgtgacactgaaatgccaaggggcctactctcccgaggacaactccacacagtggtttcataatgagtccctcatcagctctcaggccagctcttatttcattgatgccgctacagtggacgactccggcgagtatcggtgtcagaccaatctgtctacactgtctgaccccgtgcagcttgaggtccacattggatggttgctcttgcaagccccacgctgggttttcaaagaggaagatccaatccatctgcggtgccacagctggaaaaacaccgctctccacaaagtcacatacctgcaaaatggcaaaggacgcaaatacttccatcacaattccgatttttacattccgaaggctaccctgaaagacagcggcagctatttctgccggggactcgtcggctccaagaatgtgtcctccgaaaccgtgaatatcacgattacccaaggactggctgtgcctacaatctctagcttctttccgcctggataccaagtctccttctgtcttgtgatggtcctcctgtttgctgtggacacaggactgtacttttccgtgaaaacgaacatccgcagctccacacgcgattggaaagatcacaagtttaaatggcgcaaagatccccaggacaag

SEQ ID NO: 36712 - DNA, 1431 bp, synthetic construct
  source 1..1431: mol_type = other DNA
atggccttaccagtgaccgccttgctcctgccgctggccttgctgctccacgccgccaggccggacatccagatgacacagagccctagcagcctgtctgccagcgtgggagacagagtgaccatcacatgcaagagcagccagagcctgctggactccgatggcaagacctacctgaactggtatcagcagaagcccggcaaggcccctaagctgctgatctacctggtgtccaagctggatagcggcgtgcccagcagattttctggcagcggcagcggaaccgacttcaccctgacaatatccagcctccagcctgaggacttcgccacctactactgctggcaaggcacccactttccattcaccttcggccagggcaccaaggtggaaatcaaaagaggcggaggcggaagtggaggcggaggatctggcggcggaggctctgaagtgcagctggttgaatcaggcggaggactggttcagcctggcggatctctgagactgtcttgtgccgccagcggctacaccttcaccagctactggatgaactgggtccgacaggcccctggcaaaggactggaatgggtcggaatgatcgaccccagcgacagcgagacacactacaaccacatcttcaaggaccgcttcaccatcagcgccgacaccagcaagaataccgcctacctccagatgaactccctgagagccgaggacaccgccgtgtactactgcgccagaaacctgtatctgttcggccagggaaccctggtcacagtgtcatctacgcgtggaatgaggactgaggatcttcccaaagctgtcgtctttctcgaaccccaatggtatcgggtgctcgaaaaagactctgtgacactgaaatgccaaggggcctactctcccgaggacaactccacacagtggtttcataatgagtccctcatcagctctcaggccagctcttatttcattgatgccgctacagtggacgactccggcgagtatcggtgtcagaccaatctgtctacactgtctgaccccgtgcagcttgaggtccacattggatggttgctcttgcaagccccacgctgggttttcaaagaggaagatccaatccatctgcggtgccacagctggaaaaacaccgctctccacaaagtcacatacctgcaaaatggcaaaggacgcaaatacttccatcacaattccgatttttacattccgaaggctaccctgaaagacagcggcagctatttctgccggggactcgtcggctccaagaatgtgtcctccgaaaccgtgaatatcacgattacccaaggactggctgtgcctacaatctctagcttctttccgcctggataccaagtctccttctgtcttgtgatggtcctcctgtttgctgtggacacaggactgtacttttccgtg

SEQ ID NO: 36713 - DNA, 1434 bp, synthetic construct
  source 1..1434: mol_type = other DNA
atggccttaccagtgaccgccttgctcctgccgctggccttgctgctccacgccgccaggccggacatccagatgacacagagccctagcagcctgtctgccagcgtgggagacagagtgaccatcacatgcaagagcagccagagcctgctggactccgatggcaagacctacctgaactggtatcagcagaagcccggcaaggcccctaagctgctgatctacctggtgtccaagctggatagcggcgtgcccagcagattttctggcagcggcagcggaaccgacttcaccctgacaatatccagcctccagcctgaggacttcgccacctactactgctggcaaggcacccactttccattcaccttcggccagggcaccaaggtggaaatcaaaagaggcggaggcggaagtggaggcggaggatctggcggcggaggctctgaagtgcagctggttgaatcaggcggaggactggttcagcctggcggatctctgagactgtcttgtgccgccagcggctacaccttcaccagctactggatgaactgggtccgacaggcccctggcaaaggactggaatgggtcggaatgatcgaccccagcgacagcgagacacactacaaccacatcttcaaggaccgcttcaccatcagcgccgacaccagcaagaataccgcctacctccagatgaactccctgagagccgaggacaccgccgtgtactactgcgccagaaacctgtatctgttcggccagggaaccctggtcacagtgtcatctacgcgtggaatgaggactgaggatcttcccaaagctgtcgtctttctcgaaccccaatggtatcgggtgctcgaaaaagactctgtgacactgaaatgccaaggggcctactctcccgaggacaactccacacagtggtttcataatgagtccctcatcagctctcaggccagctcttatttcattgatgccgctacagtggacgactccggcgagtatcggtgtcagaccaatctgtctacactgtctgaccccgtgcagcttgaggtccacattggatggttgctcttgcaagccccacgctgggttttcaaagaggaagatccaatccatctgcggtgccacagctggaaaaacaccgctctccacaaagtcacatacctgcaaaatggcaaaggacgcaaatacttccatcacaattccgatttttacattccgaaggctaccctgaaagacagcggcagctatttctgccggggactcgtcggctccaagaatgtgtcctccgaaaccgtgaatatcacgattacccaaggactggctgtgcctacaatctctagcttctttccgcctggataccaagtctccttctgtcttgtgatggtcctcctgtttgctgtggacacaggactgtacttttccgtgaaa

SEQ ID NO: 36714 - DNA, 2166 bp, synthetic construct
  source 1..2166: mol_type = other DNA
atggccttaccagtgaccgccttgctcctgccgctggccttgctgctccacgccgccaggccggacatccagatgacacagagccctagcagcctgtctgccagcgtgggagacagagtgaccatcacatgcaagagcagccagagcctgctggactccgatggcaagacctacctgaactggtatcagcagaagcccggcaaggcccctaagctgctgatctacctggtgtccaagctggatagcggcgtgcccagcagattttctggcagcggcagcggaaccgacttcaccctgacaatatccagcctccagcctgaggacttcgccacctactactgctggcaaggcacccactttccattcaccttcggccagggcaccaaggtggaaatcaaaagactcgagggacagcctaaggccaatcctaccgtgacactgttccctccaagcagcgaagaactccaggccaacaaggccacacttgtgtgcctgatctccgacttctaccctggggctgtgacagtggcttggaaggccgatggatctcctgtgaaagccggcgtggaaaccaccaagccatccaagcagagcaacaacaaatacgccgccagctcctacctgagcctgacacctgagcagtggaagtcccacagatcctacagctgccaagtgacccacgaaggcagcaccgtggaaaagacagtggcccctacagagtgcagcggatcccagagcttcggcctgctggaccccaagctgtgctacctgctggatggcatcctgttcatctacggcgtgatcctgaccgccctgttcctgagagtgaagttcagcagaagcgccgacgcccctgcctaccagcagggacagaaccaactgtacaacgagctgaacctgggcagacgggaagagtacgacgtgctggacaagcggagaggcagggaccctgagatgggcggaaagccccagcggagaaagaacccccaggaaggactgtataacgaactccagaaagacaagatggccgaagcctacagcgagatcggcatgaagggcgagcggagaagaggcaagggccacgatggcctgtaccagggcctgagcaccgccaccaaggacacctatgacgccctgcacatgcaggccctgcctccaagaagggccaagcgatctggatctggagcaacaaacttctcactactcaaacaagcaggtgacgtggaggagaatcccgggcctactagtatggactggatttggcgcatccttttccttgtcggcgctgctaccggcgcgcattccttcgaagaagtgcagctggttgaatcaggcggaggactggttcagcctggcggatctctgagactgtcttgtgccgccagcggctacaccttcaccagctactggatgaactgggtccgacaggcccctggcaaaggactggaatgggtcggaatgatcgaccccagcgacagcgagacacactacaaccacatcttcaaggaccgcttcaccatcagcgccgacaccagcaagaataccgcctacctccagatgaactccctgagagccgaggacaccgccgtgtactactgcgccagaaacctgtatctgttcggccagggaaccctggtcacagtgtcatctacgcgtgcctctacaaagggaccctccgtgtttcctctggctcccagcagcaagtctacaagcggaggaacagccgctctgggctgcctggtcaaggattactttcccgagcctgtgaccgtgtcctggaatagcggagcactgacaagcggcgtgcacacctttccagccgtgctgcaaagcagcggcctgtactctctgagcagcgtggtcacagtgcctagctctagcctgggcacccagacctacatctgcaatgtgaaccacaagcctagcaacaccaaggtggacaagagagtggaacccaagagctgtggtaccatcactcaaggtttggcagtgtcaaccatctcatcattctttccacctggctaccaagtgtccttctgcctggtcatggtgctgctgttcgccgtggataccggcctgtacttcagcgtcaagaccaacatccggtccagcaccagagactggaaggaccacaagttcaagtggcggaaggaccctcaggacaag

SEQ ID NO: 36715 - DNA, 2211 bp, synthetic construct
  source 1..2211: mol_type = other DNA
atggccttaccagtgaccgccttgctcctgccgctggccttgctgctccacgccgccaggccggacatccagatgacacagagccctagcagcctgtctgccagcgtgggagacagagtgaccatcacatgcaagagcagccagagcctgctggactccgatggcaagacctacctgaactggtatcagcagaagcccggcaaggcccctaagctgctgatctacctggtgtccaagctggatagcggcgtgcccagcagattttctggcagcggcagcggaaccgacttcaccctgacaatatccagcctccagcctgaggacttcgccacctactactgctggcaaggcacccactttccattcaccttcggccagggcaccaaggtggaaatcaaaagactcgaggacctgaagaacgtgttcccacctgaggtggccgtgttcgagcctagcgaggccgagatcagccacacccagaaagccaccctcgtgtgcctggctaccggcttctaccccgaccatgtggaactgtcttggtgggtcaacggcaaagaggtgcacagcggcgtgtctaccgacccccagccactgaaagaacagcccgccctgaacgacagccggtactgcctgagcagcagactgagagtgtccgccaccttctggcagaacccccggaaccacttcagatgccaggtgcagttctacggcctgagcgagaacgacgagtggacccaggacagagccaagcccgtgacccagatcgtgtctgccgaagcctggggcagagccgattgcggatcccagagcttcggcctgctggaccccaagctgtgctacctgctggatggcatcctgttcatctacggcgtgatcctgaccgccctgttcctgagagtgaagttcagcagaagcgccgacgcccctgcctaccagcagggacagaaccaactgtacaacgagctgaacctgggcagacgggaagagtacgacgtgctggacaagcggagaggcagggaccctgagatgggcggaaagccccagcggagaaagaacccccaggaaggactgtataacgaactccagaaagacaagatggccgaagcctacagcgagatcggcatgaagggcgagcggagaagaggcaagggccacgatggcctgtaccagggcctgagcaccgccaccaaggacacctatgacgccctgcacatgcaggccctgcctccaagaagggccaagcgatctggatctggagcaacaaacttctcactactcaaacaagcaggtgacgtggaggagaatcccgggcctactagtatggactggatttggcgcatccttttccttgtcggcgctgctaccggcgcgcattccttcgaagaagtgcagctggttgaatcaggcggaggactggttcagcctggcggatctctgagactgtcttgtgccgccagcggctacaccttcaccagctactggatgaactgggtccgacaggcccctggcaaaggactggaatgggtcggaatgatcgaccccagcgacagcgagacacactacaaccacatcttcaaggaccgcttcaccatcagcgccgacaccagcaagaataccgcctacctccagatgaactccctgagagccgaggacaccgccgtgtactactgcgccagaaacctgtatctgttcggccagggaaccctggtcacagtgtcatctacgcgtatccagaaccctgatcctgccgtgtaccagctgcgggatagcaagagcagcgacaagagcgtgtgtctgttcaccgacttcgacagccagaccaacgtgtcccagagcaaggactccgacgtgtacatcaccgataagaccgtgctggacatgcggagcatggacttcaagagcaactccgccgtggcctggtccaacaagtccgatttcgcctgcgccaacgccttcaacaacagcattatccccgaggacacattcttcccaagccccgagagcagctgcggtaccatcactcaaggtttggcagtgtcaaccatctcatcattctttccacctggctaccaagtgtccttctgcctggtcatggtgctgctgttcgccgtggataccggcctgtacttcagcgtcaagaccaacatccggtccagcaccagagactggaaggaccacaagttcaagtggcggaaggaccctcaggacaag

SEQ ID NO: 36716 - DNA, 2136 bp, synthetic construct
  source 1..2136: mol_type = other DNA
atggccttaccagtgaccgccttgctcctgccgctggccttgctgctccacgccgccaggccggacatccagatgacacagagccctagcagcctgtctgccagcgtgggagacagagtgaccatcacatgcaagagcagccagagcctgctggactccgatggcaagacctacctgaactggtatcagcagaagcccggcaaggcccctaagctgctgatctacctggtgtccaagctggatagcggcgtgcccagcagattttctggcagcggcagcggaaccgacttcaccctgacaatatccagcctccagcctgaggacttcgccacctactactgctggcaaggcacccactttccattcaccttcggccagggcaccaaggtggaaatcaaaagactcgaggacctgaagaacgtgttcccacctgaggtggccgtgttcgagcctagcgaggccgagatcagccacacccagaaagccaccctcgtgtgcctggctaccggcttctaccccgaccatgtggaactgtcttggtgggtcaacggcaaagaggtgcacagcggcgtgtctaccgacccccagccactgaaagaacagcccgccctgaacgacagccggtactgcctgagcagcagactgagagtgtccgccaccttctggcagaacccccggaaccacttcagatgccaggtgcagttctacggcctgagcgagaacgacgagtggacccaggacagagccaagcccgtgacccagatcgtgtctgccgaagcctggggcagagccgattgcggatcccagagcttcggcctgctggaccccaagctgtgctacctgctggatggcatcctgttcatctacggcgtgatcctgaccgccctgttcctgagagtgaagttcagcagaagcgccgacgcccctgcctaccagcagggacagaaccaactgtacaacgagctgaacctgggcagacgggaagagtacgacgtgctggacaagcggagaggcagggaccctgagatgggcggaaagccccagcggagaaagaacccccaggaaggactgtataacgaactccagaaagacaagatggccgaagcctacagcgagatcggcatgaagggcgagcggagaagaggcaagggccacgatggcctgtaccagggcctgagcaccgccaccaaggacacctatgacgccctgcacatgcaggccctgcctccaagaagggccaagcgatctggatctggagcaacaaacttctcactactcaaacaagcaggtgacgtggaggagaatcccgggcctactagtatggactggatttggcgcatccttttccttgtcggcgctgctaccggcgcgcattccttcgaagaagtgcagctggttgaatcaggcggaggactggttcagcctggcggatctctgagactgtcttgtgccgccagcggctacaccttcaccagctactggatgaactgggtccgacaggcccctggcaaaggactggaatgggtcggaatgatcgaccccagcgacagcgagacacactacaaccacatcttcaaggaccgcttcaccatcagcgccgacaccagcaagaataccgcctacctccagatgaactccctgagagccgaggacaccgccgtgtactactgcgccagaaacctgtatctgttcggccagggaaccctggtcacagtgtcatctacgcgtatccagaaccctgatcctgccgtgtaccagctgcgggatagcaagagcagcgacaagagcgtgtgtctgttcaccgacttcgacagccagaccaacgtgtcccagagcaaggactccgacgtgtacatcaccgataagaccgtgctggacatgcggagcatggacttcaagagcaactccgccgtggcctggtccaacaagtccgatttcgcctgcgccaacgccttcaacaacagcattatccccgaggacacattcttcccaagccccgagagcagctgcggtaccatcactcaaggtttggcagtgtcaaccatctcatcattctttccacctggctaccaagtgtccttctgcctggtcatggtgctgctgttcgccgtggataccggcctgtacttcagcgtc

SEQ ID NO: 36717 - DNA, 2139 bp, synthetic construct
  source 1..2139: mol_type = other DNA
atggccttaccagtgaccgccttgctcctgccgctggccttgctgctccacgccgccaggccggacatccagatgacacagagccctagcagcctgtctgccagcgtgggagacagagtgaccatcacatgcaagagcagccagagcctgctggactccgatggcaagacctacctgaactggtatcagcagaagcccggcaaggcccctaagctgctgatctacctggtgtccaagctggatagcggcgtgcccagcagattttctggcagcggcagcggaaccgacttcaccctgacaatatccagcctccagcctgaggacttcgccacctactactgctggcaaggcacccactttccattcaccttcggccagggcaccaaggtggaaatcaaaagactcgaggacctgaagaacgtgttcccacctgaggtggccgtgttcgagcctagcgaggccgagatcagccacacccagaaagccaccctcgtgtgcctggctaccggcttctaccccgaccatgtggaactgtcttggtgggtcaacggcaaagaggtgcacagcggcgtgtctaccgacccccagccactgaaagaacagcccgccctgaacgacagccggtactgcctgagcagcagactgagagtgtccgccaccttctggcagaacccccggaaccacttcagatgccaggtgcagttctacggcctgagcgagaacgacgagtggacccaggacagagccaagcccgtgacccagatcgtgtctgccgaagcctggggcagagccgattgcggatcccagagcttcggcctgctggaccccaagctgtgctacctgctggatggcatcctgttcatctacggcgtgatcctgaccgccctgttcctgagagtgaagttcagcagaagcgccgacgcccctgcctaccagcagggacagaaccaactgtacaacgagctgaacctgggcagacgggaagagtacgacgtgctggacaagcggagaggcagggaccctgagatgggcggaaagccccagcggagaaagaacccccaggaaggactgtataacgaactccagaaagacaagatggccgaagcctacagcgagatcggcatgaagggcgagcggagaagaggcaagggccacgatggcctgtaccagggcctgagcaccgccaccaaggacacctatgacgccctgcacatgcaggccctgcctccaagaagggccaagcgatctggatctggagcaacaaacttctcactactcaaacaagcaggtgacgtggaggagaatcccgggcctactagtatggactggatttggcgcatccttttccttgtcggcgctgctaccggcgcgcattccttcgaagaagtgcagctggttgaatcaggcggaggactggttcagcctggcggatctctgagactgtcttgtgccgccagcggctacaccttcaccagctactggatgaactgggtccgacaggcccctggcaaaggactggaatgggtcggaatgatcgaccccagcgacagcgagacacactacaaccacatcttcaaggaccgcttcaccatcagcgccgacaccagcaagaataccgcctacctccagatgaactccctgagagccgaggacaccgccgtgtactactgcgccagaaacctgtatctgttcggccagggaaccctggtcacagtgtcatctacgcgtatccagaaccctgatcctgccgtgtaccagctgcgggatagcaagagcagcgacaagagcgtgtgtctgttcaccgacttcgacagccagaccaacgtgtcccagagcaaggactccgacgtgtacatcaccgataagaccgtgctggacatgcggagcatggacttcaagagcaactccgccgtggcctggtccaacaagtccgatttcgcctgcgccaacgccttcaacaacagcattatccccgaggacacattcttcccaagccccgagagcagctgcggtaccatcactcaaggtttggcagtgtcaaccatctcatcattctttccacctggctaccaagtgtccttctgcctggtcatggtgctgctgttcgccgtggataccggcctgtacttcagcgtcaag

SEQ ID NO: 36718 - DNA, 2142 bp, synthetic construct
  source 1..2142: mol_type = other DNA
atggccttaccagtgaccgccttgctcctgccgctggccttgctgctccacgccgccaggccggacatccagatgacacagagccctagcagcctgtctgccagcgtgggagacagagtgaccatcacatgcaagagcagccagagcctgctggactccgatggcaagacctacctgaactggtatcagcagaagcccggcaaggcccctaagctgctgatctacctggtgtccaagctggatagcggcgtgcccagcagattttctggcagcggcagcggaaccgacttcaccctgacaatatccagcctccagcctgaggacttcgccacctactactgctggcaaggcacccactttccattcaccttcggccagggcaccaaggtggaaatcaaaagactcgaggacctgaagaacgtgttcccacctgaggtggccgtgttcgagcctagcgaggccgagatcagccacacccagaaagccaccctcgtgtgcctggctaccggcttctaccccgaccatgtggaactgtcttggtgggtcaacggcaaagaggtgcacagcggcgtgtctaccgacccccagccactgaaagaacagcccgccctgaacgacagccggtactgcctgagcagcagactgagagtgtccgccaccttctggcagaacccccggaaccacttcagatgccaggtgcagttctacggcctgagcgagaacgacgagtggacccaggacagagccaagcccgtgacccagatcgtgtctgccgaagcctggggcagagccgattgcggatcccagagcttcggcctgctggaccccaagctgtgctacctgctggatggcatcctgttcatctacggcgtgatcctgaccgccctgttcctgagagtgaagttcagcagaagcgccgacgcccctgcctaccagcagggacagaaccaactgtacaacgagctgaacctgggcagacgggaagagtacgacgtgctggacaagcggagaggcagggaccctgagatgggcggaaagccccagcggagaaagaacccccaggaaggactgtataacgaactccagaaagacaagatggccgaagcctacagcgagatcggcatgaagggcgagcggagaagaggcaagggccacgatggcctgtaccagggcctgagcaccgccaccaaggacacctatgacgccctgcacatgcaggccctgcctccaagaagggccaagcgatctggatctggagcaacaaacttctcactactcaaacaagcaggtgacgtggaggagaatcccgggcctactagtatggactggatttggcgcatccttttccttgtcggcgctgctaccggcgcgcattccttcgaagaagtgcagctggttgaatcaggcggaggactggttcagcctggcggatctctgagactgtcttgtgccgccagcggctacaccttcaccagctactggatgaactgggtccgacaggcccctggcaaaggactggaatgggtcggaatgatcgaccccagcgacagcgagacacactacaaccacatcttcaaggaccgcttcaccatcagcgccgacaccagcaagaataccgcctacctccagatgaactccctgagagccgaggacaccgccgtgtactactgcgccagaaacctgtatctgttcggccagggaaccctggtcacagtgtcatctacgcgtatccagaaccctgatcctgccgtgtaccagctgcgggatagcaagagcagcgacaagagcgtgtgtctgttcaccgacttcgacagccagaccaacgtgtcccagagcaaggactccgacgtgtacatcaccgataagaccgtgctggacatgcggagcatggacttcaagagcaactccgccgtggcctggtccaacaagtccgatttcgcctgcgccaacgccttcaacaacagcattatccccgaggacacattcttcccaagccccgagagcagctgcggtaccatcactcaaggtttggcagtgtcaaccatctcatcattctttccacctggctaccaagtgtccttctgcctggtcatggtgctgctgttcgccgtggataccggcctgtacttcagcgtcaagacc

SEQ ID NO: 36719 - DNA, 1953 bp, synthetic construct
  source 1..1953: mol_type = other DNA
atggccttaccagtgaccgccttgctcctgccgctggccttgctgctccacgccgccaggccggacatccagatgacacagagccctagcagcctgtctgccagcgtgggagacagagtgaccatcacatgcaagagcagccagagcctgctggactccgatggcaagacctacctgaactggtatcagcagaagcccggcaaggcccctaagctgctgatctacctggtgtccaagctggatagcggcgtgcccagcagattttctggcagcggcagcggaaccgacttcaccctgacaatatccagcctccagcctgaggacttcgccacctactactgctggcaaggcacccactttccattcaccttcggccagggcaccaaggtggaaatcaaaagactcgagggacagcctaaggccaatcctaccgtgacactgttccctccaagcagcgaagaactccaggccaacaaggccacacttgtgtgcctgatctccgacttctaccctggggctgtgacagtggcttggaaggccgatggatctcctgtgaaagccggcgtggaaaccaccaagccatccaagcagagcaacaacaaatacgccgccagctcctacctgagcctgacacctgagcagtggaagtcccacagatcctacagctgccaagtgacccacgaaggcagcaccgtggaaaagacagtggcccctacagagtgcagcggatccctgggagagcctcagctgtgctatatcctggacgccatcctgtttctgtacggcatcgtgctgaccctgctgtactgccggctgaagatccaagtgcggaaggccgccatcaccagctacgagaaatccgacggcgtgtacaccggcctgagcaccagaaatcaagagacatacgagacactgaagcacgaaaagcctccacaaagggccaagcgatctggatctggagcaacaaacttctcactactcaaacaagcaggtgacgtggaggagaatcccgggcctactagtatggactggatttggcgcatccttttccttgtcggcgctgctaccggcgcgcattccttcgaagaagtgcagctggttgaatcaggcggaggactggttcagcctggcggatctctgagactgtcttgtgccgccagcggctacaccttcaccagctactggatgaactgggtccgacaggcccctggcaaaggactggaatgggtcggaatgatcgaccccagcgacagcgagacacactacaaccacatcttcaaggaccgcttcaccatcagcgccgacaccagcaagaataccgcctacctccagatgaactccctgagagccgaggacaccgccgtgtactactgcgccagaaacctgtatctgttcggccagggaaccctggtcacagtgtcatctacgcgtgcctctacaaagggaccctccgtgtttcctctggctcccagcagcaagtctacaagcggaggaacagccgctctgggctgcctggtcaaggattactttcccgagcctgtgaccgtgtcctggaatagcggagcactgacaagcggcgtgcacacctttccagccgtgctgcaaagcagcggcctgtactctctgagcagcgtggtcacagtgcctagctctagcctgggcacccagacctacatctgcaatgtgaaccacaagcctagcaacaccaaggtggacaagagagtggaacccaagagctgtggtaccctcggagaaccacagctctgttacattctggatgctatcctgttcctctatgggatcgtcctgacactcctgtattgcagactcaaaattcaagttcgcaaagccgccattacctcttacgagaagagtgatggggtgtacacaggactgtctacccggaatcaagaaacctacgaaaccctcaaacatgagaagccacctcagtaa

SEQ ID NO: 36720 - DNA, 1860 bp, synthetic construct
  source 1..1860: mol_type = other DNA
atggccttaccagtgaccgccttgctcctgccgctggccttgctgctccacgccgccaggccggacatccagatgacacagagccctagcagcctgtctgccagcgtgggagacagagtgaccatcacatgcaagagcagccagagcctgctggactccgatggcaagacctacctgaactggtatcagcagaagcccggcaaggcccctaagctgctgatctacctggtgtccaagctggatagcggcgtgcccagcagattttctggcagcggcagcggaaccgacttcaccctgacaatatccagcctccagcctgaggacttcgccacctactactgctggcaaggcacccactttccattcaccttcggccagggcaccaaggtggaaatcaaaagactcgaggacctgaagaacgtgttcccacctgaggtggccgtgttcgagcctagcgaggccgagatcagccacacccagaaagccaccctcgtgtgcctggctaccggcttctaccccgaccatgtggaactgtcttggtgggtcaacggcaaagaggtgcacagcggcgtgtgtaccgacccccagccactgaaagaacagcccgccctgaacgacagccggtactgcctgagcagcagactgagagtgtccgccaccttctggcagaacccccggaaccacttcagatgccaggtgcagttctacggcctgagcgagaacgacgagtggacccaggacagagccaagcccgtgacccagatcgtgtctgccgaagcctggggcagagccgattgcggctttaccagcgagagctaccagcagggcgtgctgagcgcctactacatgtacttgttgctgctgctgaagtccgtggtgtacttcgccatcatcacatgctgcctgctgcggagaaccgccttctgctgcaacggcgagaagtctagggccaagcgatctggatctggagcaacaaacttctcactactcaaacaagcaggtgacgtggaggagaatcccgggcctactagtatggactggatttggcgcatccttttccttgtcggcgctgctaccggcgcgcattccttcgaagaagtgcagctggttgaatcaggcggaggactggttcagcctggcggatctctgagactgtcttgtgccgccagcggctacaccttcaccagctactggatgaactgggtccgacaggcccctggcaaaggactggaatgggtcggaatgatcgaccccagcgacagcgagacacactacaaccacatcttcaaggaccgcttcaccatcagcgccgacaccagcaagaataccgcctacctccagatgaactccctgagagccgaggacaccgccgtgtactactgcgccagaaacctgtatctgttcggccagggaaccctggtcacagtgtcatctacgcgtatccagaaccctgatcctgccgtgtaccagctgcgggatagcaagagcagcgacaagagcgtgtgtctgttcaccgacttcgacagccagaccaacgtgtcccagagcaaggactccgacgtgtacatcaccgataagtgcgtgctggacatgcggagcatggacttcaagagcaactccgccgtggcctggtccaacaagtccgatttcgcctgcgccaacgccttcaacaacagcattatccccgaggacacattcttcccaagccccgagagcagctgcgacgtgaagctggtggaaaagagcttcgagacagacaccaacctgaacttccagaacctgagcgtgatcggcttcagaatcctgctgctgaaagtggccggctttaacctgctgatgaccctgcggctgtggtccagc

SEQ ID NO: 36721 - DNA, 1881 bp, synthetic construct
  source 1..1881: mol_type = other DNA
atggccttaccagtgaccgccttgctcctgccgctggccttgctgctccacgccgccaggccggacatccagatgacacagagccctagcagcctgtctgccagcgtgggagacagagtgaccatcacatgcaagagcagccagagcctgctggactccgatggcaagacctacctgaactggtatcagcagaagcccggcaaggcccctaagctgctgatctacctggtgtccaagctggatagcggcgtgcccagcagattttctggcagcggcagcggaaccgacttcaccctgacaatatccagcctccagcctgaggacttcgccacctactactgctggcaaggcacccactttccattcaccttcggccagggcaccaaggtggaaatcaaaagactcgaggacaagcagctggacgccgacgtgtcccccaagcctaccatcttcctgccctctatcgccgagacaaagctccagaaggccggcacctacctgtgcctgctggaaaagttcttcccagatgtgattaagatccactggcaggaaaagaagtccaacaccatcctgggcagccaggaaggcaacaccatgaagaccaacgacacctacatgaagttcagctggctgaccgtgcccgagaagtccctggacaaagaacacagatgcatcgtgcggcacgaaaacaacaagaacggcgtggaccaggaaatcatcttcccacccatcaagaccgatgtgattacaatggaccccaaggacaactgctccaaggacgccaacgataccctgctgctccagctgaccaacaccagcgcctactacatgtacgagatcctgctgggcaaggccaccctgtacgccgtgctggtgtctgccctggtgctgatggctatggtcaagcggaaggacagccggggaagggccaagcgatctggatctggagcaacaaacttctcactactcaaacaagcaggtgacgtggaggagaatcccgggcctactagtatggactggatttggcgcatccttttccttgtcggcgctgctaccggcgcgcattccttcgaagaagtgcagctggttgaatcaggcggaggactggttcagcctggcggatctctgagactgtcttgtgccgccagcggctacaccttcaccagctactggatgaactgggtccgacaggcccctggcaaaggactggaatgggtcggaatgatcgaccccagcgacagcgagacacactacaaccacatcttcaaggaccgcttcaccatcagcgccgacaccagcaagaataccgcctacctccagatgaactccctgagagccgaggacaccgccgtgtactactgcgccagaaacctgtatctgttcggccagggaaccctggtcacagtgtcatctacgcgtagccagcctcacaccaagcccagcgtgttcgtgatgaagaacggcaccaacgtggcctgcctcgtgaaagagttctaccccaaggacatcaggatcaacctggtgtccagcaagaagatcaccgagttcgaccccgccatcgtgatctcccccagcggcaagtacaacgccgtgaagctggggaagtatgaggacagcaacagcgtgacctgctccgtgcagcacgacaacaagaccgtgcacagcaccgactttgaagtgaaaaccgactccaccgaccacgtgaagcccaaagagacagagaacaccaagcagcccagcaagagctgccacaagcccaaggccatcgtgcacaccgagaaagtgaacatgatgagcctgaccgtgatcggcttcagaatcctgctgctgaaagtggccggctttaacctgctgatgaccctgcggctgtggtccagctaa

SEQ ID NO: 36722 - DNA, 1881 bp, synthetic construct
  source 1..1881: mol_type = other DNA
atggccttaccagtgaccgccttgctcctgccgctggccttgctgctccacgccgccaggccggacatccagatgacacagagccctagcagcctgtctgccagcgtgggagacagagtgaccatcacatgcaagagcagccagagcctgctggactccgatggcaagacctacctgaactggtatcagcagaagcccggcaaggcccctaagctgctgatctacctggtgtccaagctggatagcggcgtgcccagcagattttctggcagcggcagcggaaccgacttcaccctgacaatatccagcctccagcctgaggacttcgccacctactactgctggcaaggcacccactttccattcaccttcggccagggcaccaaggtggaaatcaaaagactcgaggacaagcagctggacgccgacgtgtcccccaagcctaccatcttcctgccctctatcgccgagacaaagctccagaaggccggcacctacctgtgcctgctggaaaagttcttcccagatgtgattaagatccactggcaggaaaagaagtccaacaccatcctgggcagccaggaaggcaacaccatgaagaccaacgacacctacatgaagttcagctggctgaccgtgcccgagaagtccctggacaaagaacacagatgcatcgtgcggcacgaaaacaacaagaacggcgtggaccaggaaatcatcttcccacccatcaagaccgatgtgattacaatggaccccaaggacaactgctccaaggacgccaacgataccctgctgctccagctgaccaacaccagcgccaccatcctgtacgagatcctgctgggcaaggccaccctgtacgccgtgctggtgtctgccctggtgctgatggctatggtcaagcggaaggacagccggggaagggccaagcgatctggatctggagcaacaaacttctcactactcaaacaagcaggtgacgtggaggagaatcccgggcctactagtatggactggatttggcgcatccttttccttgtcggcgctgctaccggcgcgcattccttcgaagaagtgcagctggttgaatcaggcggaggactggttcagcctggcggatctctgagactgtcttgtgccgccagcggctacaccttcaccagctactggatgaactgggtccgacaggcccctggcaaaggactggaatgggtcggaatgatcgaccccagcgacagcgagacacactacaaccacatcttcaaggaccgcttcaccatcagcgccgacaccagcaagaataccgcctacctccagatgaactccctgagagccgaggacaccgccgtgtactactgcgccagaaacctgtatctgttcggccagggaaccctggtcacagtgtcatctacgcgtagccagcctcacaccaagcccagcgtgttcgtgatgaagaacggcaccaacgtggcctgcctcgtgaaagagttctaccccaaggacatcaggatcaacctggtgtccagcaagaagatcaccgagttcgaccccgccatcgtgatctcccccagcggcaagtacaacgccgtgaagctggggaagtatgaggacagcaacagcgtgacctgctccgtgcagcacgacaacaagaccgtgcacagcaccgactttgaagtgaaaaccgactccaccgaccacgtgaagcccaaagagacagagaacaccaagcagcccagcaagagctgccacaagcccaaggccatcgtgcacaccgagaaagtgaacatgatgagcctgaccgtgatcggcttcagaatcctgctgctgaaagtggccggctttaacctgctgatgaccctgcggctgtggtccagctaa

SEQ ID NO: 36723 - DNA, 1881 bp, synthetic construct
  source 1..1881: mol_type = other DNA
atggccttaccagtgaccgccttgctcctgccgctggccttgctgctccacgccgccaggccggacatccagatgacacagagccctagcagcctgtctgccagcgtgggagacagagtgaccatcacatgcaagagcagccagagcctgctggactccgatggcaagacctacctgaactggtatcagcagaagcccggcaaggcccctaagctgctgatctacctggtgtccaagctggatagcggcgtgcccagcagattttctggcagcggcagcggaaccgacttcaccctgacaatatccagcctccagcctgaggacttcgccacctactactgctggcaaggcacccactttccattcaccttcggccagggcaccaaggtggaaatcaaaagactcgaggacaagcagctggacgccgacgtgtcccccaagcctaccatcttcctgccctctatcgccgagacaaagctccagaaggccggcacctacctgtgcctgctggaaaagttcttcccagatgtgattaagatccactggcaggaaaagaagtccaacaccatcctgggcagccaggaaggcaacaccatgaagaccaacgacacctacatgaagttcagctggctgaccgtgcccgagaagtccctggacaaagaacacagatgcatcgtgcggcacgaaaacaacaagaacggcgtggaccaggaaatcatcttcccacccatcaagaccgatgtgattacaatggaccccaaggacaactgctccaaggacgccaacgataccctgctgctccagctgaccaacaccagcgcctactacatgtacgagatcctgctgggcaaggccaccctgtacgccgtgctggtgtctgccctggtgctgatggctatggtcaagcggaaggacagccggggaagggccaagcgatctggatctggagcaacaaacttctcactactcaaacaagcaggtgacgtggaggagaatcccgggcctactagtatggactggatttggcgcatccttttccttgtcggcgctgctaccggcgcgcattccttcgaagaagtgcagctggttgaatcaggcggaggactggttcagcctggcggatctctgagactgtcttgtgccgccagcggctacaccttcaccagctactggatgaactgggtccgacaggcccctggcaaaggactggaatgggtcggaatgatcgaccccagcgacagcgagacacactacaaccacatcttcaaggaccgcttcaccatcagcgccgacaccagcaagaataccgcctacctccagatgaactccctgagagccgaggacaccgccgtgtactactgcgccagaaacctgtatctgttcggccagggaaccctggtcacagtgtcatctacgcgtagccagcctcacaccaagcccagcgtgttcgtgatgaagaacggcaccaacgtggcctgcctcgtgaaagagttctaccccaaggacatcaggatcaacctggtgtccagcaagaagatcaccgagttcgaccccgccatcgtgatctcccccagcggcaagtacaacgccgtgaagctggggaagtacgaggacagcaacagcgtgacctgctccgtgcagcacgacaacaagaccgtgcacagcaccgactttgaagtgaaaaccgactccaccgaccacgtgaagcccaaagagacagagaacaccaagcagcccagcaagagctgccacaagcccaaggccatcgtgcacaccgagaaagtgaacatgatgagcctgaccgtgctgggcttcagaatcctgctgctgaaagtggccggctttaacctgctgatgaccctgcggctgtggtccagctaa

SEQ ID NO: 36724 - DNA, 1881 bp, synthetic construct
  source 1..1881: mol_type = other DNA
atggccttaccagtgaccgccttgctcctgccgctggccttgctgctccacgccgccaggccggacatccagatgacacagagccctagcagcctgtctgccagcgtgggagacagagtgaccatcacatgcaagagcagccagagcctgctggactccgatggcaagacctacctgaactggtatcagcagaagcccggcaaggcccctaagctgctgatctacctggtgtccaagctggatagcggcgtgcccagcagattttctggcagcggcagcggaaccgacttcaccctgacaatatccagcctccagcctgaggacttcgccacctactactgctggcaaggcacccactttccattcaccttcggccagggcaccaaggtggaaatcaaaagactcgaggacaagcagctggacgccgacgtgtcccccaagcctaccatcttcctgccctctatcgccgagacaaagctccagaaggccggcacctacctgtgcctgctggaaaagttcttcccagatgtgattaagatccactggcaggaaaagaagtccaacaccatcctgggcagccaggaaggcaacaccatgaagaccaacgacacctacatgaagttcagctggctgaccgtgcccgagaagtccctggacaaagaacacagatgcatcgtgcggcacgaaaacaacaagaacggcgtggaccaggaaatcatcttcccacccatcaagaccgatgtgattacaatggaccccaaggacaactgctccaaggacgccaacgataccctgctgctccagctgaccaacaccagcgccaccatcctgtacgagatcctgctgggcaaggccaccctgtacgccgtgctggtgtctgccctggtgctgatggctatggtcaagcggaaggacagccggggaagggccaagcgatctggatctggagcaacaaacttctcactactcaaacaagcaggtgacgtggaggagaatcccgggcctactagtatggactggatttggcgcatccttttccttgtcggcgctgctaccggcgcgcattccttcgaagaagtgcagctggttgaatcaggcggaggactggttcagcctggcggatctctgagactgtcttgtgccgccagcggctacaccttcaccagctactggatgaactgggtccgacaggcccctggcaaaggactggaatgggtcggaatgatcgaccccagcgacagcgagacacactacaaccacatcttcaaggaccgcttcaccatcagcgccgacaccagcaagaataccgcctacctccagatgaactccctgagagccgaggacaccgccgtgtactactgcgccagaaacctgtatctgttcggccagggaaccctggtcacagtgtcatctacgcgtagccagcctcacaccaagcccagcgtgttcgtgatgaagaacggcaccaacgtggcctgcctcgtgaaagagttctaccccaaggacatcaggatcaacctggtgtccagcaagaagatcaccgagttcgaccccgccatcgtgatctcccccagcggcaagtacaacgccgtgaagctggggaagtacgaggacagcaacagcgtgacctgctccgtgcagcacgacaacaagaccgtgcacagcaccgactttgaagtgaaaaccgactccaccgaccacgtgaagcccaaagagacagagaacaccaagcagcccagcaagagctgccacaagcccaaggccatcgtgcacaccgagaaagtgaacatgatgagcctgaccgtgctgggcttcagaatcctgctgctgaaagtggccggctttaacctgctgatgaccctgcggctgtggtccagctaa

SEQ ID NO: 36725 - DNA, 1863 bp, synthetic construct
  source 1..1863: mol_type = other DNA
atggccttaccagtgaccgccttgctcctgccgctggccttgctgctccacgccgccaggccggacatccagatgacacagagccctagcagcctgtctgccagcgtgggagacagagtgaccatcacatgcaagagcagccagagcctgctggactccgatggcaagacctacctgaactggtatcagcagaagcccggcaaggcccctaagctgctgatctacctggtgtccaagctggatagcggcgtgcccagcagattttctggcagcggcagcggaaccgacttcaccctgacaatatccagcctccagcctgaggacttcgccacctactactgctggcaaggcacccactttccattcaccttcggccagggcaccaaggtggaaatcaaaagactcgaggacctgaagaacgtgttcccacctgaggtggccgtgttcgagcctagcgaggccgagatcagccacacccagaaagccaccctcgtgtgcctggctaccggcttctaccccgaccatgtggaactgtcttggtgggtcaacggcaaagaggtgcacagcggcgtgtgtaccgacccccagccactgaaagaacagcccgccctgaacgacagccggtactgcctgagcagcagactgagagtgtccgccaccttctggcagaacccccggaaccacttcagatgccaggtgcagttctacggcctgagcgagaacgacgagtggacccaggacagagccaagcccgtgacccagatcgtgtctgccgaagcctggggcagagccgattgcggctttaccagcgagagctaccagcagggcgtgctgagcgccaccatcctgtacttgttgctgctgctgaagtccgtggtgtacttcgccatcatcacatgctgcctgctgcggagaaccgccttctgctgcaacggcgagaagtctagggccaagcgatctggatctggagcaacaaacttctcactactcaaacaagcaggtgacgtggaggagaatcccgggcctactagtatggactggatttggcgcatccttttccttgtcggcgctgctaccggcgcgcattccttcgaagaagtgcagctggttgaatcaggcggaggactggttcagcctggcggatctctgagactgtcttgtgccgccagcggctacaccttcaccagctactggatgaactgggtccgacaggcccctggcaaaggactggaatgggtcggaatgatcgaccccagcgacagcgagacacactacaaccacatcttcaaggaccgcttcaccatcagcgccgacaccagcaagaataccgcctacctccagatgaactccctgagagccgaggacaccgccgtgtactactgcgccagaaacctgtatctgttcggccagggaaccctggtcacagtgtcatctacgcgtatccagaaccctgatcctgccgtgtaccagctgcgggatagcaagagcagcgacaagagcgtgtgtctgttcaccgacttcgacagccagaccaacgtgtcccagagcaaggactccgacgtgtacatcaccgataagtgcgtgctggacatgcggagcatggacttcaagagcaactccgccgtggcctggtccaacaagtccgatttcgcctgcgccaacgccttcaacaacagcattatccccgaggacacattcttcccaagccccgagagcagctgcgacgtgaagctggtggaaaagagcttcgagacagacaccaacctgaacttccagaacctgagcgtgatcggcctgcggatgctgttcgccaaaaccgtggccgtgaacttcctgctgaccgccaagctgttcttcctctaa

SEQ ID NO: 36726 - DNA, 1950 bp, synthetic construct
  source 1..1950: mol_type = other DNA
atggccttaccagtgaccgccttgctcctgccgctggccttgctgctccacgccgccaggccggacatccagatgacacagagccctagcagcctgtctgccagcgtgggagacagagtgaccatcacatgcaagagcagccagagcctgctggactccgatggcaagacctacctgaactggtatcagcagaagcccggcaaggcccctaagctgctgatctacctggtgtccaagctggatagcggcgtgcccagcagattttctggcagcggcagcggaaccgacttcaccctgacaatatccagcctccagcctgaggacttcgccacctactactgctggcaaggcacccactttccattcaccttcggccagggcaccaaggtggaaatcaaaagactcgaggacctgaagaacgtgttcccacctgaggtggccgtgttcgagcctagcgaggccgagatcagccacacccagaaagccaccctcgtgtgcctggctaccggcttctaccccgaccatgtggaactgtcttggtgggtcaacggcaaagaggtgcacagcggcgtgtctaccgacccccagccactgaaagaacagcccgccctgaacgacagccggtactgcctgagcagcagactgagagtgtccgccaccttctggcagaacccccggaaccacttcagatgccaggtgcagttctacggcctgagcgagaacgacgagtggacccaggacagagccaagcccgtgacccagatcgtgtctgccgaagcctggggcagagccgattgcggatcctccaaggacgccaacgataccctgctgctccagctgaccaacaccagcgcctactacatgtacttgttgctgctgctgaagtccgtggtgtacttcgccatcatcacatgctgcctgctgcggagaaccgccttctgctgcaacggcgagaagtctagggccaagcgatctggatctggagcaacaaacttctcactactcaaacaagcaggtgacgtggaggagaatcccgggcctactagtatggactggatttggcgcatccttttccttgtcggcgctgctaccggcgcgcattccttcgaagaagtgcagctggttgaatcaggcggaggactggttcagcctggcggatctctgagactgtcttgtgccgccagcggctacaccttcaccagctactggatgaactgggtccgacaggcccctggcaaaggactggaatgggtcggaatgatcgaccccagcgacagcgagacacactacaaccacatcttcaaggaccgcttcaccatcagcgccgacaccagcaagaataccgcctacctccagatgaactccctgagagccgaggacaccgccgtgtactactgcgccagaaacctgtatctgttcggccagggaaccctggtcacagtgtcatctacgcgtatccagaaccctgatcctgccgtgtaccagctgcgggatagcaagagcagcgacaagagcgtgtgtctgttcaccgacttcgacagccagaccaacgtgtcccagagcaaggactccgacgtgtacatcaccgataagaccgtgctggacatgcggagcatggacttcaagagcaactccgccgtggcctggtccaacaagtccgatttcgcctgcgccaacgccttcaacaacagcattatccccgaggacacattcttcccaagccccgagagcagctgcggtaccgaagtgaaaaccgactccaccgaccacgtgaagcccaaagagacagagaacaccaagcagcccagcaagagctgccacaagcccaaggccatcgtgcacaccgagaaagtgaacatgatgagcctgaccgtgctgggcctgcggatgctgttcgccaaaaccgtggccgtgaacttcctgctgaccgccaagctgttcttcctctaa

SEQ ID NO: 36727 - DNA, 1860 bp, synthetic construct
  source 1..1860: mol_type = other DNA
atggccttaccagtgaccgccttgctcctgccgctggccttgctgctccacgccgccaggccggacatccagatgacacagagccctagcagcctgtctgccagcgtgggagacagagtgaccatcacatgcaagagcagccagagcctgctggactccgatggcaagacctacctgaactggtatcagcagaagcccggcaaggcccctaagctgctgatctacctggtgtccaagctggatagcggcgtgcccagcagattttctggcagcggcagcggaaccgacttcaccctgacaatatccagcctccagcctgaggacttcgccacctactactgctggcaaggcacccactttccattcaccttcggccagggcaccaaggtggaaatcaaaagactcgaggacctgaagaacgtgttcccacctgaggtggccgtgttcgagcctagcgaggccgagatcagccacacccagaaagccaccctcgtgtgcctggctaccggcttctaccccgaccatgtggaactgtcttggtgggtcaacggcaaagaggtgcacagcggcgtgtgtaccgacccccagccactgaaagaacagcccgccctgaacgacagccggtactgcctgagcagcagactgagagtgtccgccaccttctggcagaacccccggaaccacttcagatgccaggtgcagttctacggcctgagcgagaacgacgagtggacccaggacagagccaagcccgtgacccagatcgtgtctgccgaagcctggggcagagccgattgcgacgtgaagctggtggaaaagagcttcgagacagacaccaacctgaacttccagaacctgagcgtgatcggcttcagaatcctgctgctgaaagtggccggctttaacctgctgatgaccctgcggctgtggtccagcagggccaagcgatctggatctggagcaacaaacttctcactactcaaacaagcaggtgacgtggaggagaatcccgggcctactagtatggactggatttggcgcatccttttccttgtcggcgctgctaccggcgcgcattccttcgaagaagtgcagctggttgaatcaggcggaggactggttcagcctggcggatctctgagactgtcttgtgccgccagcggctacaccttcaccagctactggatgaactgggtccgacaggcccctggcaaaggactggaatgggtcggaatgatcgaccccagcgacagcgagacacactacaaccacatcttcaaggaccgcttcaccatcagcgccgacaccagcaagaataccgcctacctccagatgaactccctgagagccgaggacaccgccgtgtactactgcgccagaaacctgtatctgttcggccagggaaccctggtcacagtgtcatctacgcgtatccagaaccctgatcctgccgtgtaccagctgcgggatagcaagagcagcgacaagagcgtgtgtctgttcaccgacttcgacagccagaccaacgtgtcccagagcaaggactccgacgtgtacatcaccgataagtgcgtgctggacatgcggagcatggacttcaagagcaactccgccgtggcctggtccaacaagtccgatttcgcctgcgccaacgccttcaacaacagcattatccccgaggacacattcttcccaagccccgagagcagctgcggctttaccagcgagagctaccagcagggcgtgctgagcgccaccatcctgtacgagatcctgctgggcaaggccaccctgtacgccgtgctggtgtctgccctggtgctgatggctatggtcaagcggaaggacagccggggataa

SEQ ID NO: 36728 - DNA, 1860 bp, synthetic construct
  source 1..1860: mol_type = other DNA
atggccttaccagtgaccgccttgctcctgccgctggccttgctgctccacgccgccaggccggacatccagatgacacagagccctagcagcctgtctgccagcgtgggagacagagtgaccatcacatgcaagagcagccagagcctgctggactccgatggcaagacctacctgaactggtatcagcagaagcccggcaaggcccctaagctgctgatctacctggtgtccaagctggatagcggcgtgcccagcagattttctggcagcggcagcggaaccgacttcaccctgacaatatccagcctccagcctgaggacttcgccacctactactgctggcaaggcacccactttccattcaccttcggccagggcaccaaggtggaaatcaaaagactcgaggacctgaagaacgtgttcccacctgaggtggccgtgttcgagcctagcgaggccgagatcagccacacccagaaagccaccctcgtgtgcctggctaccggcttctaccccgaccatgtggaactgtcttggtgggtcaacggcaaagaggtgcacagcggcgtgtgtaccgacccccagccactgaaagaacagcccgccctgaacgacagccggtactgcctgagcagcagactgagagtgtccgccaccttctggcagaacccccggaaccacttcagatgccaggtgcagttctacggcctgagcgagaacgacgagtggacccaggacagagccaagcccgtgacccagatcgtgtctgccgaagcctggggcagagccgattgcggctttaccagcgagagctaccagcagggcgtgctgagcgccaccaacctgagcgtgatcggcttcagaatcctgctgctgaaagtggccggctttaacctgctgatgaccctgcggctgtggtccagcagggccaagcgatctggatctggagcaacaaacttctcactactcaaacaagcaggtgacgtggaggagaatcccgggcctactagtatggactggatttggcgcatccttttccttgtcggcgctgctaccggcgcgcattccttcgaagaagtgcagctggttgaatcaggcggaggactggttcagcctggcggatctctgagactgtcttgtgccgccagcggctacaccttcaccagctactggatgaactgggtccgacaggcccctggcaaaggactggaatgggtcggaatgatcgaccccagcgacagcgagacacactacaaccacatcttcaaggaccgcttcaccatcagcgccgacaccagcaagaataccgcctacctccagatgaactccctgagagccgaggacaccgccgtgtactactgcgccagaaacctgtatctgttcggccagggaaccctggtcacagtgtcatctacgcgtatccagaaccctgatcctgccgtgtaccagctgcgggatagcaagagcagcgacaagagcgtgtgtctgttcaccgacttcgacagccagaccaacgtgtcccagagcaaggactccgacgtgtacatcaccgataagtgcgtgctggacatgcggagcatggacttcaagagcaactccgccgtggcctggtccaacaagtccgatttcgcctgcgccaacgccttcaacaacagcattatccccgaggacacattcttcccaagccccgagagcagctgcgacgtgaagctggtggaaaagagcttcgagacagacaccaacctgaacttccagatcctgtacgagatcctgctgggcaaggccaccctgtacgccgtgctggtgtctgccctggtgctgatggctatggtcaagcggaaggacagccggggataa

SEQ ID NO: 36729 - DNA, 1860 bp, synthetic construct; identical to SEQ ID NO: 36727
  source 1..1860: mol_type = other DNA

SEQ ID NO: 36730 - DNA, 1860 bp, synthetic construct; identical to SEQ ID NO: 36728
  source 1..1860: mol_type = other DNA

SEQ ID NO: 36731 - DNA, 1857 bp, synthetic construct
  source 1..1857: mol_type = other DNA
atggccttaccagtgaccgccttgctcctgccgctggccttgctgctccacgccgccaggccggacatccagatgacacagagccctagcagcctgtctgccagcgtgggagacagagtgaccatcacatgcaagagcagccagagcctgctggactccgatggcaagacctacctgaactggtatcagcagaagcccggcaaggcccctaagctgctgatctacctggtgtccaagctggatagcggcgtgcccagcagattttctggcagcggcagcggaaccgacttcaccctgacaatatccagcctccagcctgaggacttcgccacctactactgctggcaaggcacccactttccattcaccttcggccagggcaccaaggtggaaatcaaaagactcgaggacctgaagaacgtgttcccacctgaggtggccgtgttcgagcctagcgaggccgagatcagccacacccagaaagccaccctcgtgtgcctggctaccggcttctaccccgaccatgtggaactgtcttggtgggtcaacggcaaagaggtgcacagcggcgtgtgtaccgacccccagccactgaaagaacagcccgccctgaacgacagccggtactgcctgagcagcagactgagagtgtccgccaccttctggcagaacccccggaaccacttcagatgccaggtgcagttctacggcctgagcgagaacgacgagtggacccaggacagagccaagcccgtgacccagatcgtgtctgccgaagcctggggcagagccgattgcgacgtgaagctggtggaaaagagcttcgagacagacaccaacctgaacttccagaacctgagcgtgatcggcttcagaatcctgctgctgaaagtggccggctttaacctgctgatgaccctgcggctgtggtccagcagggccaagcgatctggatctggagcaacaaacttctcactactcaaacaagcaggtgacgtggaggagaatcccgggcctactagtatggactggatttggcgcatccttttccttgtcggcgctgctaccggcgcgcattccttcgaagaagtgcagctggttgaatcaggcggaggactggttcagcctggcggatctctgagactgtcttgtgccgccagcggctacaccttcaccagctactggatgaactgggtccgacaggcccctggcaaaggactggaatgggtcggaatgatcgaccccagcgacagcgagacacactacaaccacatcttcaaggaccgcttcaccatcagcgccgacaccagcaagaataccgcctacctccagatgaactccctgagagccgaggacaccgccgtgtactactgcgccagaaacctgtatctgttcggccagggaaccctggtcacagtgtcatctacgcgtatccagaaccctgatcctgccgtgtaccagctgcgggatagcaagagcagcgacaagagcgtgtgtctgttcaccgacttcgacagccagaccaacgtgtcccagagcaaggactccgacgtgtacatcaccgataagtgcgtgctggacatgcggagcatggacttcaagagcaactccgccgtggcctggtccaacaagtccgatttcgcctgcgccaacgccttcaacaacagcattatccccgaggacacattcttcccaagccccgagagcagctgcggctttaccagcgagagctaccagcagggcgtgctgagcgccaccatcctgtacgagatcctgctgggcaaggccaccctgtacgccgtgctggtgtctgccctggtgctgatggctatggtcaagcggaaggacagccgggga

SEQ ID NO: 36732 - DNA, 1869 bp, synthetic construct
  source 1..1869: mol_type = other DNA
atggccttaccagtgaccgccttgctcctgccgctggccttgctgctccacgccgccaggccggacatccagatgacacagagccctagcagcctgtctgccagcgtgggagacagagtgaccatcacatgcaagagcagccagagcctgctggactccgatggcaagacctacctgaactggtatcagcagaagcccggcaaggcccctaagctgctgatctacctggtgtccaagctggatagcggcgtgcccagcagattttctggcagcggcagcggaaccgacttcaccctgacaatatccagcctccagcctgaggacttcgccacctactactgctggcaaggcacccactttccattcaccttcggccagggcaccaaggtggaaatcaaaagactcgaggccgacgtgtcccccaagcctaccatcttcctgccctctatcgccgagacaaagctccagaaggccggcacctacctgtgcctgctggaaaagttcttcccagatgtgattaagatccactggcaggaaaagaagtccaacaccatcctgggcagccaggaaggcaacaccatgaagaccaacgacacctacatgaagttcagctggctgaccgtgcccgagaagtccctggacaaagaacacagatgcatcgtgcggcacgaaaacaacaagaacggcgtggaccaggaaatcatcttcccacccatcaagaccgatgtgattacaatggaccccaaggacaactgctccaaggacgccaacgataccctgctgctccagctgaccaacaccagcgcctactacatgtacttgttgctgctgctgaagtccgtggtgtacttcgccatcatcacatgctgcctgctgcggagaaccgccttctgctgcaacggcgagaagtctagggccaagcgatctggatctggagcaacaaacttctcactactcaaacaagcaggtgacgtggaggagaatcccgggcctactagtatggactggatttggcgcatccttttccttgtcggcgctgctaccggcgcgcattccttcgaagaagtgcagctggttgaatcaggcggaggactggttcagcctggcggatctctgagactgtcttgtgccgccagcggctacaccttcaccagctactggatgaactgggtccgacaggcccctggcaaaggactggaatgggtcggaatgatcgaccccagcgacagcgagacacactacaaccacatcttcaaggaccgcttcaccatcagcgccgacaccagcaagaataccgcctacctccagatgaactccctgagagccgaggacaccgccgtgtactactgcgccagaaacctgtatctgttcggccagggaaccctggtcacagtgtcatctacgcgtagccagcctcacaccaagcccagcgtgttcgtgatgaagaacggcaccaacgtggcctgcctcgtgaaagagttctaccccaaggacatcaggatcaacctggtgtccagcaagaagatcaccgagttcgaccccgccatcgtgatctcccccagcggcaagtacaacgccgtgaagctggggaagtatgaggacagcaacagcgtgacctgctccgtgcagcacgacaacaagaccgtgcacagcaccgactttgaagtgaaaaccgactccaccgaccacgtgaagcccaaagagacagagaacaccaagcagcccagcaagagctgccacaagcccaaggccatcgtgcacaccgagaaagtgaacatgatgagcctgaccgtgatcggcttcagaatcctgctgctgaaagtggccggctttaacctgctgatgaccctgcggctgtggtccagctaa

SEQ ID NO: 36733 - DNA, 1869 bp, synthetic construct
  source 1..1869: mol_type = other DNA
atggccttaccagtgaccgccttgctcctgccgctggccttgctgctccacgccgccaggccggacatccagatgacacagagccctagcagcctgtctgccagcgtgggagacagagtgaccatcacatgcaagagcagccagagcctgctggactccgatggcaagacctacctgaactggtatcagcagaagcccggcaaggcccctaagctgctgatctacctggtgtccaagctggatagcggcgtgcccagcagattttctggcagcggcagcggaaccgacttcaccctgacaatatccagcctccagcctgaggacttcgccacctactactgctggcaaggcacccactttccattcaccttcggccagggcaccaaggtggaaatcaaaagactcgaggccgacgtgtcccccaagcctaccatcttcctgccctctatcgccgagacaaagctccagaaggccggcacctacctgtgcctgctggaaaagttcttcccagatgtgattaagatccactggcaggaaaagaagtccaacaccatcctgggcagccaggaaggcaacaccatgaagaccaacgacacctacatgaagttcagctggctgaccgtgcccgagaagtccctggacaaagaacacagatgcatcgtgcggcacgaaaacaacaagaacggcgtggaccaggaaatcatcttcccacccatcaagaccgatgtgattacaatggaccccaaggacaactgctccaaggacgccaacgataccctgctgctccagctgaccaacaccagcgcctactacatgtacttgttgctgctgctgaagtccgtggtgtacttcgccatcatcacatgctgcctgctgcggagaaccgccttctgctgcaacggcgagaagtctagggccaagcgatctggatctggagcaacaaacttctcactactcaaacaagcaggtgacgtggaggagaatcccgggcctactagtatggactggatttggcgcatccttttccttgtcggcgctgctaccggcgcgcattccttcgaagaagtgcagctggttgaatcaggcggaggactggttcagcctggcggatctctgagactgtcttgtgccgccagcggctacaccttcaccagctactggatgaactgggtccgacaggcccctggcaaaggactggaatgggtcggaatgatcgaccccagcgacagcgagacacactacaaccacatcttcaaggaccgcttcaccatcagcgccgacaccagcaagaataccgcctacctccagatgaactccctgagagccgaggacaccgccgtgtactactgcgccagaaacctgtatctgttcggccagggaaccctggtcacagtgtcatctacgcgtagccagcctcacaccaagcccagcgtgttcgtgatgaagaacggcaccaacgtggcctgcctcgtgaaagagttctaccccaaggacatcaggatcaacctggtgtccagcaagaagatcaccgagttcgaccccgccatcgtgatctcccccagcggcaagtacaacgccgtgaagctggggaagtacgaggacagcaacagcgtgacctgctccgtgcagcacgacaacaagaccgtgcacagcaccgactttgaagtgaaaaccgactccaccgaccacgtgaagcccaaagagacagagaacaccaagcagcccagcaagagctgccacaagcccaaggccatcgtgcacaccgagaaagtgaacatgatgagcctgaccgtgctgggcttcagaatcctgctgctgaaagtggccggctttaacctgctgatgaccctgcggctgtggtccagctaa

SEQ ID NO: 36734 - DNA, 1857 bp, synthetic construct; identical to SEQ ID NO: 36731
  source 1..1857: mol_type = other DNA

SEQ ID NO: 36735 - DNA, 1869 bp, synthetic construct
  source 1..1869: mol_type = other DNA
atggccttaccagtgaccgccttgctcctgccgctggccttgctgctccacgccgccaggccggacatccagatgacacagagccctagcagcctgtctgccagcgtgggagacagagtgaccatcacatgcaagagcagccagagcctgctggactccgatggcaagacctacctgaactggtatcagcagaagcccggcaaggcccctaagctgctgatctacctggtgtccaagctggatagcggcgtgcccagcagattttctggcagcggcagcggaaccgacttcaccctgacaatatccagcctccagcctgaggacttcgccacctactactgctggcaaggcacccactttccattcaccttcggccagggcaccaaggtggaaatcaaaagactcgagatccagaaccctgatcctgccgtgtaccagctgcgggatagcaagagcagcgacaagagcgtgtgtctgttcaccgacttcgacagccagaccaacgtgtcccagagcaaggactccgacgtgtacatcaccgataagtgcgtgctggacatgcggagcatggacttcaagagcaactccgccgtggcctggtccaacaagtccgatttcgcctgcgccaacgccttcaacaacagcattatccccgaggacacattcttcccaagccccgagagcagctgcggctttaccagcgagagctaccagcagggcgtgctgagcgccaccatcctgtacgagatcctgctgggcaaggccaccctgtacgccgtgctggtgtctgccctggtgctgatggctatggtcaagcggaaggacagccggggacgcgccaagagaagcggatctggcgtgaagcagaccctgaatttcgacctgctgaagctggctggcgacgtggaatccaacccaggccctactagtatggactggatttggcgcatccttttccttgtcggcgctgctaccggcgcgcattccttcgaagaagtgcagctggttgaatcaggcggaggactggttcagcctggcggatctctgagactgtcttgtgccgccagcggctacaccttcaccagctactggatgaactgggtccgacaggcccctggcaaaggactggaatgggtcggaatgatcgaccccagcgacagcgagacacactacaaccacatcttcaaggaccgcttcaccatcagcgccgacaccagcaagaataccgcctacctccagatgaactccctgagagccgaggacaccgccgtgtactactgcgccagaaacctgtatctgttcggccagggaaccctggtcacagtgtcatctacgcgtgaggacctgaagaacgtgttcccacctgaggtggccgtgttcgagcctagcgaggccgagatcagccacacccagaaagccaccctcgtgtgcctggctaccggcttctaccccgaccatgtggaactgtcttggtgggtcaacggcaaagaggtgcacagcggcgtgtgtaccgacccccagccactgaaagaacagcccgccctgaacgacagccggtactgcctgagcagcagactgagagtgtccgccaccttctggcagaacccccggaaccacttcagatgccaggtgcagttctacggcctgagcgagaacgacgagtggacccaggacagagccaagcccgtgacccagatcgtgtctgccgaagcctggggcagagccgattgcgacgtgaagctggtggaaaagagcttcgagacagacaccaacctgaacttccagaacctgagcgtgatcggcttcagaatcctgctgctgaaagtggccggctttaacctgctgatgaccctgcggctgtggtccagc

SEQ ID NO: 36736 - DNA, 2262 bp, synthetic construct
  source 1..2262: mol_type = other DNA
atggccttaccagtgaccgccttgctcctgccgctggccttgctgctccacgccgccaggccggaagtgcagctggttgaatctggcggaggactggttcagcctggcggatctctgagactgtcttgtgccgccagcggcttcagcttcagcgacttttggatgagctgggtccgacaggcccctggcaaaggacttgaatgggtcgccacaatcagccaggccggcagcgagaaggactacgtggactctgtgaagggcagattcaccatcagccgggacaacgccaagaagtccctgtacctccagatgaacagcctgagagccgaggacaccgccgtgtactattgtgcctctggcgtgtacagcttcgactacagaggccagggcaccctggtcacagtctcttctggtaccggcggaggcggatctggcggcggaggtagcggtggcggaggatctgaattcgacatccagatgacacagagccctagcagcctgtctgccagcgtgggagacagagtgaccatcacatgcaagagcagccagagcctgctggactccgatggcaagacctacctgaactggtatcagcagaagcccggcaaggcccctaagctgctgatctacctggtgtccaagctggatagcggcgtgcccagcagattttctggcagcggcagcggaaccgacttcaccctgacaatatccagcctccagcctgaggacttcgccacctactactgctggcaaggcacccactttccattcaccttcggccagggcaccaaggtggaaatcaaaagactcgaggacctgaagaacgtgttcccacctgaggtggccgtgttcgagcctagcgaggccgagatcagccacacccagaaagccaccctcgtgtgcctggctaccggcttctaccccgaccatgtggaactgtcttggtgggtcaacggcaaagaggtgcacagcggcgtgtgtaccgacccccagccactgaaagaacagcccgccctgaacgacagccggtactgcctgagcagcagactgagagtgtccgccaccttctggcagaacccccggaaccacttcagatgccaggtgcagttctacggcctgagcgagaacgacgagtggacccaggacagagccaagcccgtgacccagatcgtgtctgccgaagcctggggcagagccgattgcgacgtgaagctggtggaaaagagcttcgagacagacaccaacctgaacttccagaacctgagcgtgatcggcttcagaatcctgctgctgaaagtggccggctttaacctgctgatgaccctgcggctgtggtccagcagggccaagcgatctggatctggagcaacaaacttctcactactcaaacaagcaggtgacgtggaggagaatcccgggcctactagtatggactggatttggcgcatccttttccttgtcggcgctgctaccggcgcgcattccttcgaagaagtgcagctggttgaatcaggcggaggactggttcagcctggcggatctctgagactgtcttgtgccgccagcggctacaccttcaccagctactggatgaactgggtccgacaggcccctggcaaaggactggaatgggtcggaatgatcgaccccagcgacagcgagacacactacaaccacatcttcaaggaccgcttcaccatcagcgccgacaccagcaagaataccgcctacctccagatgaactccctgagagccgaggacaccgccgtgtactactgcgccagaaacctgtatctgttcggccagggaaccctggtcacagtgtcatctacgcgtatccagaaccctgatcctgccgtgtaccagctgcgggatagcaagagcagcgacaagagcgtgtgtctgttcaccgacttcgacagccagaccaacgtgtcccagagcaaggactccgacgtgtacatcaccgataagtgcgtgctggacatgcggagcatggacttcaagagcaactccgccgtggcctggtccaacaagtccgatttcgcctgcgccaacgccttcaacaacagcattatccccgaggacacattcttcccaagccccgagagcagctgcggctttaccagcgagagctaccagcagggcgtgctgagcgccaccatcctgtacgagatcctgctgggcaaggccaccctgtacgccgtgctggtgtctgccctggtgctgatggctatggtcaagcggaaggacagccgggga

SEQ ID NO: 36737 - DNA, 2274 bp, synthetic construct
  source 1..2274: mol_type = other DNA
atggccttaccagtgaccgccttgctcctgccgctggccttgctgctccacgccgccaggccggaagtgcagctggttgaatctggcggaggactggttcagcctggcggatctctgagactgtcttgtgccgccagcggcttcagcttcagcgacttttggatgagctgggtccgacaggcccctggcaaaggacttgaatgggtcgccacaatcagccaggccggcagcgagaaggactacgtggactctgtgaagggcagattcaccatcagccgggacaacgccaagaagtccctgtacctccagatgaacagcctgagagccgaggacaccgccgtgtactattgtgcctctggcgtgtacagcttcgactacagaggccagggcaccctggtcacagtctcttctggtaccggcggaggcggatctggcggcggaggtagcggtggcggaggatctgaattcgacatccagatgacacagagccctagcagcctgtctgccagcgtgggagacagagtgaccatcacatgcaagagcagccagagcctgctggactccgatggcaagacctacctgaactggtatcagcagaagcccggcaaggcccctaagctgctgatctacctggtgtccaagctggatagcggcgtgcccagcagattttctggcagcggcagcggaaccgacttcaccctgacaatatccagcctccagcctgaggacttcgccacctactactgctggcaaggcacccactttccattcaccttcggccagggcaccaaggtggaaatcaaaagactcgagatccagaaccctgatcctgccgtgtaccagctgcgggatagcaagagcagcgacaagagcgtgtgtctgttcaccgacttcgacagccagaccaacgtgtcccagagcaaggactccgacgtgtacatcaccgataagtgcgtgctggacatgcggagcatggacttcaagagcaactccgccgtggcctggtccaacaagtccgatttcgcctgcgccaacgccttcaacaacagcattatccccgaggacacattcttcccaagccccgagagcagctgcggctttaccagcgagagctaccagcagggcgtgctgagcgccaccatcctgtacgagatcctgctgggcaaggccaccctgtacgccgtgctggtgtctgccctggtgctgatggctatggtcaagcggaaggacagccggggacgcgccaagagaagcggatctggcgtgaagcagaccctgaatttcgacctgctgaagctggctggcgacgtggaatccaacccaggccctactagtatggactggatttggcgcatccttttccttgtcggcgctgctaccggcgcgcattccttcgaagaagtgcagctggttgaatcaggcggaggactggttcagcctggcggatctctgagactgtcttgtgccgccagcggctacaccttcaccagctactggatgaactgggtccgacaggcccctggcaaaggactggaatgggtcggaatgatcgaccccagcgacagcgagacacactacaaccacatcttcaaggaccgcttcaccatcagcgccgacaccagcaagaataccgcctacctccagatgaactccctgagagccgaggacaccgccgtgtactactgcgccagaaacctgtatctgttcggccagggaaccctggtcacagtgtcatctacgcgtgaggacctgaagaacgtgttcccacctgaggtggccgtgttcgagcctagcgaggccgagatcagccacacccagaaagccaccctcgtgtgcctggctaccggcttctaccccgaccatgtggaactgtcttggtgggtcaacggcaaagaggtgcacagcggcgtgtgtaccgacccccagccactgaaagaacagcccgccctgaacgacagccggtactgcctgagcagcagactgagagtgtccgccaccttctggcagaacccccggaaccacttcagatgccaggtgcagttctacggcctgagcgagaacgacgagtggacccaggacagagccaagcccgtgacccagatcgtgtctgccgaagcctggggcagagccgattgcgacgtgaagctggtggaaaagagcttcgagacagacaccaacctgaacttccagaacctgagcgtgatcggcttcagaatcctgctgctgaaagtggccggctttaacctgctgatgaccctgcggctgtggtccagc

SEQ ID NO: 36738 - DNA, 2673 bp, synthetic construct
  source 1..2673: mol_type = other DNA
atggccttaccagtgaccgccttgctcctgccgctggccttgctgctccacgccgccaggccggaagtgcagctggttgaatctggcggaggactggttcagcctggcggatctctgagactgtcttgtgccgccagcggcttcagcttcagcgacttttggatgagctgggtccgacaggcccctggcaaaggacttgaatgggtcgccacaatcagccaggccggcagcgagaaggactacgtggactctgtgaagggcagattcaccatcagccgggacaacgccaagaagtccctgtacctccagatgaacagcctgagagccgaggacaccgccgtgtactattgtgcctctggcgtgtacagcttcgactacagaggccagggcaccctggtcacagtctcttctggtaccggcggaggcggatctggcggcggaggtagcggtggcggaggatctgaattcgacatccagatgacacagagccctagcagcctgtctgccagcgtgggagacagagtgaccatcacatgcaagagcagccagagcctgctggactccgatggcaagacctacctgaactggtatcagcagaagcccggcaaggcccctaagctgctgatctacctggtgtccaagctggatagcggcgtgcccagcagattttctggcagcggcagcggaaccgacttcaccctgacaatatccagcctccagcctgaggacttcgccacctactactgctggcaaggcacccactttccattcaccttcggccagggcaccaaggtggaaatcaaaagactcgaggacctgaagaacgtgttcccacctgaggtggccgtgttcgagcctagcgaggccgagatcagccacacccagaaagccaccctcgtgtgcctggctaccggcttctaccccgaccatgtggaactgtcttggtgggtcaacggcaaagaggtgcacagcggcgtgtgtaccgacccccagccactgaaagaacagcccgccctgaacgacagccggtactgcctgagcagcagactgagagtgtccgccaccttctggcagaacccccggaaccacttcagatgccaggtgcagttctacggcctgagcgagaacgacgagtggacccaggacagagccaagcccgtgacccagatcgtgtctgccgaagcctggggcagagccgattgcgacgtgaagctggtggaaaagagcttcgagacagacaccaacctgaacttccagaacctgagcgtgatcggcttcagaatcctgctgctgaaagtggccggctttaacctgctgatgaccctgcggctgtggtccagcagggccaagcgatctggatctggagcaacaaacttctcactactcaaacaagcaggtgacgtggaggagaatcccgggcctactagtatggactggatttggcgcatccttttccttgtcggcgctgctaccggcgcgcattccgggccccagctccagctgcaagagtctggacctggcctggtcaagcctagcgagacactgagcctgacctgtaccgtgtccggcgatagcatcagcagcggcgattactactggggctggatcagacagcctcctggcaaaggactggaatggatcggccacatctactacagcggcgtgacctactacaaccccagcctgaagtccagagtgaccatcagcgtggacaccagccggaaccagttctccctgaagctgtctagcgtgacagccgccgataccgccgtgtactactgcaccagagaggacagcagcaactggcggagtagaggccagggaacactggtcacagttagctctggatccggcggaggcggaagtggaggcggaggatctggcggcggaggctctttcgaagaagtgcagctggttgaatcaggcggaggactggttcagcctggcggatctctgagactgtcttgtgccgccagcggctacaccttcaccagctactggatgaactgggtccgacaggcccctggcaaaggactggaatgggtcggaatgatcgaccccagcgacagcgagacacactacaaccacatcttcaaggaccgcttcaccatcagcgccgacaccagcaagaataccgcctacctccagatgaactccctgagagccgaggacaccgccgtgtactactgcgccagaaacctgtatctgttcggccagggaaccctggtcacagtgtcatctacgcgtatccagaaccctgatcctgccgtgtaccagctgcgggatagcaagagcagcgacaagagcgtgtgtctgttcaccgacttcgacagccagaccaacgtgtcccagagcaaggactccgacgtgtacatcaccgataagtgcgtgctggacatgcggagcatggacttcaagagcaactccgccgtggcctggtccaacaagtccgatttcgcctgcgccaacgccttcaacaacagcattatccccgaggacacattcttcccaagccccgagagcagctgcggctttaccagcgagagctaccagcagggcgtgctgagcgccaccatcctgtacgagatcctgctgggcaaggccaccctgtacgccgtgctggtgtctgccctggtgctgatggctatggtcaagcggaaggacagccgggga

SEQ ID NO: 36739 - DNA, 2685 bp, synthetic construct
  source 1..2685: mol_type = other DNA
atggccttaccagtgaccgccttgctcctgccgctggccttgctgctccacgccgccaggccggaagtgcagctggttgaatctggcggaggactggttcagcctggcggatctctgagactgtcttgtgccgccagcggcttcagcttcagcgacttttggatgagctgggtccgacaggcccctggcaaaggacttgaatgggtcgccacaatcagccaggccggcagcgagaaggactacgtggactctgtgaagggcagattcaccatcagccgggacaacgccaagaagtccctgtacctccagatgaacagcctgagagccgaggacaccgccgtgtactattgtgcctctggcgtgtacagcttcgactacagaggccagggcaccctggtcacagtctcttctggtaccggcggaggcggatctggcggcggaggtagcggtggcggaggatctgaattcgacatccagatgacacagagccctagcagcctgtctgccagcgtgggagacagagtgaccatcacatgcaagagcagccagagcctgctggactccgatggcaagacctacctgaactggtatcagcagaagcccggcaaggcccctaagctgctgatctacctggtgtccaagctggatagcggcgtgcccagcagattttctggcagcggcagcggaaccgacttcaccctgacaatatccagcctccagcctgaggacttcgccacctactactgctggcaaggcacccactttccattcaccttcggccagggcaccaaggtggaaatcaaaagactcgagatccagaaccctgatcctgccgtgtaccagctgcgggatagcaagagcagcgacaagagcgtgtgtctgttcaccgacttcgacagccagaccaacgtgtcccagagcaaggactccgacgtgtacatcaccgataagtgcgtgctggacatgcggagcatggacttcaagagcaactccgccgtggcctggtccaacaagtccgatttcgcctgcgccaacgccttcaacaacagcattatccccgaggacacattcttcccaagccccgagagcagctgcggctttaccagcgagagctaccagcagggcgtgctgagcgccaccatcctgtacgagatcctgctgggcaaggccaccctgtacgccgtgctggtgtctgccctggtgctgatggctatggtcaagcggaaggacagccggggacgcgccaagagaagcggatctggcgtgaagcagaccctgaatttcgacctgctgaagctggctggcgacgtggaatccaacccaggccctactagtatggactggatttggcgcatccttttccttgtcggcgctgctaccggcgcgcattccgggccccagctccagctgcaagagtctggacctggcctggtcaagcctagcgagacactgagcctgacctgtaccgtgtccggcgatagcatcagcagcggcgattactactggggctggatcagacagcctcctggcaaaggactggaatggatcggccacatctactacagcggcgtgacctactacaaccccagcctgaagtccagagtgaccatcagcgtggacaccagccggaaccagttctccctgaagctgtctagcgtgacagccgccgataccgccgtgtactactgcaccagagaggacagcagcaactggcggagtagaggccagggaacactggtcacagttagctctggatccggcggaggcggaagtggaggcggaggatctggcggcggaggctctttcgaagaagtgcagctggttgaatcaggcggaggactggttcagcctggcggatctctgagactgtcttgtgccgccagcggctacaccttcaccagctactggatgaactgggtccgacaggcccctggcaaaggactggaatgggtcggaatgatcgaccccagcgacagcgagacacactacaaccacatcttcaaggaccgcttcaccatcagcgccgacaccagcaagaataccgcctacctccagatgaactccctgagagccgaggacaccgccgtgtactactgcgccagaaacctgtatctgttcggccagggaaccctggtcacagtgtcatctacgcgtgaggacctgaagaacgtgttcccacctgaggtggccgtgttcgagcctagcgaggccgagatcagccacacccagaaagccaccctcgtgtgcctggctaccggcttctaccccgaccatgtggaactgtcttggtgggtcaacggcaaagaggtgcacagcggcgtgtgtaccgacccccagccactgaaagaacagcccgccctgaacgacagccggtactgcctgagcagcagactgagagtgtccgccaccttctggcagaacccccggaaccacttcagatgccaggtgcagttctacggcctgagcgagaacgacgagtggacccaggacagagccaagcccgtgacccagatcgtgtctgccgaagcctggggcagagccgattgcgacgtgaagctggtggaaaagagcttcgagacagacaccaacctgaacttccagaacctgagcgtgatcggcttcagaatcctgctgctgaaagtggccggctttaacctgctgatgaccctgcggctgtggtccagc

SEQ ID NO: 36740 - DNA, 2067 bp, synthetic construct
  source 1..2067: mol_type = other DNA
atggccttaccagtgaccgccttgctcctgccgctggccttgctgctccacgccgccaggccggacatccagatgacacagagccctagcagcctgtctgccagcgtgggagacagagtgaccatcacatgcaagagcagccagagcctgctggactccgatggcaagacctacctgaactggtatcagcagaagcccggcaaggcccctaagctgctgatctacctggtgtccaagctggatagcggcgtgcccagcagattttctggcagcggcagcggaaccgacttcaccctgacaatatccagcctccagcctgaggacttcgccacctactactgctggcaaggcacccactttccattcaccttcggccagggcaccaaggtggaaatcaaaagactcgaggacctgaagaacgtgttcccacctgaggtggccgtgttcgagcctagcgaggccgagatcagccacacccagaaagccaccctcgtgtgcctggctaccggcttctaccccgaccatgtggaactgtcttggtgggtcaacggcaaagaggtgcacagcggcgtgtgtaccgacccccagccactgaaagaacagcccgccctgaacgacagccggtactgcctgagcagcagactgagagtgtccgccaccttctggcagaacccccggaaccacttcagatgccaggtgcagttctacggcctgagcgagaacgacgagtggacccaggacagagccaagcccgtgacccagatcgtgtctgccgaagcctggggcagagccgattgcgacgtgaagctggtggaaaagagcttcgagacagacaccaacctgaacttccagaacctgagcgtgatcggcttcagaatcctgctgctgaaagtggccggctttaacctgctgatgaccctgcggctgtggtccagcagggccaagcgatctggatctggagcaacaaacttctcactactcaaacaagcaggtgacgtggaggagaatcccgggcctactagtatggactggatttggcgcatccttttccttgtcggcgctgctaccggcgcccattccgggcccatggaccccgacctggaaatcagagccgccttcctgcggcagagaaacacagccctgagaacagaggtggccgagctggaacaagaggtgcagcggctggaaaacgaggtgtcccagtacgagacaagatacggccctctcggaggcggaaaaggatccggcggcggaggatctggcggaggcggatctgggggcggaggctctttcgaagaagtgcagctggttgaatcaggcggaggactggttcagcctggcggatctctgagactgtcttgtgccgccagcggctacaccttcaccagctactggatgaactgggtccgacaggcccctggcaaaggactggaatgggtcggaatgatcgaccccagcgacagcgagacacactacaaccacatcttcaaggaccgcttcaccatcagcgccgacaccagcaagaataccgcctacctccagatgaactccctgagagccgaggacaccgccgtgtactactgcgccagaaacctgtatctgttcggccagggaaccctggtcacagtgtcatctacgcgtatccagaaccctgatcctgccgtgtaccagctgcgggatagcaagagcagcgacaagagcgtgtgtctgttcaccgacttcgacagccagaccaacgtgtcccagagcaaggactccgacgtgtacatcaccgataagtgcgtgctggacatgcggagcatggacttcaagagcaactccgccgtggcctggtccaacaagtccgatttcgcctgcgccaacgccttcaacaacagcattatccccgaggacacattcttcccaagccccgagagcagctgcggctttaccagcgagagctaccagcagggcgtgctgagcgccaccatcctgtacgagatcctgctgggcaaggccaccctgtacgccgtgctggtgtctgccctggtgctgatggctatggtcaagcggaaggacagccgggga

SEQ ID NO: 36741 - DNA, 2079 bp, synthetic construct
  source 1..2079: mol_type = other DNA
atggccttaccagtgaccgccttgctcctgccgctggccttgctgctccacgccgccaggccggacatccagatgacacagagccctagcagcctgtctgccagcgtgggagacagagtgaccatcacatgcaagagcagccagagcctgctggactccgatggcaagacctacctgaactggtatcagcagaagcccggcaaggcccctaagctgctgatctacctggtgtccaagctggatagcggcgtgcccagcagattttctggcagcggcagcggaaccgacttcaccctgacaatatccagcctccagcctgaggacttcgccacctactactgctggcaaggcacccactttccattcaccttcggccagggcaccaaggtggaaatcaaaagactcgagatccagaaccctgatcctgccgtgtaccagctgcgggatagcaagagcagcgacaagagcgtgtgtctgttcaccgacttcgacagccagaccaacgtgtcccagagcaaggactccgacgtgtacatcaccgataagtgcgtgctggacatgcggagcatggacttcaagagcaactccgccgtggcctggtccaacaagtccgatttcgcctgcgccaacgccttcaacaacagcattatccccgaggacacattcttcccaagccccgagagcagctgcggctttaccagcgagagctaccagcagggcgtgctgagcgccaccatcctgtacgagatcctgctgggcaaggccaccctgtacgccgtgctggtgtctgccctggtgctgatggctatggtcaagcggaaggacagccggggacgcgccaagagaagcggatctggcgtgaagcagaccctgaatttcgacctgctgaagctggctggcgacgtggaatccaacccaggccctactagtatggactggatttggcgcatccttttccttgtcggcgctgctaccggcgcccattccgggcccatggaccccgacctggaaatcagagccgccttcctgcggcagagaaacacagccctgagaacagaggtggccgagctggaacaagaggtgcagcggctggaaaacgaggtgtcccagtacgagacaagatacggccctctcggaggcggaaaaggatccggcggcggaggatctggcggaggcggatctgggggcggaggctctttcgaagaagtgcagctggttgaatcaggcggaggactggttcagcctggcggatctctgagactgtcttgtgccgccagcggctacaccttcaccagctactggatgaactgggtccgacaggcccctggcaaaggactggaatgggtcggaatgatcgaccccagcgacagcgagacacactacaaccacatcttcaaggaccgcttcaccatcagcgccgacaccagcaagaataccgcctacctccagatgaactccctgagagccgaggacaccgccgtgtactactgcgccagaaacctgtatctgttcggccagggaaccctggtcacagtgtcatctacgcgtgaggacctgaagaacgtgttcccacctgaggtggccgtgttcgagcctagcgaggccgagatcagccacacccagaaagccaccctcgtgtgcctggctaccggcttctaccccgaccatgtggaactgtcttggtgggtcaacggcaaagaggtgcacagcggcgtgtgtaccgacccccagccactgaaagaacagcccgccctgaacgacagccggtactgcctgagcagcagactgagagtgtccgccaccttctggcagaacccccggaaccacttcagatgccaggtgcagttctacggcctgagcgagaacgacgagtggacccaggacagagccaagcccgtgacccagatcgtgtctgccgaagcctggggcagagccgattgcgacgtgaagctggtggaaaagagcttcgagacagacaccaacctgaacttccagaacctgagcgtgatcggcttcagaatcctgctgctgaaagtggccggctttaacctgctgatgaccctgcggctgtggtccagc

SEQ ID NO: 36742 - DNA, 1998 bp, synthetic construct
  source 1..1998: mol_type = other DNA
atggccttaccagtgaccgccttgctcctgccgctggccttgctgctccacgccgccaggccggacatccagatgacacagagccctagcagcctgtctgccagcgtgggagacagagtgaccatcacatgcaagagcagccagagcctgctggactccgatggcaagacctacctgaactggtatcagcagaagcccggcaaggcccctaagctgctgatctacctggtgtccaagctggatagcggcgtgcccagcagattttctggcagcggcagcggaaccgacttcaccctgacaatatccagcctccagcctgaggacttcgccacctactactgctggcaaggcacccactttccattcaccttcggccagggcaccaaggtggaaatcaaaagactcgaggacctgaagaacgtgttcccacctgaggtggccgtgttcgagcctagcgaggccgagatcagccacacccagaaagccaccctcgtgtgcctggctaccggcttctaccccgaccatgtggaactgtcttggtgggtcaacggcaaagaggtgcacagcggcgtgtgtaccgacccccagccactgaaagaacagcccgccctgaacgacagccggtactgcctgagcagcagactgagagtgtccgccaccttctggcagaacccccggaaccacttcagatgccaggtgcagttctacggcctgagcgagaacgacgagtggacccaggacagagccaagcccgtgacccagatcgtgtctgccgaagcctggggcagagccgattgcgacgtgaagctggtggaaaagagcttcgagacagacaccaacctgaacttccagaacctgagcgtgatcggcttcagaatcctgctgctgaaagtggccggctttaacctgctgatgaccctgcggctgtggtccagcagggccaagcgatctggatctggagcaacaaacttctcactactcaaacaagcaggtgacgtggaggagaatcccgggcctactagtatggactggatttggcgcatccttttccttgtcggcgctgctaccggcgcccattccgggcccgaagttgctgccctcgagaaggaggtagcagctttggaaaaagaagtcgcagcccttgagaaagaagttgcggctctggagaagggatccggcggcggaggatctggcggaggcggatctgggggcggaggctctttcgaagaagtgcagctggttgaatcaggcggaggactggttcagcctggcggatctctgagactgtcttgtgccgccagcggctacaccttcaccagctactggatgaactgggtccgacaggcccctggcaaaggactggaatgggtcggaatgatcgaccccagcgacagcgagacacactacaaccacatcttcaaggaccgcttcaccatcagcgccgacaccagcaagaataccgcctacctccagatgaactccctgagagccgaggacaccgccgtgtactactgcgccagaaacctgtatctgttcggccagggaaccctggtcacagtgtcatctacgcgtatccagaaccctgatcctgccgtgtaccagctgcgggatagcaagagcagcgacaagagcgtgtgtctgttcaccgacttcgacagccagaccaacgtgtcccagagcaaggactccgacgtgtacatcaccgataagtgcgtgctggacatgcggagcatggacttcaagagcaactccgccgtggcctggtccaacaagtccgatttcgcctgcgccaacgccttcaacaacagcattatccccgaggacacattcttcccaagccccgagagcagctgcggctttaccagcgagagctaccagcagggcgtgctgagcgccaccatcctgtacgagatcctgctgggcaaggccaccctgtacgccgtgctggtgtctgccctggtgctgatggctatggtcaagcggaaggacagccgggga

SEQ ID NO: 36743 - DNA, 2010 bp, synthetic construct
  source 1..2010: mol_type = other DNA
atggccttaccagtgaccgccttgctcctgccgctggccttgctgctccacgccgccaggccggacatccagatgacacagagccctagcagcctgtctgccagcgtgggagacagagtgaccatcacatgcaagagcagccagagcctgctggactccgatggcaagacctacctgaactggtatcagcagaagcccggcaaggcccctaagctgctgatctacctggtgtccaagctggatagcggcgtgcccagcagattttctggcagcggcagcggaaccgacttcaccctgacaatatccagcctccagcctgaggacttcgccacctactactgctggcaaggcacccactttccattcaccttcggccagggcaccaaggtggaaatcaaaagactcgagatccagaaccctgatcctgccgtgtaccagctgcgggatagcaagagcagcgacaagagcgtgtgtctgttcaccgacttcgacagccagaccaacgtgtcccagagcaaggactccgacgtgtacatcaccgataagtgcgtgctggacatgcggagcatggacttcaagagcaactccgccgtggcctggtccaacaagtccgatttcgcctgcgccaacgccttcaacaacagcattatccccgaggacacattcttcccaagccccgagagcagctgcggctttaccagcgagagctaccagcagggcgtgctgagcgccaccatcctgtacgagatcctgctgggcaaggccaccctgtacgccgtgctggtgtctgccctggtgctgatggctatggtcaagcggaaggacagccggggacgcgccaagagaagcggatctggcgtgaagcagaccctgaatttcgacctgctgaagctggctggcgacgtggaatccaacccaggccctactagtatggactggatttggcgcatccttttccttgtcggcgctgctaccggcgcccattccgggcccgaagttgctgccctcgagaaggaggtagcagctttggaaaaagaagtcgcagcccttgagaaagaagttgcggctctggagaagggatccggcggcggaggatctggcggaggcggatctgggggcggaggctctttcgaagaagtgcagctggttgaatcaggcggaggactggttcagcctggcggatctctgagactgtcttgtgccgccagcggctacaccttcaccagctactggatgaactgggtccgacaggcccctggcaaaggactggaatgggtcggaatgatcgaccccagcgacagcgagacacactacaaccacatcttcaaggaccgcttcaccatcagcgccgacaccagcaagaataccgcctacctccagatgaactccctgagagccgaggacaccgccgtgtactactgcgccagaaacctgtatctgttcggccagggaaccctggtcacagtgtcatctacgcgtgaggacctgaagaacgtgttcccacctgaggtggccgtgttcgagcctagcgaggccgagatcagccacacccagaaagccaccctcgtgtgcctggctaccggcttctaccccgaccatgtggaactgtcttggtgggtcaacggcaaagaggtgcacagcggcgtgtgtaccgacccccagccactgaaagaacagcccgccctgaacgacagccggtactgcctgagcagcagactgagagtgtccgccaccttctggcagaacccccggaaccacttcagatgccaggtgcagttctacggcctgagcgagaacgacgagtggacccaggacagagccaagcccgtgacccagatcgtgtctgccgaagcctggggcagagccgattgcgacgtgaagctggtggaaaagagcttcgagacagacaccaacctgaacttccagaacctgagcgtgatcggcttcagaatcctgctgctgaaagtggccggctttaacctgctgatgaccctgcggctgtggtccagc

SEQ ID NO: 36744 - DNA, 2268 bp, synthetic construct
  source 1..2268: mol_type = other DNA
atggccttaccagtgaccgccttgctcctgccgctggccttgctgctccacgccgccaggccggacatccagatgacacagagccctagcagcctgtctgccagcgtgggagacagagtgaccatcacatgcaagagcagccagagcctgctggactccgatggcaagacctacctgaactggtatcagcagaagcccggcaaggcccctaagctgctgatctacctggtgtccaagctggatagcggcgtgcccagcagattttctggcagcggcagcggaaccgacttcaccctgacaatatccagcctccagcctgaggacttcgccacctactactgctggcaaggcacccactttccattcaccttcggccagggcaccaaggtggaaatcaaaagactcgaggacctgaagaacgtgttcccacctgaggtggccgtgttcgagcctagcgaggccgagatcagccacacccagaaagccaccctcgtgtgcctggctaccggcttctaccccgaccatgtggaactgtcttggtgggtcaacggcaaagaggtgcacagcggcgtgtgtaccgacccccagccactgaaagaacagcccgccctgaacgacagccggtactgcctgagcagcagactgagagtgtccgccaccttctggcagaacccccggaaccacttcagatgccaggtgcagttctacggcctgagcgagaacgacgagtggacccaggacagagccaagcccgtgacccagatcgtgtctgccgaagcctggggcagagccgattgcgacgtgaagctggtggaaaagagcttcgagacagacaccaacctgaacttccagaacctgagcgtgatcggcttcagaatcctgctgctgaaagtggccggctttaacctgctgatgaccctgcggctgtggtccagcagggccaagcgatctggatctggagcaacaaacttctcactactcaaacaagcaggtgacgtggaggagaatcccgggcctactagtatggactggatttggcgcatccttttccttgtcggcgctgctaccggcgcccattccgggccccaggttcagctgcaagagtctggcggaggacttgctcaagctggcggaagcctgagactgtcttgtgccgcctctggcagaaccttcagcatgggctggtttagacaggcccctggcaaagagagagagttcgtcgccgccatcacatacagcggcggcagcccttactacgcctcttctgtcagaggccggttcaccatcagccgggacaacgccaagaacaccgtgtacctccagatgaacagcctgaagccagaggacaccgccgtgtactactgtgccgccaatccaacctacggcagcgactggaatgccgagaattggggccagggcacccaagtgacagtgtctagtggatccggcggcggaggatctggcggaggcggatctgggggcggaggctctttcgaagaagtgcagctggttgaatcaggcggaggactggttcagcctggcggatctctgagactgtcttgtgccgccagcggctacaccttcaccagctactggatgaactgggtccgacaggcccctggcaaaggactggaatgggtcggaatgatcgaccccagcgacagcgagacacactacaaccacatcttcaaggaccgcttcaccatcagcgccgacaccagcaagaataccgcctacctccagatgaactccctgagagccgaggacaccgccgtgtactactgcgccagaaacctgtatctgttcggccagggaaccctggtcacagtgtcatctacgcgtatccagaaccctgatcctgccgtgtaccagctgcgggatagcaagagcagcgacaagagcgtgtgtctgttcaccgacttcgacagccagaccaacgtgtcccagagcaaggactccgacgtgtacatcaccgataagtgcgtgctggacatgcggagcatggacttcaagagcaactccgccgtggcctggtccaacaagtccgatttcgcctgcgccaacgccttcaacaacagcattatccccgaggacacattcttcccaagccccgagagcagctgcggctttaccagcgagagctaccagcagggcgtgctgagcgccaccatcctgtacgagatcctgctgggcaaggccaccctgtacgccgtgctggtgtctgccctggtgctgatggctatggtcaagcggaaggacagccgggga

SEQ ID NO: 36745 - DNA, 2280 bp, synthetic construct
  source 1..2280: mol_type = other DNA
atggccttaccagtgaccgccttgctcctgccgctggccttgctgctccacgccgccaggccggacatccagatgacacagagccctagcagcctgtctgccagcgtgggagacagagtgaccatcacatgcaagagcagccagagcctgctggactccgatggcaagacctacctgaactggtatcagcagaagcccggcaaggcccctaagctgctgatctacctggtgtccaagctggatagcggcgtgcccagcagattttctggcagcggcagcggaaccgacttcaccctgacaatatccagcctccagcctgaggacttcgccacctactactgctggcaaggcacccactttccattcaccttcggccagggcaccaaggtggaaatcaaaagactcgagatccagaaccctgatcctgccgtgtaccagctgcgggatagcaagagcagcgacaagagcgtgtgtctgttcaccgacttcgacagccagaccaacgtgtcccagagcaaggactccgacgtgtacatcaccgataagtgcgtgctggacatgcggagcatggacttcaagagcaactccgccgtggcctggtccaacaagtccgatttcgcctgcgccaacgccttcaacaacagcattatccccgaggacacattcttcccaagccccgagagcagctgcggctttaccagcgagagctaccagcagggcgtgctgagcgccaccatcctgtacgagatcctgctgggcaaggccaccctgtacgccgtgctggtgtctgccctggtgctgatggctatggtcaagcggaaggacagccggggacgcgccaagagaagcggatctggcgtgaagcagaccctgaatttcgacctgctgaagctggctggcgacgtggaatccaacccaggccctactagtatggactggatttggcgcatccttttccttgtcggcgctgctaccggcgcccattccgggccccaggttcagctgcaagagtctggcggaggacttgctcaagctggcggaagcctgagactgtcttgtgccgcctctggcagaaccttcagcatgggctggtttagacaggcccctggcaaagagagagagttcgtcgccgccatcacatacagcggcggcagcccttactacgcctcttctgtcagaggccggttcaccatcagccgggacaacgccaagaacaccgtgtacctccagatgaacagcctgaagccagaggacaccgccgtgtactactgtgccgccaatccaacctacggcagcgactggaatgccgagaattggggccagggcacccaagtgacagtgtctagtggatccggcggcggaggatctggcggaggcggatctgggggcggaggctctttcgaagaagtgcagctggttgaatcaggcggaggactggttcagcctggcggatctctgagactgtcttgtgccgccagcggctacaccttcaccagctactggatgaactgggtccgacaggcccctggcaaaggactggaatgggtcggaatgatcgaccccagcgacagcgagacacactacaaccacatcttcaaggaccgcttcaccatcagcgccgacaccagcaagaataccgcctacctccagatgaactccctgagagccgaggacaccgccgtgtactactgcgccagaaacctgtatctgttcggccagggaaccctggtcacagtgtcatctacgcgtgaggacctgaagaacgtgttcccacctgaggtggccgtgttcgagcctagcgaggccgagatcagccacacccagaaagccaccctcgtgtgcctggctaccggcttctaccccgaccatgtggaactgtcttggtgggtcaacggcaaagaggtgcacagcggcgtgtgtaccgacccccagccactgaaagaacagcccgccctgaacgacagccggtactgcctgagcagcagactgagagtgtccgccaccttctggcagaacccccggaaccacttcagatgccaggtgcagttctacggcctgagcgagaacgacgagtggacccaggacagagccaagcccgtgacccagatcgtgtctgccgaagcctggggcagagccgattgcgacgtgaagctggtggaaaagagcttcgagacagacaccaacctgaacttccagaacctgagcgtgatcggcttcagaatcctgctgctgaaagtggccggctttaacctgctgatgaccctgcggctgtggtccagc

SEQ ID NO: 36746 - DNA, 2286 bp, synthetic construct
  source 1..2286: mol_type = other DNA
atggccttaccagtgaccgccttgctcctgccgctggccttgctgctccacgccgccaggccggaagtgcaactggtggaatctggaggctctctggtgcagccagggggaagcctgagactgtcttgtgccgcttccggcttcaccttcgacgactacgccatgagctgggtgcgccaggtgccaggcaaaggcctggaatgggtgtccagcatcaactggagcggcacccacaccgattacgccgactccgtgaaaggcagattcacaatcagcagaaacaacgccaacaataccctgtacctgcagatgaactccctgaagtctgaggatacagcagtgtattattgcgccaagaactggcgggacgccggcaccacttggtttgagaaaagcggctctgccggacagggaacccaagtgacagtgtcctccggtaccggcggaggcggatctggcggcggaggtagcggtggcggaggatctgaattcgacatccagatgacacagagccctagcagcctgtctgccagcgtgggagacagagtgaccatcacatgcaagagcagccagagcctgctggactccgatggcaagacctacctgaactggtatcagcagaagcccggcaaggcccctaagctgctgatctacctggtgtccaagctggatagcggcgtgcccagcagattttctggcagcggcagcggaaccgacttcaccctgacaatatccagcctccagcctgaggacttcgccacctactactgctggcaaggcacccactttccattcaccttcggccagggcaccaaggtggaaatcaaaagactcgaggacctgaagaacgtgttcccacctgaggtggccgtgttcgagcctagcgaggccgagatcagccacacccagaaagccaccctcgtgtgcctggctaccggcttctaccccgaccatgtggaactgtcttggtgggtcaacggcaaagaggtgcacagcggcgtgtgtaccgacccccagccactgaaagaacagcccgccctgaacgacagccggtactgcctgagcagcagactgagagtgtccgccaccttctggcagaacccccggaaccacttcagatgccaggtgcagttctacggcctgagcgagaacgacgagtggacccaggacagagccaagcccgtgacccagatcgtgtctgccgaagcctggggcagagccgattgcgacgtgaagctggtggaaaagagcttcgagacagacaccaacctgaacttccagaacctgagcgtgatcggcttcagaatcctgctgctgaaagtggccggctttaacctgctgatgaccctgcggctgtggtccagcagggccaagcgatctggatctggagcaacaaacttctcactactcaaacaagcaggtgacgtggaggagaatcccgggcctactagtatggactggatttggcgcatccttttccttgtcggcgctgctaccggcgcgcattccttcgaagaagtgcagctggttgaatcaggcggaggactggttcagcctggcggatctctgagactgtcttgtgccgccagcggctacaccttcaccagctactggatgaactgggtccgacaggcccctggcaaaggactggaatgggtcggaatgatcgaccccagcgacagcgagacacactacaaccacatcttcaaggaccgcttcaccatcagcgccgacaccagcaagaataccgcctacctccagatgaactccctgagagccgaggacaccgccgtgtactactgcgccagaaacctgtatctgttcggccagggaaccctggtcacagtgtcatctacgcgtatccagaaccctgatcctgccgtgtaccagctgcgggatagcaagagcagcgacaagagcgtgtgtctgttcaccgacttcgacagccagaccaacgtgtcccagagcaaggactccgacgtgtacatcaccgataagtgcgtgctggacatgcggagcatggacttcaagagcaactccgccgtggcctggtccaacaagtccgatttcgcctgcgccaacgccttcaacaacagcattatccccgaggacacattcttcccaagccccgagagcagctgcggctttaccagcgagagctaccagcagggcgtgctgagcgccaccatcctgtacgagatcctgctgggcaaggccaccctgtacgccgtgctggtgtctgccctggtgctgatggctatggtcaagcggaaggacagccgggga

SEQ ID NO: 36747 - DNA, 2298 bp, synthetic construct
  source 1..2298: mol_type = other DNA
atggccttaccagtgaccgccttgctcctgccgctggccttgctgctccacgccgccaggccggaagtgcaactggtggaatctggaggctctctggtgcagccagggggaagcctgagactgtcttgtgccgcttccggcttcaccttcgacgactacgccatgagctgggtgcgccaggtgccaggcaaaggcctggaatgggtgtccagcatcaactggagcggcacccacaccgattacgccgactccgtgaaaggcagattcacaatcagcagaaacaacgccaacaataccctgtacctgcagatgaactccctgaagtctgaggatacagcagtgtattattgcgccaagaactggcgggacgccggcaccacttggtttgagaaaagcggctctgccggacagggaacccaagtgacagtgtcctccggtaccggcggaggcggatctggcggcggaggtagcggtggcggaggatctgaattcgacatccagatgacacagagccctagcagcctgtctgccagcgtgggagacagagtgaccatcacatgcaagagcagccagagcctgctggactccgatggcaagacctacctgaactggtatcagcagaagcccggcaaggcccctaagctgctgatctacctggtgtccaagctggatagcggcgtgcccagcagattttctggcagcggcagcggaaccgacttcaccctgacaatatccagcctccagcctgaggacttcgccacctactactgctggcaaggcacccactttccattcaccttcggccagggcaccaaggtggaaatcaaaagactcgagatccagaaccctgatcctgccgtgtaccagctgcgggatagcaagagcagcgacaagagcgtgtgtctgttcaccgacttcgacagccagaccaacgtgtcccagagcaaggactccgacgtgtacatcaccgataagtgcgtgctggacatgcggagcatggacttcaagagcaactccgccgtggcctggtccaacaagtccgatttcgcctgcgccaacgccttcaacaacagcattatccccgaggacacattcttcccaagccccgagagcagctgcggctttaccagcgagagctaccagcagggcgtgctgagcgccaccatcctgtacgagatcctgctgggcaaggccaccctgtacgccgtgctggtgtctgccctggtgctgatggctatggtcaagcggaaggacagccggggacgcgccaagagaagcggatctggcgtgaagcagaccctgaatttcgacctgctgaagctggctggcgacgtggaatccaacccaggccctactagtatggactggatttggcgcatccttttccttgtcggcgctgctaccggcgcgcattccttcgaagaagtgcagctggttgaatcaggcggaggactggttcagcctggcggatctctgagactgtcttgtgccgccagcggctacaccttcaccagctactggatgaactgggtccgacaggcccctggcaaaggactggaatgggtcggaatgatcgaccccagcgacagcgagacacactacaaccacatcttcaaggaccgcttcaccatcagcgccgacaccagcaagaataccgcctacctccagatgaactccctgagagccgaggacaccgccgtgtactactgcgccagaaacctgtatctgttcggccagggaaccctggtcacagtgtcatctacgcgtgaggacctgaagaacgtgttcccacctgaggtggccgtgttcgagcctagcgaggccgagatcagccacacccagaaagccaccctcgtgtgcctggctaccggcttctaccccgaccatgtggaactgtcttggtgggtcaacggcaaagaggtgcacagcggcgtgtgtaccgacccccagccactgaaagaacagcccgccctgaacgacagccggtactgcctgagcagcagactgagagtgtccgccaccttctggcagaacccccggaaccacttcagatgccaggtgcagttctacggcctgagcgagaacgacgagtggacccaggacagagccaagcccgtgacccagatcgtgtctgccgaagcctggggcagagccgattgcgacgtgaagctggtggaaaagagcttcgagacagacaccaacctgaacttccagaacctgagcgtgatcggcttcagaatcctgctgctgaaagtggccggctttaacctgctgatgaccctgcggctgtggtccagc

SEQ ID NO: 36748 - DNA, 2280 bp, synthetic construct
  source 1..2280: mol_type = other DNA
atggccttaccagtgaccgccttgctcctgccgctggccttgctgctccacgccgccaggccggaagttcagctgcttgagtctggcggaggactggttcaacctggcggaagcctgagactgtcttgtgccgccagcggcttcatcttcagcagctacgccatgagctgggtccgacaggctcctggaaagggccaagaatgggtttccggcgttagcggcacaggcgtgaacacctactacgccgatagcgtgaagggcagattcaccatcagccgggacaacagcaagaacaccctgtacctccagatgaacagcctgagagccgaggacaccgccgtgtactattgtgcctctggcaaaggctgggacagcggctcttggtacgaggactatagaggccagggcaccctggtcacagtttcttcaggtaccggcggaggcggatctggcggcggaggtagcggtggcggaggatctgaattcgacatccagatgacacagagccctagcagcctgtctgccagcgtgggagacagagtgaccatcacatgcaagagcagccagagcctgctggactccgatggcaagacctacctgaactggtatcagcagaagcccggcaaggcccctaagctgctgatctacctggtgtccaagctggatagcggcgtgcccagcagattttctggcagcggcagcggaaccgacttcaccctgacaatatccagcctccagcctgaggacttcgccacctactactgctggcaaggcacccactttccattcaccttcggccagggcaccaaggtggaaatcaaaagactcgaggacctgaagaacgtgttcccacctgaggtggccgtgttcgagcctagcgaggccgagatcagccacacccagaaagccaccctcgtgtgcctggctaccggcttctaccccgaccatgtggaactgtcttggtgggtcaacggcaaagaggtgcacagcggcgtgtgtaccgacccccagccactgaaagaacagcccgccctgaacgacagccggtactgcctgagcagcagactgagagtgtccgccaccttctggcagaacccccggaaccacttcagatgccaggtgcagttctacggcctgagcgagaacgacgagtggacccaggacagagccaagcccgtgacccagatcgtgtctgccgaagcctggggcagagccgattgcgacgtgaagctggtggaaaagagcttcgagacagacaccaacctgaacttccagaacctgagcgtgatcggcttcagaatcctgctgctgaaagtggccggctttaacctgctgatgaccctgcggctgtggtccagcagggccaagcgatctggatctggagcaacaaacttctcactactcaaacaagcaggtgacgtggaggagaatcccgggcctactagtatggactggatttggcgcatccttttccttgtcggcgctgctaccggcgcgcattccttcgaagaagtgcagctggttgaatcaggcggaggactggttcagcctggcggatctctgagactgtcttgtgccgccagcggctacaccttcaccagctactggatgaactgggtccgacaggcccctggcaaaggactggaatgggtcggaatgatcgaccccagcgacagcgagacacactacaaccacatcttcaaggaccgcttcaccatcagcgccgacaccagcaagaataccgcctacctccagatgaactccctgagagccgaggacaccgccgtgtactactgcgccagaaacctgtatctgttcggccagggaaccctggtcacagtgtcatctacgcgtatccagaaccctgatcctgccgtgtaccagctgcgggatagcaagagcagcgacaagagcgtgtgtctgttcaccgacttcgacagccagaccaacgtgtcccagagcaaggactccgacgtgtacatcaccgataagtgcgtgctggacatgcggagcatggacttcaagagcaactccgccgtggcctggtccaacaagtccgatttcgcctgcgccaacgccttcaacaacagcattatccccgaggacacattcttcccaagccccgagagcagctgcggctttaccagcgagagctaccagcagggcgtgctgagcgccaccatcctgtacgagatcctgctgggcaaggccaccctgtacgccgtgctggtgtctgccctggtgctgatggctatggtcaagcggaaggacagccgggga

SEQ ID NO: 36749 - DNA, 2292 bp, synthetic construct
  source 1..2292: mol_type = other DNA
atggccttaccagtgaccgccttgctcctgccgctggccttgctgctccacgccgccaggccggaagttcagctgcttgagtctggcggaggactggttcaacctggcggaagcctgagactgtcttgtgccgccagcggcttcatcttcagcagctacgccatgagctgggtccgacaggctcctggaaagggccaagaatgggtttccggcgttagcggcacaggcgtgaacacctactacgccgatagcgtgaagggcagattcaccatcagccgggacaacagcaagaacaccctgtacctccagatgaacagcctgagagccgaggacaccgccgtgtactattgtgcctctggcaaaggctgggacagcggctcttggtacgaggactatagaggccagggcaccctggtcacagtttcttcaggtaccggcggaggcggatctggcggcggaggtagcggtggcggaggatctgaattcgacatccagatgacacagagccctagcagcctgtctgccagcgtgggagacagagtgaccatcacatgcaagagcagccagagcctgctggactccgatggcaagacctacctgaactggtatcagcagaagcccggcaaggcccctaagctgctgatctacctggtgtccaagctggatagcggcgtgcccagcagattttctggcagcggcagcggaaccgacttcaccctgacaatatccagcctccagcctgaggacttcgccacctactactgctggcaaggcacccactttccattcaccttcggccagggcaccaaggtggaaatcaaaagactcgagatccagaaccctgatcctgccgtgtaccagctgcgggatagcaagagcagcgacaagagcgtgtgtctgttcaccgacttcgacagccagaccaacgtgtcccagagcaaggactccgacgtgtacatcaccgataagtgcgtgctggacatgcggagcatggacttcaagagcaactccgccgtggcctggtccaacaagtccgatttcgcctgcgccaacgccttcaacaacagcattatccccgaggacacattcttcccaagccccgagagcagctgcggctttaccagcgagagctaccagcagggcgtgctgagcgccaccatcctgtacgagatcctgctgggcaaggccaccctgtacgccgtgctggtgtctgccctggtgctgatggctatggtcaagcggaaggacagccggggacgcgccaagagaagcggatctggcgtgaagcagaccctgaatttcgacctgctgaagctggctggcgacgtggaatccaacccaggccctactagtatggactggatttggcgcatccttttccttgtcggcgctgctaccggcgcgcattccttcgaagaagtgcagctggttgaatcaggcggaggactggttcagcctggcggatctctgagactgtcttgtgccgccagcggctacaccttcaccagctactggatgaactgggtccgacaggcccctggcaaaggactggaatgggtcggaatgatcgaccccagcgacagcgagacacactacaaccacatcttcaaggaccgcttcaccatcagcgccgacaccagcaagaataccgcctacctccagatgaactccctgagagccgaggacaccgccgtgtactactgcgccagaaacctgtatctgttcggccagggaaccctggtcacagtgtcatctacgcgtgaggacctgaagaacgtgttcccacctgaggtggccgtgttcgagcctagcgaggccgagatcagccacacccagaaagccaccctcgtgtgcctggctaccggcttctaccccgaccatgtggaactgtcttggtgggtcaacggcaaagaggtgcacagcggcgtgtgtaccgacccccagccactgaaagaacagcccgccctgaacgacagccggtactgcctgagcagcagactgagagtgtccgccaccttctggcagaacccccggaaccacttcagatgccaggtgcagttctacggcctgagcgagaacgacgagtggacccaggacagagccaagcccgtgacccagatcgtgtctgccgaagcctggggcagagccgattgcgacgtgaagctggtggaaaagagcttcgagacagacaccaacctgaacttccagaacctgagcgtgatcggcttcagaatcctgctgctgaaagtggccggctttaacctgctgatgaccctgcggctgtggtccagc

SEQ ID NO: 36750 - DNA, 2184 bp, synthetic construct
  source 1..2184: mol_type = other DNA
atggccttaccagtgaccgccttgctcctgccgctggccttgctgctccacgccgccaggccgatgctgcccgctcctaagaatctggtggtgtccagaatcaccgaggacagcgccagactgtcttggacagctcctgatgccgccttcgacagcttccccatccggtacatcgagacactgatctggggcgaagccatctggctggatgtgcctggaagcgagagaagctacgacctgaccggactgaagcctggcacagagtatgccgtggtcatcaccggcgtgaaaggcggcagattctctagccctctggtggcctctttcaccaccggtaccggcggaggcggatctggcggcggaggtagcggtggcggaggatctgaattcgacatccagatgacacagagccctagcagcctgtctgccagcgtgggagacagagtgaccatcacatgcaagagcagccagagcctgctggactccgatggcaagacctacctgaactggtatcagcagaagcccggcaaggcccctaagctgctgatctacctggtgtccaagctggatagcggcgtgcccagcagattttctggcagcggcagcggaaccgacttcaccctgacaatatccagcctccagcctgaggacttcgccacctactactgctggcaaggcacccactttccattcaccttcggccagggcaccaaggtggaaatcaaaagactcgaggacctgaagaacgtgttcccacctgaggtggccgtgttcgagcctagcgaggccgagatcagccacacccagaaagccaccctcgtgtgcctggctaccggcttctaccccgaccatgtggaactgtcttggtgggtcaacggcaaagaggtgcacagcggcgtgtgtaccgacccccagccactgaaagaacagcccgccctgaacgacagccggtactgcctgagcagcagactgagagtgtccgccaccttctggcagaacccccggaaccacttcagatgccaggtgcagttctacggcctgagcgagaacgacgagtggacccaggacagagccaagcccgtgacccagatcgtgtctgccgaagcctggggcagagccgattgcgacgtgaagctggtggaaaagagcttcgagacagacaccaacctgaacttccagaacctgagcgtgatcggcttcagaatcctgctgctgaaagtggccggctttaacctgctgatgaccctgcggctgtggtccagcagggccaagcgatctggatctggagcaacaaacttctcactactcaaacaagcaggtgacgtggaggagaatcccgggcctactagtatggactggatttggcgcatccttttccttgtcggcgctgctaccggcgcgcattccttcgaagaagtgcagctggttgaatcaggcggaggactggttcagcctggcggatctctgagactgtcttgtgccgccagcggctacaccttcaccagctactggatgaactgggtccgacaggcccctggcaaaggactggaatgggtcggaatgatcgaccccagcgacagcgagacacactacaaccacatcttcaaggaccgcttcaccatcagcgccgacaccagcaagaataccgcctacctccagatgaactccctgagagccgaggacaccgccgtgtactactgcgccagaaacctgtatctgttcggccagggaaccctggtcacagtgtcatctacgcgtatccagaaccctgatcctgccgtgtaccagctgcgggatagcaagagcagcgacaagagcgtgtgtctgttcaccgacttcgacagccagaccaacgtgtcccagagcaaggactccgacgtgtacatcaccgataagtgcgtgctggacatgcggagcatggacttcaagagcaactccgccgtggcctggtccaacaagtccgatttcgcctgcgccaacgccttcaacaacagcattatccccgaggacacattcttcccaagccccgagagcagctgcggctttaccagcgagagctaccagcagggcgtgctgagcgccaccatcctgtacgagatcctgctgggcaaggccaccctgtacgccgtgctggtgtctgccctggtgctgatggctatggtcaagcggaaggacagccgggga

SEQ ID NO: 36751 - DNA, 2196 bp, synthetic construct
  source 1..2196: mol_type = other DNA
atggccttaccagtgaccgccttgctcctgccgctggccttgctgctccacgccgccaggccgatgctgcccgctcctaagaatctggtggtgtccagaatcaccgaggacagcgccagactgtcttggacagctcctgatgccgccttcgacagcttccccatccggtacatcgagacactgatctggggcgaagccatctggctggatgtgcctggaagcgagagaagctacgacctgaccggactgaagcctggcacagagtatgccgtggtcatcaccggcgtgaaaggcggcagattctctagccctctggtggcctctttcaccaccggtaccggcggaggcggatctggcggcggaggtagcggtggcggaggatctgaattcgacatccagatgacacagagccctagcagcctgtctgccagcgtgggagacagagtgaccatcacatgcaagagcagccagagcctgctggactccgatggcaagacctacctgaactggtatcagcagaagcccggcaaggcccctaagctgctgatctacctggtgtccaagctggatagcggcgtgcccagcagattttctggcagcggcagcggaaccgacttcaccctgacaatatccagcctccagcctgaggacttcgccacctactactgctggcaaggcacccactttccattcaccttcggccagggcaccaaggtggaaatcaaaagactcgagatccagaaccctgatcctgccgtgtaccagctgcgggatagcaagagcagcgacaagagcgtgtgtctgttcaccgacttcgacagccagaccaacgtgtcccagagcaaggactccgacgtgtacatcaccgataagtgcgtgctggacatgcggagcatggacttcaagagcaactccgccgtggcctggtccaacaagtccgatttcgcctgcgccaacgccttcaacaacagcattatccccgaggacacattcttcccaagccccgagagcagctgcggctttaccagcgagagctaccagcagggcgtgctgagcgccaccatcctgtacgagatcctgctgggcaaggccaccctgtacgccgtgctggtgtctgccctggtgctgatggctatggtcaagcggaaggacagccggggacgcgccaagagaagcggatctggcgtgaagcagaccctgaatttcgacctgctgaagctggctggcgacgtggaatccaacccaggccctactagtatggactggatttggcgcatccttttccttgtcggcgctgctaccggcgcgcattccttcgaagaagtgcagctggttgaatcaggcggaggactggttcagcctggcggatctctgagactgtcttgtgccgccagcggctacaccttcaccagctactggatgaactgggtccgacaggcccctggcaaaggactggaatgggtcggaatgatcgaccccagcgacagcgagacacactacaaccacatcttcaaggaccgcttcaccatcagcgccgacaccagcaagaataccgcctacctccagatgaactccctgagagccgaggacaccgccgtgtactactgcgccagaaacctgtatctgttcggccagggaaccctggtcacagtgtcatctacgcgtgaggacctgaagaacgtgttcccacctgaggtggccgtgttcgagcctagcgaggccgagatcagccacacccagaaagccaccctcgtgtgcctggctaccggcttctaccccgaccatgtggaactgtcttggtgggtcaacggcaaagaggtgcacagcggcgtgtgtaccgacccccagccactgaaagaacagcccgccctgaacgacagccggtactgcctgagcagcagactgagagtgtccgccaccttctggcagaacccccggaaccacttcagatgccaggtgcagttctacggcctgagcgagaacgacgagtggacccaggacagagccaagcccgtgacccagatcgtgtctgccgaagcctggggcagagccgattgcgacgtgaagctggtggaaaagagcttcgagacagacaccaacctgaacttccagaacctgagcgtgatcggcttcagaatcctgctgctgaaagtggccggctttaacctgctgatgaccctgcggctgtggtccagc

SEQ ID NO: 36752 - DNA, 2271 bp, synthetic construct
  source 1..2271: mol_type = other DNA
atggccttaccagtgaccgccttgctcctgccgctggccttgctgctccacgccgccaggccggaggtgcagctggttgaatctggcggaggactggttcagcctggcggatctctgagactgtcttgtgccgccagcggcttcaacatcaaggatacctgtatcggctgggttcgcagagcccctggcaaagaggaagaactggtcgccaaaatctgcaagtacagcggccacaccagatacgccgacagcgtgaagggcagattcaccatcagcgccgacaccagcaagaacaccgcctacctccagatgaacagcctgagagccgaggacaccgccgtgtactattgtgccgctgtgtccgtcagagatgggcactacaattactggggccagggcaccaccgtgaccgtttcttcaggtaccggcggaggcggatctggcggcggaggtagcggtggcggaggatctgaattcgacatccagatgacacagagccctagcagcctgtctgccagcgtgggagacagagtgaccatcacatgcaagagcagccagagcctgctggactccgatggcaagacctacctgaactggtatcagcagaagcccggcaaggcccctaagctgctgatctacctggtgtccaagctggatagcggcgtgcccagcagattttctggcagcggcagcggaaccgacttcaccctgacaatatccagcctccagcctgaggacttcgccacctactactgctggcaaggcacccactttccattcaccttcggccagggcaccaaggtggaaatcaaaagactcgaggacctgaagaacgtgttcccacctgaggtggccgtgttcgagcctagcgaggccgagatcagccacacccagaaagccaccctcgtgtgcctggctaccggcttctaccccgaccatgtggaactgtcttggtgggtcaacggcaaagaggtgcacagcggcgtgtgtaccgacccccagccactgaaagaacagcccgccctgaacgacagccggtactgcctgagcagcagactgagagtgtccgccaccttctggcagaacccccggaaccacttcagatgccaggtgcagttctacggcctgagcgagaacgacgagtggacccaggacagagccaagcccgtgacccagatcgtgtctgccgaagcctggggcagagccgattgcgacgtgaagctggtggaaaagagcttcgagacagacaccaacctgaacttccagaacctgagcgtgatcggcttcagaatcctgctgctgaaagtggccggctttaacctgctgatgaccctgcggctgtggtccagcagggccaagcgatctggatctggagcaacaaacttctcactactcaaacaagcaggtgacgtggaggagaatcccgggcctactagtatggactggatttggcgcatccttttccttgtcggcgctgctaccggcgcgcattccttcgaagaagtgcagctggttgaatcaggcggaggactggttcagcctggcggatctctgagactgtcttgtgccgccagcggctacaccttcaccagctactggatgaactgggtccgacaggcccctggcaaaggactggaatgggtcggaatgatcgaccccagcgacagcgagacacactacaaccacatcttcaaggaccgcttcaccatcagcgccgacaccagcaagaataccgcctacctccagatgaactccctgagagccgaggacaccgccgtgtactactgcgccagaaacctgtatctgttcggccagggaaccctggtcacagtgtcatctacgcgtatccagaaccctgatcctgccgtgtaccagctgcgggatagcaagagcagcgacaagagcgtgtgtctgttcaccgacttcgacagccagaccaacgtgtcccagagcaaggactccgacgtgtacatcaccgataagtgcgtgctggacatgcggagcatggacttcaagagcaactccgccgtggcctggtccaacaagtccgatttcgcctgcgccaacgccttcaacaacagcattatccccgaggacacattcttcccaagccccgagagcagctgcggctttaccagcgagagctaccagcagggcgtgctgagcgccaccatcctgtacgagatcctgctgggcaaggccaccctgtacgccgtgctggtgtctgccctggtgctgatggctatggtcaagcggaaggacagccgggga

SEQ ID NO: 36753 - DNA, 2283 bp, synthetic construct
  source 1..2283: mol_type = other DNA
atggccttaccagtgaccgccttgctcctgccgctggccttgctgctccacgccgccaggccggaggtgcagctggttgaatctggcggaggactggttcagcctggcggatctctgagactgtcttgtgccgccagcggcttcaacatcaaggatacctgtatcggctgggttcgcagagcccctggcaaagaggaagaactggtcgccaaaatctgcaagtacagcggccacaccagatacgccgacagcgtgaagggcagattcaccatcagcgccgacaccagcaagaacaccgcctacctccagatgaacagcctgagagccgaggacaccgccgtgtactattgtgccgctgtgtccgtcagagatgggcactacaattactggggccagggcaccaccgtgaccgtttcttcaggtaccggcggaggcggatctggcggcggaggtagcggtggcggaggatctgaattcgacatccagatgacacagagccctagcagcctgtctgccagcgtgggagacagagtgaccatcacatgcaagagcagccagagcctgctggactccgatggcaagacctacctgaactggtatcagcagaagcccggcaaggcccctaagctgctgatctacctggtgtccaagctggatagcggcgtgcccagcagattttctggcagcggcagcggaaccgacttcaccctgacaatatccagcctccagcctgaggacttcgccacctactactgctggcaaggcacccactttccattcaccttcggccagggcaccaaggtggaaatcaaaagactcgagatccagaaccctgatcctgccgtgtaccagctgcgggatagcaagagcagcgacaagagcgtgtgtctgttcaccgacttcgacagccagaccaacgtgtcccagagcaaggactccgacgtgtacatcaccgataagtgcgtgctggacatgcggagcatggacttcaagagcaactccgccgtggcctggtccaacaagtccgatttcgcctgcgccaacgccttcaacaacagcattatccccgaggacacattcttcccaagccccgagagcagctgcggctttaccagcgagagctaccagcagggcgtgctgagcgccaccatcctgtacgagatcctgctgggcaaggccaccctgtacgccgtgctggtgtctgccctggtgctgatggctatggtcaagcggaaggacagccggggacgcgccaagagaagcggatctggcgtgaagcagaccctgaatttcgacctgctgaagctggctggcgacgtggaatccaacccaggccctactagtatggactggatttggcgcatccttttccttgtcggcgctgctaccggcgcgcattccttcgaagaagtgcagctggttgaatcaggcggaggactggttcagcctggcggatctctgagactgtcttgtgccgccagcggctacaccttcaccagctactggatgaactgggtccgacaggcccctggcaaaggactggaatgggtcggaatgatcgaccccagcgacagcgagacacactacaaccacatcttcaaggaccgcttcaccatcagcgccgacaccagcaagaataccgcctacctccagatgaactccctgagagccgaggacaccgccgtgtactactgcgccagaaacctgtatctgttcggccagggaaccctggtcacagtgtcatctacgcgtgaggacctgaagaacgtgttcccacctgaggtggccgtgttcgagcctagcgaggccgagatcagccacacccagaaagccaccctcgtgtgcctggctaccggcttctaccccgaccatgtggaactgtcttggtgggtcaacggcaaagaggtgcacagcggcgtgtgtaccgacccccagccactgaaagaacagcccgccctgaacgacagccggtactgcctgagcagcagactgagagtgtccgccaccttctggcagaacccccggaaccacttcagatgccaggtgcagttctacggcctgagcgagaacgacgagtggacccaggacagagccaagcccgtgacccagatcgtgtctgccgaagcctggggcagagccgattgcgacgtgaagctggtggaaaagagcttcgagacagacaccaacctgaacttccagaacctgagcgtgatcggcttcagaatcctgctgctgaaagtggccggctttaacctgctgatgaccctgcggctgtggtccagc

SEQ ID NO: 36754 - DNA, 3387 bp, synthetic construct
  source 1..3387: mol_type = other DNA
atggccttaccagtgaccgccttgctcctgccgctggccttgctgctccacgccgccaggccggaagtgcagctggttgaatctggcggaggactggttcaggctggcggatctctgagactgtcttgtgccgccagcggcagaacctttagcatgggctggtttagacaggcccctggcaaagagagagagttcgtcgccgccatcacatactctggcggcagcccttactacgccgactctgtgaagggcagattcaccatcagccgggacaacgccaagaacaccgtgtacctccagatgaacagcctgaagcctgaggacaccgccgtgtactactgcgccgccaatccaacatacggcagcgactggaacgccgagaattggggccagggaacccaagtgacagtgtctagcggtaccggcggaggcggatctggcggcggaggtagcggtggcggaggatctgaattcgacatccagatgacacagagccctagcagcctgtctgccagcgtgggagacagagtgaccatcacatgcaagagcagccagagcctgctggactccgatggcaagacctacctgaactggtatcagcagaagcccggcaaggcccctaagctgctgatctacctggtgtccaagctggatagcggcgtgcccagcagattttctggcagcggcagcggaaccgacttcaccctgacaatatccagcctccagcctgaggacttcgccacctactactgctggcaaggcacccactttccattcaccttcggccagggcaccaaggtggaaatcaaaagactcgaggacctgaagaacgtgttcccacctgaggtggccgtgttcgagcctagcgaggccgagatcagccacacccagaaagccaccctcgtgtgcctggctaccggcttctaccccgaccatgtggaactgtcttggtgggtcaacggcaaagaggtgcacagcggcgtgtgtaccgacccccagccactgaaagaacagcccgccctgaacgacagccggtactgcctgagcagcagactgagagtgtccgccaccttctggcagaacccccggaaccacttcagatgccaggtgcagttctacggcctgagcgagaacgacgagtggacccaggacagagccaagcccgtgacccagatcgtgtctgccgaagcctggggcagagccgattgcgacgtgaagctggtggaaaagagcttcgagacagacaccaacctgaacttccagaacctgagcgtgatcggcttcagaatcctgctgctgaaagtggccggctttaacctgctgatgaccctgcggctgtggtccagcagggccaagcgatctggatctggagcaacaaacttctcactactcaaacaagcaggtgacgtggaggagaatcccgggcctactagtgccaccatggactggatttggcgcatccttttccttgtcggcgctgctaccggcgcccattccgggcccgaagtgcaactggttgaatccggtggcggcctggtgcaagcaggcggatctctcagacttagctgtgccgcctccggcagaaccttcacaatgggatggtttaggcaggctccagggaaagagagagagttcgtcgccgccatctctctgtctcccacactggcctactacgccgactctgtgaaaggccggttcaccatctccagagataatgccaagaacaccgtggtgctgcaaatgaactctctgaaacccgaggatacagccctgtactattgtgccgctgaccggaagtccgtgatgagcatcagacccgattactggggacagggcacacaagtcacagtgtcctctggatccggcggcggaggatctggcggaggcggatctgggggcggaggctctttcgaagaagtgcagctggttgaatcaggcggaggactggttcagcctggcggatctctgagactgtcttgtgccgccagcggctacaccttcaccagctactggatgaactgggtccgacaggcccctggcaaaggactggaatgggtcggaatgatcgaccccagcgacagcgagacacactacaaccacatcttcaaggaccgcttcaccatcagcgccgacaccagcaagaataccgcctacctccagatgaactccctgagagccgaggacaccgccgtgtactactgcgccagaaacctgtatctgttcggccagggaaccctggtcacagtgtcatctacgcgtatccagaaccctgatcctgccgtgtaccagctgcgggatagcaagagcagcgacaagagcgtgtgtctgttcaccgacttcgacagccagaccaacgtgtcccagagcaaggactccgacgtgtacatcaccgataagtgcgtgctggacatgcggagcatggacttcaagagcaactccgccgtggcctggtccaacaagtccgatttcgcctgcgccaacgccttcaacaacagcattatccccgaggacacattcttcccaagccccgagagcagctgcggctttaccagcgagagctaccagcagggcgtgctgagcgccaccatcctgtacgagatcctgctgggcaaggccaccctgtacgccgtgctggtgtctgccctggtgctgatggctatggtcaagcggaaggacagccggggacgcgccaagagaagcggatctggcgtgaagcagaccctgaatttcgacctgctgaagctggctggcgacgtggaatccaacccaggcccttctagaggccatatgaccgagtacaagcccacggtgcgcctcgccacccgcgacgacgtccccagggccgtacgcaccctcgccgccgcgttcgccgactaccccgccacgcgccacaccgtcgatccggaccgccacatcgagcgggtcaccgagctgcaagaactcttcctcacgcgcgtcgggctcgacatcggcaaggtgtgggtcgcggacgacggcgccgcggtggcggtctggaccacgccggagagcgtcgaagcgggggcggtgttcgccgagatcggcccgcgcatggccgagttgagcggttcccggctggccgcgcagcaacagatggaaggcctcctggcgccgcaccggcccaaggagcccgcgtggttcctggccaccgtcggcgtctcgcccgaccaccagggcaagggtctgggcagcgccgtcgtgctccccggagtggaggcggccgagcgcgccggggtgcccgccttcctggagacctccgcgccccgcaacctccccttctacgagcggctcggcttcaccgtcaccgccgacgtcgaggtgcccgaaggaccgcgcacctggtgcatgacccgcaagcccggtgcctga

SEQ ID NO: 36755 - DNA, 2301 bp, synthetic construct
  source 1..2301: mol_type = other DNA
atggccttaccagtgaccgccttgctcctgccgctggccttgctgctccacgccgccaggccggaagtgcagctggttgaatctggcggaggactggttcagcctggcggatctctgagactgtcttgtgccgcctctggcttcgccagcgactactatatcatcggctggttcagacaggcccctggcaaagagagagagggcgtcagctgtatcagcagcagatacgccaacaccaactacgccgacagcgtgaagggcagattcaccatcagccgggacaacgccaagaacaccgtgtacctccagatgaacagcctgaagcctgaggacaccgccgtgtactactgtgccgccgacaccagaagatacacctgtcctgacattgccaccatgcaccggaacttcgattcttggggccagggcacactggtcaccgtttcttctggtaccggcggaggcggatctggcggcggaggtagcggtggcggaggatctgaattcgacatccagatgacacagagccctagcagcctgtctgccagcgtgggagacagagtgaccatcacatgcaagagcagccagagcctgctggactccgatggcaagacctacctgaactggtatcagcagaagcccggcaaggcccctaagctgctgatctacctggtgtccaagctggatagcggcgtgcccagcagattttctggcagcggcagcggaaccgacttcaccctgacaatatccagcctccagcctgaggacttcgccacctactactgctggcaaggcacccactttccattcaccttcggccagggcaccaaggtggaaatcaaaagactcgaggacctgaagaacgtgttcccacctgaggtggccgtgttcgagcctagcgaggccgagatcagccacacccagaaagccaccctcgtgtgcctggctaccggcttctaccccgaccatgtggaactgtcttggtgggtcaacggcaaagaggtgcacagcggcgtgtgtaccgacccccagccactgaaagaacagcccgccctgaacgacagccggtactgcctgagcagcagactgagagtgtccgccaccttctggcagaacccccggaaccacttcagatgccaggtgcagttctacggcctgagcgagaacgacgagtggacccaggacagagccaagcccgtgacccagatcgtgtctgccgaagcctggggcagagccgattgcgacgtgaagctggtggaaaagagcttcgagacagacaccaacctgaacttccagaacctgagcgtgatcggcttcagaatcctgctgctgaaagtggccggctttaacctgctgatgaccctgcggctgtggtccagcagggccaagcgatctggatctggagcaacaaacttctcactactcaaacaagcaggtgacgtggaggagaatcccgggcctactagtatggactggatttggcgcatccttttccttgtcggcgctgctaccggcgcgcattccttcgaagaagtgcagctggttgaatcaggcggaggactggttcagcctggcggatctctgagactgtcttgtgccgccagcggctacaccttcaccagctactggatgaactgggtccgacaggcccctggcaaaggactggaatgggtcggaatgatcgaccccagcgacagcgagacacactacaaccacatcttcaaggaccgcttcaccatcagcgccgacaccagcaagaataccgcctacctccagatgaactccctgagagccgaggacaccgccgtgtactactgcgccagaaacctgtatctgttcggccagggaaccctggtcacagtgtcatctacgcgtatccagaaccctgatcctgccgtgtaccagctgcgggatagcaagagcagcgacaagagcgtgtgtctgttcaccgacttcgacagccagaccaacgtgtcccagagcaaggactccgacgtgtacatcaccgataagtgcgtgctggacatgcggagcatggacttcaagagcaactccgccgtggcctggtccaacaagtccgatttcgcctgcgccaacgccttcaacaacagcattatccccgaggacacattcttcccaagccccgagagcagctgcggctttaccagcgagagctaccagcagggcgtgctgagcgccaccatcctgtacgagatcctgctgggcaaggccaccctgtacgccgtgctggtgtctgccctggtgctgatggctatggtcaagcggaaggacagccggggataa

SEQ ID NO: 36756 - DNA, 2301 bp, synthetic construct
  source 1..2301: mol_type = other DNA
atggccttaccagtgaccgccttgctcctgccgctggccttgctgctccacgccgccaggccggaagtgcagctggttgaatctggcggaggactggttcagcctggcggatctctgagactgagctgtgaagccagcggcttcgccagcgacgattacatcatcggctggttcagacaggcccctggcaaagagagagagggcgtcagctgcatcagctctaagtacgccaacaccgtgtacaccgacagcgtgaagggcagattcagactgagcagaggcaccgccaagaataccgtgtacctccagatgagcgccctgaagcctgaggataccgccgtgtactactgcgctatggacagccgcagagtgacatgccctgagatcagcaccatgcaccggaacttcgattcttggggccagggcacactggtcacagtgtcatctggtaccggcggaggcggatctggcggcggaggtagcggtggcggaggatctgaattcgacatccagatgacacagagccctagcagcctgtctgccagcgtgggagacagagtgaccatcacatgcaagagcagccagagcctgctggactccgatggcaagacctacctgaactggtatcagcagaagcccggcaaggcccctaagctgctgatctacctggtgtccaagctggatagcggcgtgcccagcagattttctggcagcggcagcggaaccgacttcaccctgacaatatccagcctccagcctgaggacttcgccacctactactgctggcaaggcacccactttccattcaccttcggccagggcaccaaggtggaaatcaaaagactcgaggacctgaagaacgtgttcccacctgaggtggccgtgttcgagcctagcgaggccgagatcagccacacccagaaagccaccctcgtgtgcctggctaccggcttctaccccgaccatgtggaactgtcttggtgggtcaacggcaaagaggtgcacagcggcgtgtgtaccgacccccagccactgaaagaacagcccgccctgaacgacagccggtactgcctgagcagcagactgagagtgtccgccaccttctggcagaacccccggaaccacttcagatgccaggtgcagttctacggcctgagcgagaacgacgagtggacccaggacagagccaagcccgtgacccagatcgtgtctgccgaagcctggggcagagccgattgcgacgtgaagctggtggaaaagagcttcgagacagacaccaacctgaacttccagaacctgagcgtgatcggcttcagaatcctgctgctgaaagtggccggctttaacctgctgatgaccctgcggctgtggtccagcagggccaagcgatctggatctggagcaacaaacttctcactactcaaacaagcaggtgacgtggaggagaatcccgggcctactagtatggactggatttggcgcatccttttccttgtcggcgctgctaccggcgcgcattccttcgaagaagtgcagctggttgaatcaggcggaggactggttcagcctggcggatctctgagactgtcttgtgccgccagcggctacaccttcaccagctactggatgaactgggtccgacaggcccctggcaaaggactggaatgggtcggaatgatcgaccccagcgacagcgagacacactacaaccacatcttcaaggaccgcttcaccatcagcgccgacaccagcaagaataccgcctacctccagatgaactccctgagagccgaggacaccgccgtgtactactgcgccagaaacctgtatctgttcggccagggaaccctggtcacagtgtcatctacgcgtatccagaaccctgatcctgccgtgtaccagctgcgggatagcaagagcagcgacaagagcgtgtgtctgttcaccgacttcgacagccagaccaacgtgtcccagagcaaggactccgacgtgtacatcaccgataagtgcgtgctggacatgcggagcatggacttcaagagcaactccgccgtggcctggtccaacaagtccgatttcgcctgcgccaacgccttcaacaacagcattatccccgaggacacattcttcccaagccccgagagcagctgcggctttaccagcgagagctaccagcagggcgtgctgagcgccaccatcctgtacgagatcctgctgggcaaggccaccctgtacgccgtgctggtgtctgccctggtgctgatggctatggtcaagcggaaggacagccggggataa

SEQ ID NO: 36757 - DNA, 2298 bp, synthetic construct
  source 1..2298: mol_type = other DNA
atggccttaccagtgaccgccttgctcctgccgctggccttgctgctccacgccgccaggccggaagtgcagctggttgaatctggcggaggactggttcagcctggcggatctctgagactgtcttgtgccgcctctggcttcgccagcgactactatatcatcggctggttcagacaggcccctggcaaagagagagagggcgtcagctgtatcagcagcagatacgccaacaccaactacgccgacagcgtgaagggcagattcaccatcagccgggacaacgccaagaacaccgtgtacctccagatgaacagcctgaagcctgaggacaccgccgtgtactactgtgccgccgacaccagaagatacacctgtcctgacattgccaccatgcaccggaacttcgattcttggggccagggcacactggtcaccgtttcttctggtaccggcggaggcggatctggcggcggaggtagcggtggcggaggatctgaattcgacatccagatgacacagagccctagcagcctgtctgccagcgtgggagacagagtgaccatcacatgcaagagcagccagagcctgctggactccgatggcaagacctacctgaactggtatcagcagaagcccggcaaggcccctaagctgctgatctacctggtgtccaagctggatagcggcgtgcccagcagattttctggcagcggcagcggaaccgacttcaccctgacaatatccagcctccagcctgaggacttcgccacctactactgctggcaaggcacccactttccattcaccttcggccagggcaccaaggtggaaatcaaaagactcgagatccagaaccctgatcctgccgtgtaccagctgcgggatagcaagagcagcgacaagagcgtgtgtctgttcaccgacttcgacagccagaccaacgtgtcccagagcaaggactccgacgtgtacatcaccgataagtgcgtgctggacatgcggagcatggacttcaagagcaactccgccgtggcctggtccaacaagtccgatttcgcctgcgccaacgccttcaacaacagcattatccccgaggacacattcttcccaagccccgagagcagctgcggctttaccagcgagagctaccagcagggcgtgctgagcgccaccatcctgtacgagatcctgctgggcaaggccaccctgtacgccgtgctggtgtctgccctggtgctgatggctatggtcaagcggaaggacagccggggaagggccaagcgatctggatctggagcaacaaacttctcactactcaaacaagcaggtgacgtggaggagaatcccgggcctactagtatggactggatttggcgcatccttttccttgtcggcgctgctaccggcgcgcattccttcgaagaagtgcagctggttgaatcaggcggaggactggttcagcctggcggatctctgagactgtcttgtgccgccagcggctacaccttcaccagctactggatgaactgggtccgacaggcccctggcaaaggactggaatgggtcggaatgatcgaccccagcgacagcgagacacactacaaccacatcttcaaggaccgcttcaccatcagcgccgacaccagcaagaataccgcctacctccagatgaactccctgagagccgaggacaccgccgtgtactactgcgccagaaacctgtatctgttcggccagggaaccctggtcacagtgtcatctacgcgtgacctgaagaacgtgttcccacctgaggtggccgtgttcgagcctagcgaggccgagatcagccacacccagaaagccaccctcgtgtgcctggctaccggcttctaccccgaccatgtggaactgtcttggtgggtcaacggcaaagaggtgcacagcggcgtgtgtaccgacccccagccactgaaagaacagcccgccctgaacgacagccggtactgcctgagcagcagactgagagtgtccgccaccttctggcagaacccccggaaccacttcagatgccaggtgcagttctacggcctgagcgagaacgacgagtggacccaggacagagccaagcccgtgacccagatcgtgtctgccgaagcctggggcagagccgattgcgacgtgaagctggtggaaaagagcttcgagacagacaccaacctgaacttccagaacctgagcgtgatcggcttcagaatcctgctgctgaaagtggccggctttaacctgctgatgaccctgcggctgtggtccagc

SEQ ID NO: 36758 - DNA, 2298 bp, synthetic construct
  source 1..2298: mol_type = other DNA
atggccttaccagtgaccgccttgctcctgccgctggccttgctgctccacgccgccaggccggaagtgcagctggttgaatctggcggaggactggttcagcctggcggatctctgagactgagctgtgaagccagcggcttcgccagcgacgattacatcatcggctggttcagacaggcccctggcaaagagagagagggcgtcagctgcatcagctctaagtacgccaacaccgtgtacaccgacagcgtgaagggcagattcagactgagcagaggcaccgccaagaataccgtgtacctccagatgagcgccctgaagcctgaggataccgccgtgtactactgcgctatggacagccgcagagtgacatgccctgagatcagcaccatgcaccggaacttcgattcttggggccagggcacactggtcacagtgtcatctggtaccggcggaggcggatctggcggcggaggtagcggtggcggaggatctgaattcgacatccagatgacacagagccctagcagcctgtctgccagcgtgggagacagagtgaccatcacatgcaagagcagccagagcctgctggactccgatggcaagacctacctgaactggtatcagcagaagcccggcaaggcccctaagctgctgatctacctggtgtccaagctggatagcggcgtgcccagcagattttctggcagcggcagcggaaccgacttcaccctgacaatatccagcctccagcctgaggacttcgccacctactactgctggcaaggcacccactttccattcaccttcggccagggcaccaaggtggaaatcaaaagactcgagatccagaaccctgatcctgccgtgtaccagctgcgggatagcaagagcagcgacaagagcgtgtgtctgttcaccgacttcgacagccagaccaacgtgtcccagagcaaggactccgacgtgtacatcaccgataagtgcgtgctggacatgcggagcatggacttcaagagcaactccgccgtggcctggtccaacaagtccgatttcgcctgcgccaacgccttcaacaacagcattatccccgaggacacattcttcccaagccccgagagcagctgcggctttaccagcgagagctaccagcagggcgtgctgagcgccaccatcctgtacgagatcctgctgggcaaggccaccctgtacgccgtgctggtgtctgccctggtgctgatggctatggtcaagcggaaggacagccggggaagggccaagcgatctggatctggagcaacaaacttctcactactcaaacaagcaggtgacgtggaggagaatcccgggcctactagtatggactggatttggcgcatccttttccttgtcggcgctgctaccggcgcgcattccttcgaagaagtgcagctggttgaatcaggcggaggactggttcagcctggcggatctctgagactgtcttgtgccgccagcggctacaccttcaccagctactggatgaactgggtccgacaggcccctggcaaaggactggaatgggtcggaatgatcgaccccagcgacagcgagacacactacaaccacatcttcaaggaccgcttcaccatcagcgccgacaccagcaagaataccgcctacctccagatgaactccctgagagccgaggacaccgccgtgtactactgcgccagaaacctgtatctgttcggccagggaaccctggtcacagtgtcatctacgcgtgacctgaagaacgtgttcccacctgaggtggccgtgttcgagcctagcgaggccgagatcagccacacccagaaagccaccctcgtgtgcctggctaccggcttctaccccgaccatgtggaactgtcttggtgggtcaacggcaaagaggtgcacagcggcgtgtgtaccgacccccagccactgaaagaacagcccgccctgaacgacagccggtactgcctgagcagcagactgagagtgtccgccaccttctggcagaacccccggaaccacttcagatgccaggtgcagttctacggcctgagcgagaacgacgagtggacccaggacagagccaagcccgtgacccagatcgtgtctgccgaagcctggggcagagccgattgcgacgtgaagctggtggaaaagagcttcgagacagacaccaacctgaacttccagaacctgagcgtgatcggcttcagaatcctgctgctgaaagtggccggctttaacctgctgatgaccctgcggctgtggtccagc

SEQ ID NO: 36759 - DNA, 2271 bp, synthetic construct
  source 1..2271: mol_type = other DNA
atggccttaccagtgaccgccttgctcctgccgctggccttgctgctccacgccgccaggccgcaagtcaaactggaagaaagcggtggcggcctggtgcaacctggcgaatctctgagactgagctgtagcgccagcggctccatcttcaaggtgttcagagtgttcgccatgagctggtacaggcaaggccctggcaagcagagagagctggtcgcctctatcagcagcggcgagacaaccacatacgccgaatctgtgaaaggccggttcaccatcagccgggataatgccaagaataccgcctatctccagatggactccctgaagcctgaagatacagctgtgtactactgcaacgccgaccataccttcaccggcgatttttggggccagggaacccaagtgaccgtgtctagtggtaccggcggaggcggatctggcggcggaggtagcggtggcggaggatctgaattcgacatccagatgacacagagccctagcagcctgtctgccagcgtgggagacagagtgaccatcacatgcaagagcagccagagcctgctggactccgatggcaagacctacctgaactggtatcagcagaagcccggcaaggcccctaagctgctgatctacctggtgtccaagctggatagcggcgtgcccagcagattttctggcagcggcagcggaaccgacttcaccctgacaatatccagcctccagcctgaggacttcgccacctactactgctggcaaggcacccactttccattcaccttcggccagggcaccaaggtggaaatcaaaagactcgagatccagaaccctgatcctgccgtgtaccagctgcgggatagcaagagcagcgacaagagcgtgtgtctgttcaccgacttcgacagccagaccaacgtgtcccagagcaaggactccgacgtgtacatcaccgataagtgcgtgctggacatgcggagcatggacttcaagagcaactccgccgtggcctggtccaacaagtccgatttcgcctgcgccaacgccttcaacaacagcattatccccgaggacacattcttcccaagccccgagagcagctgcggctttaccagcgagagctaccagcagggcgtgctgagcgccaccatcctgtacgagatcctgctgggcaaggccaccctgtacgccgtgctggtgtctgccctggtgctgatggctatggtcaagcggaaggacagccggggaagggccaagcgatctggatctggagcaacaaacttctcactactcaaacaagcaggtgacgtggaggagaatcccgggcctactagtatggactggatttggcgcatccttttccttgtcggcgctgctaccggcgcgcattccttcgaagaagtgcagctggttgaatcaggcggaggactggttcagcctggcggatctctgagactgtcttgtgccgccagcggctacaccttcaccagctactggatgaactgggtccgacaggcccctggcaaaggactggaatgggtcggaatgatcgaccccagcgacagcgagacacactacaaccacatcttcaaggaccgcttcaccatcagcgccgacaccagcaagaataccgcctacctccagatgaactccctgagagccgaggacaccgccgtgtactactgcgccagaaacctgtatctgttcggccagggaaccctggtcacagtgtcatctacgcgtgacctgaagaacgtgttcccacctgaggtggccgtgttcgagcctagcgaggccgagatcagccacacccagaaagccaccctcgtgtgcctggctaccggcttctaccccgaccatgtggaactgtcttggtgggtcaacggcaaagaggtgcacagcggcgtgtgtaccgacccccagccactgaaagaacagcccgccctgaacgacagccggtactgcctgagcagcagactgagagtgtccgccaccttctggcagaacccccggaaccacttcagatgccaggtgcagttctacggcctgagcgagaacgacgagtggacccaggacagagccaagcccgtgacccagatcgtgtctgccgaagcctggggcagagccgattgcgacgtgaagctggtggaaaagagcttcgagacagacaccaacctgaacttccagaacctgagcgtgatcggcttcagaatcctgctgctgaaagtggccggctttaacctgctgatgaccctgcggctgtggtccagc

SEQ ID NO: 36760 - DNA, 2277 bp, synthetic construct
  source 1..2277: mol_type = other DNA
atggccttaccagtgaccgccttgctcctgccgctggccttgctgctccacgccgccaggccggacatccagatgacacagagccctagcagcctgtctgccagcgtgggagacagagtgaccatcacatgcaagagcagccagagcctgctggactccgatggcaagacctacctgaactggtatcagcagaagcccggcaaggcccctaagctgctgatctacctggtgtccaagctggatagcggcgtgcccagcagattttctggcagcggcagcggaaccgacttcaccctgacaatatccagcctccagcctgaggacttcgccacctactactgctggcaaggcacccactttccattcaccttcggccagggcaccaaggtggaaatcaaaagactcgaggacctgaagaacgtgttcccacctgaggtggccgtgttcgagcctagcgaggccgagatcagccacacccagaaagccaccctcgtgtgcctggctaccggcttctaccccgaccatgtggaactgtcttggtgggtcaacggcaaagaggtgcacagcggcgtgtgtaccgacccccagccactgaaagaacagcccgccctgaacgacagccggtactgcctgagcagcagactgagagtgtccgccaccttctggcagaacccccggaaccacttcagatgccaggtgcagttctacggcctgagcgagaacgacgagtggacccaggacagagccaagcccgtgacccagatcgtgtctgccgaagcctggggcagagccgattgcgacgtgaagctggtggaaaagagcttcgagacagacaccaacctgaacttccagaacctgagcgtgatcggcttcagaatcctgctgctgaaagtggccggctttaacctgctgatgaccctgcggctgtggtccagcagggccaagcgatctggatctggagcaacaaacttctcactactcaaacaagcaggtgacgtggaggagaatcccgggcctactagtgccaccatggactggatttggcgcatccttttccttgtcggcgctgctaccggcgcccattccgggcccgaagtgcagctggttgaatctggcggaggactggttcaggctggcggatctctgagactgtcttgtgccgccagcggcagaacctttagcatgggctggtttagacaggcccctggcaaagagagagagttcgtcgccgccatcacatactctggcggcagcccttactacgccgactctgtgaagggcagattcaccatcagccgggacaacgccaagaacaccgtgtacctccagatgaacagcctgaagcctgaggacaccgccgtgtactactgcgccgccaatccaacatacggcagcgactggaacgccgagaattggggccagggaacccaagtgacagtgtctagcggatccggcggcggaggatctggcggaggcggatctgggggcggaggctctttcgaagaagtgcagctggttgaatcaggcggaggactggttcagcctggcggatctctgagactgtcttgtgccgccagcggctacaccttcaccagctactggatgaactgggtccgacaggcccctggcaaaggactggaatgggtcggaatgatcgaccccagcgacagcgagacacactacaaccacatcttcaaggaccgcttcaccatcagcgccgacaccagcaagaataccgcctacctccagatgaactccctgagagccgaggacaccgccgtgtactactgcgccagaaacctgtatctgttcggccagggaaccctggtcacagtgtcatctacgcgtatccagaaccctgatcctgccgtgtaccagctgcgggatagcaagagcagcgacaagagcgtgtgtctgttcaccgacttcgacagccagaccaacgtgtcccagagcaaggactccgacgtgtacatcaccgataagtgcgtgctggacatgcggagcatggacttcaagagcaactccgccgtggcctggtccaacaagtccgatttcgcctgcgccaacgccttcaacaacagcattatccccgaggacacattcttcccaagccccgagagcagctgcggctttaccagcgagagctaccagcagggcgtgctgagcgccaccatcctgtacgagatcctgctgggcaaggccaccctgtacgccgtgctggtgtctgccctggtgctgatggctatggtcaagcggaaggacagccggggataa

SEQ ID NO: 36761 - DNA, 2280 bp, synthetic construct
  source 1..2280: mol_type = other DNA
atggccttaccagtgaccgccttgctcctgccgctggccttgctgctccacgccgccaggccggacatccagatgacacagagccctagcagcctgtctgccagcgtgggagacagagtgaccatcacatgcaagagcagccagagcctgctggactccgatggcaagacctacctgaactggtatcagcagaagcccggcaaggcccctaagctgctgatctacctggtgtccaagctggatagcggcgtgcccagcagattttctggcagcggcagcggaaccgacttcaccctgacaatatccagcctccagcctgaggacttcgccacctactactgctggcaaggcacccactttccattcaccttcggccagggcaccaaggtggaaatcaaaagactcgaggacctgaagaacgtgttcccacctgaggtggccgtgttcgagcctagcgaggccgagatcagccacacccagaaagccaccctcgtgtgcctggctaccggcttctaccccgaccatgtggaactgtcttggtgggtcaacggcaaagaggtgcacagcggcgtgtgtaccgacccccagccactgaaagaacagcccgccctgaacgacagccggtactgcctgagcagcagactgagagtgtccgccaccttctggcagaacccccggaaccacttcagatgccaggtgcagttctacggcctgagcgagaacgacgagtggacccaggacagagccaagcccgtgacccagatcgtgtctgccgaagcctggggcagagccgattgcgacgtgaagctggtggaaaagagcttcgagacagacaccaacctgaacttccagaacctgagcgtgatcggcttcagaatcctgctgctgaaagtggccggctttaacctgctgatgaccctgcggctgtggtccagcagggccaagcgatctggatctggagcaacaaacttctcactactcaaacaagcaggtgacgtggaggagaatcccgggcctactagtgccaccatggactggatttggcgcatccttttccttgtcggcgctgctaccggcgcccattccgggcccgaagtgcaactggtggaatctgggggcggactggtgcagccaggcggaagtctgaggctgtcttgtgccgcctccggcagcatcttcggcttcaacgacatggcctggtatcggcaggctcccggaaaacagcgcgagctggtggctctgattagcagagtgggcgtgaccagcagcgccgactctgtgaagggcagattcacaatctccagagtgaacgccaaggatacagtgtacctccagatgaactctctgaaacctgaggatacagcagtgtactattgctacatggaccagcggctggacggcagcacactggcctactggggacagggaactcaagtgacagtgtctagcggatccggcggcggaggatctggcggaggcggatctgggggcggaggctctttcgaagaagtgcagctggttgaatcaggcggaggactggttcagcctggcggatctctgagactgtcttgtgccgccagcggctacaccttcaccagctactggatgaactgggtccgacaggcccctggcaaaggactggaatgggtcggaatgatcgaccccagcgacagcgagacacactacaaccacatcttcaaggaccgcttcaccatcagcgccgacaccagcaagaataccgcctacctccagatgaactccctgagagccgaggacaccgccgtgtactactgcgccagaaacctgtatctgttcggccagggaaccctggtcacagtgtcatctacgcgtatccagaaccctgatcctgccgtgtaccagctgcgggatagcaagagcagcgacaagagcgtgtgtctgttcaccgacttcgacagccagaccaacgtgtcccagagcaaggactccgacgtgtacatcaccgataagtgcgtgctggacatgcggagcatggacttcaagagcaactccgccgtggcctggtccaacaagtccgatttcgcctgcgccaacgccttcaacaacagcattatccccgaggacacattcttcccaagccccgagagcagctgcggctttaccagcgagagctaccagcagggcgtgctgagcgccaccatcctgtacgagatcctgctgggcaaggccaccctgtacgccgtgctggtgtctgccctggtgctgatggctatggtcaagcggaaggacagccggggataa

SEQ ID NO: 36762 - DNA, 2268 bp, synthetic construct
  source 1..2268: mol_type = other DNA
atggccttaccagtgaccgccttgctcctgccgctggccttgctgctccacgccgccaggccggacatccagatgacacagagccctagcagcctgtctgccagcgtgggagacagagtgaccatcacatgcaagagcagccagagcctgctggactccgatggcaagacctacctgaactggtatcagcagaagcccggcaaggcccctaagctgctgatctacctggtgtccaagctggatagcggcgtgcccagcagattttctggcagcggcagcggaaccgacttcaccctgacaatatccagcctccagcctgaggacttcgccacctactactgctggcaaggcacccactttccattcaccttcggccagggcaccaaggtggaaatcaaaagactcgaggacctgaagaacgtgttcccacctgaggtggccgtgttcgagcctagcgaggccgagatcagccacacccagaaagccaccctcgtgtgcctggctaccggcttctaccccgaccatgtggaactgtcttggtgggtcaacggcaaagaggtgcacagcggcgtgtgtaccgacccccagccactgaaagaacagcccgccctgaacgacagccggtactgcctgagcagcagactgagagtgtccgccaccttctggcagaacccccggaaccacttcagatgccaggtgcagttctacggcctgagcgagaacgacgagtggacccaggacagagccaagcccgtgacccagatcgtgtctgccgaagcctggggcagagccgattgcgacgtgaagctggtggaaaagagcttcgagacagacaccaacctgaacttccagaacctgagcgtgatcggcttcagaatcctgctgctgaaagtggccggctttaacctgctgatgaccctgcggctgtggtccagcagggccaagcgatctggatctggagcaacaaacttctcactactcaaacaagcaggtgacgtggaggagaatcccgggcctactagtgccaccatggactggatttggcgcatccttttccttgtcggcgctgctaccggcgcccattccgggcccgaggtgcagctggttgaatctggcggaggactggttcaggctggcggatctctgagactgtcttgtgccgccagcggctctgtgttcagcggcaatgtgatgggctggtacagacaggcccctggcaaagaaagagagtgggttgccgccattgccagcggcggcagcatctactacagagactctgtgaagggcagattcaccatcagccgggacaacgccaagaacaccgtgtacctccagatgaacagcctgaagcctgaggacaccgccgtgtactactgcaactctcaccctcctacactgccctattggggcctgggaacccaagtgacagtgtcctctggatccggcggcggaggatctggcggaggcggatctgggggcggaggctctttcgaagaagtgcagctggttgaatcaggcggaggactggttcagcctggcggatctctgagactgtcttgtgccgccagcggctacaccttcaccagctactggatgaactgggtccgacaggcccctggcaaaggactggaatgggtcggaatgatcgaccccagcgacagcgagacacactacaaccacatcttcaaggaccgcttcaccatcagcgccgacaccagcaagaataccgcctacctccagatgaactccctgagagccgaggacaccgccgtgtactactgcgccagaaacctgtatctgttcggccagggaaccctggtcacagtgtcatctacgcgtatccagaaccctgatcctgccgtgtaccagctgcgggatagcaagagcagcgacaagagcgtgtgtctgttcaccgacttcgacagccagaccaacgtgtcccagagcaaggactccgacgtgtacatcaccgataagtgcgtgctggacatgcggagcatggacttcaagagcaactccgccgtggcctggtccaacaagtccgatttcgcctgcgccaacgccttcaacaacagcattatccccgaggacacattcttcccaagccccgagagcagctgcggctttaccagcgagagctaccagcagggcgtgctgagcgccaccatcctgtacgagatcctgctgggcaaggccaccctgtacgccgtgctggtgtctgccctggtgctgatggctatggtcaagcggaaggacagccggggataa

SEQ ID NO: 36763 - DNA, 2262 bp, synthetic construct
  source 1..2262: mol_type = other DNA
atggccttaccagtgaccgccttgctcctgccgctggccttgctgctccacgccgccaggccggacatccagatgacacagagccctagcagcctgtctgccagcgtgggagacagagtgaccatcacatgcaagagcagccagagcctgctggactccgatggcaagacctacctgaactggtatcagcagaagcccggcaaggcccctaagctgctgatctacctggtgtccaagctggatagcggcgtgcccagcagattttctggcagcggcagcggaaccgacttcaccctgacaatatccagcctccagcctgaggacttcgccacctactactgctggcaaggcacccactttccattcaccttcggccagggcaccaaggtggaaatcaaaagactcgaggacctgaagaacgtgttcccacctgaggtggccgtgttcgagcctagcgaggccgagatcagccacacccagaaagccaccctcgtgtgcctggctaccggcttctaccccgaccatgtggaactgtcttggtgggtcaacggcaaagaggtgcacagcggcgtgtgtaccgacccccagccactgaaagaacagcccgccctgaacgacagccggtactgcctgagcagcagactgagagtgtccgccaccttctggcagaacccccggaaccacttcagatgccaggtgcagttctacggcctgagcgagaacgacgagtggacccaggacagagccaagcccgtgacccagatcgtgtctgccgaagcctggggcagagccgattgcgacgtgaagctggtggaaaagagcttcgagacagacaccaacctgaacttccagaacctgagcgtgatcggcttcagaatcctgctgctgaaagtggccggctttaacctgctgatgaccctgcggctgtggtccagcagggccaagcgatctggatctggagcaacaaacttctcactactcaaacaagcaggtgacgtggaggagaatcccgggcctactagtgccaccatggactggatttggcgcatccttttccttgtcggcgctgctaccggcgcccattccgggcccgaagttcagctgctggaatctggcggaggactcgttcaacctggcggctctctgagactgagctgtgccgcttctggcttcagcttctctagctacgccctgagctgggttcgacaagctcccggaaagggccttgaatgggtgtccagcatcggcgagaatgacggcaccacagactatgccgatgccgtgaaaggccggtttaccatcagcagagacaattccaagaacacgctctatctgcaaatgaactccctgcgcgtggaagatacagccgtgtattattgcgtgaaggacggcatccactggggacagggaaccctggttacagtgtctagcggatccggcggcggaggatctggcggaggcggatctgggggcggaggctctttcgaagaagtgcagctggttgaatcaggcggaggactggttcagcctggcggatctctgagactgtcttgtgccgccagcggctacaccttcaccagctactggatgaactgggtccgacaggcccctggcaaaggactggaatgggtcggaatgatcgaccccagcgacagcgagacacactacaaccacatcttcaaggaccgcttcaccatcagcgccgacaccagcaagaataccgcctacctccagatgaactccctgagagccgaggacaccgccgtgtactactgcgccagaaacctgtatctgttcggccagggaaccctggtcacagtgtcatctacgcgtatccagaaccctgatcctgccgtgtaccagctgcgggatagcaagagcagcgacaagagcgtgtgtctgttcaccgacttcgacagccagaccaacgtgtcccagagcaaggactccgacgtgtacatcaccgataagtgcgtgctggacatgcggagcatggacttcaagagcaactccgccgtggcctggtccaacaagtccgatttcgcctgcgccaacgccttcaacaacagcattatccccgaggacacattcttcccaagccccgagagcagctgcggctttaccagcgagagctaccagcagggcgtgctgagcgccaccatcctgtacgagatcctgctgggcaaggccaccctgtacgccgtgctggtgtctgccctggtgctgatggctatggtcaagcggaaggacagccggggataa

SEQ ID NO: 36764 - DNA, 3369 bp, synthetic construct
  source 1..3369: mol_type = other DNA
atgggacccagactgctgttttgggctctgctgtgtctgctcggcacaggacctgttgaagctggcgtgacacagagccccacacacctgattaagaccagaggccagcaggccacactgagatgcagccctatcagcggccacaccagcgtgtactggtatcagcaggctctcggactgggcctccagttcctgctttggtacgacgagggcgaagagagaaaccggggcaacttccctcctcggttttccggcagacagttccccaactacagcagcgagctgaacgtgaacgccctggaactggaagatagcgccctgtacctgtgtgcctcttctcttggtggacctcgcggactggctggactgagaggggatgagcagtttttcggccctggcaccagactgaccgtgctggaaggtaccggcggaggcggatctggcggcggagaattcgacatccagatgacacagagccctagcagcctgtctgccagcgtgggagacagagtgaccatcacatgcaagagcagccagagcctgctggactccgatggcaagacctacctgaactggtatcagcagaagcccggcaaggcccctaagctgctgatctacctggtgtccaagctggatagcggcgtgcccagcagattttctggcagcggcagcggaaccgacttcaccctgacaatatccagcctccagcctgaggacttcgccacctactactgctggcaaggcacccactttccattcaccttcggccagggcaccaaggtggaaatcaaaagactcgaggacctgaagaacgtgttcccacctgaggtggccgtgttcgagcctagcgaggccgagatcagccacacccagaaagccaccctcgtgtgcctggctaccggcttctaccccgaccatgtggaactgtcttggtgggtcaacggcaaagaggtgcacagcggcgtgtgtaccgacccccagccactgaaagaacagcccgccctgaacgacagccggtactgcctgagcagcagactgagagtgtccgccaccttctggcagaacccccggaaccacttcagatgccaggtgcagttctacggcctgagcgagaacgacgagtggacccaggacagagccaagcccgtgacccagatcgtgtctgccgaagcctggggcagagccgattgcgacgtgaagctggtggaaaagagcttcgagacagacaccaacctgaacttccagaacctgagcgtgatcggcttcagaatcctgctgctgaaagtggccggctttaacctgctgatgaccctgcggctgtggtccagcagggccaagcgatctggatctggagcaacaaacttctcactactcaaacaagcaggtgacgtggaggagaatcccgggcctactagtgccaccatggactggatttggcgcatccttttccttgtcggcgctgctaccggcgcccattccgggcccgaagtgcagctggttgaatctggcggaggactggttcaggctggcggatctctgagactgtcttgtgccgccagcggcagaacctttagcatgggctggtttagacaggcccctggcaaagagagagagttcgtcgccgccatcacatactctggcggcagcccttactacgccgactctgtgaagggcagattcaccatcagccgggacaacgccaagaacaccgtgtacctccagatgaacagcctgaagcctgaggacaccgccgtgtactactgcgccgccaatccaacatacggcagcgactggaacgccgagaattggggccagggaacccaagtgacagtgtctagcggatccggcggcggaggatctggcggaggcggatctgggggcggaggctctttcgaagaagtgcagctggttgaatcaggcggaggactggttcagcctggcggatctctgagactgtcttgtgccgccagcggctacaccttcaccagctactggatgaactgggtccgacaggcccctggcaaaggactggaatgggtcggaatgatcgaccccagcgacagcgagacacactacaaccacatcttcaaggaccgcttcaccatcagcgccgacaccagcaagaataccgcctacctccagatgaactccctgagagccgaggacaccgccgtgtactactgcgccagaaacctgtatctgttcggccagggaaccctggtcacagtgtcatctacgcgtatccagaaccctgatcctgccgtgtaccagctgcgggatagcaagagcagcgacaagagcgtgtgtctgttcaccgacttcgacagccagaccaacgtgtcccagagcaaggactccgacgtgtacatcaccgataagtgcgtgctggacatgcggagcatggacttcaagagcaactccgccgtggcctggtccaacaagtccgatttcgcctgcgccaacgccttcaacaacagcattatccccgaggacacattcttcccaagccccgagagcagctgcggctttaccagcgagagctaccagcagggcgtgctgagcgccaccatcctgtacgagatcctgctgggcaaggccaccctgtacgccgtgctggtgtctgccctggtgctgatggctatggtcaagcggaaggacagccggggacgcgccaagagaagcggatctggcgtgaagcagaccctgaatttcgacctgctgaagctggctggcgacgtggaatccaacccaggcccttctagaggccatatgaccgagtacaagcccacggtgcgcctcgccacccgcgacgacgtccccagggccgtacgcaccctcgccgccgcgttcgccgactaccccgccacgcgccacaccgtcgatccggaccgccacatcgagcgggtcaccgagctgcaagaactcttcctcacgcgcgtcgggctcgacatcggcaaggtgtgggtcgcggacgacggcgccgcggtggcggtctggaccacgccggagagcgtcgaagcgggggcggtgttcgccgagatcggcccgcgcatggccgagttgagcggttcccggctggccgcgcagcaacagatggaaggcctcctggcgccgcaccggcccaaggagcccgcgtggttcctggccaccgtcggcgtctcgcccgaccaccagggcaagggtctgggcagcgccgtcgtgctccccggagtggaggcggccgagcgcgccggggtgcccgccttcctggagacctccgcgccccgcaacctccccttctacgagcggctcggcttcaccgtcaccgccgacgtcgaggtgcccgaaggaccgcgcacctggtgcatgacccgcaagcccggtgcctga

SEQ ID NO: 36765 - DNA, 3366 bp, synthetic construct
  source 1..3366: mol_type = other DNA
atgggacccagactgctgttttgggctctgctgtgtctgctcggcacaggacctgttgaagctggcgtgacacagagccccacacacctgattaagaccagaggccagcaggccacactgagatgcagccctatcagcggccacaccagcgtgtactggtatcagcaggctctcggactgggcctccagttcctgctttggtacgacgagggcgaagagagaaaccggggcaacttccctcctcggttttccggcagacagttccccaactacagcagcgagctgaacgtgaacgccctggaactggaagatagcgccctgtacctgtgtgccagctctctcggcggagatgaactgggagccgatggcaacgagcagttctttggccctggcaccagactgaccgtgctggaaggtaccggcggaggcggatctggcggcggaagcgaattcgacatccagatgacacagagccctagcagcctgtctgccagcgtgggagacagagtgaccatcacatgcaagagcagccagagcctgctggactccgatggcaagacctacctgaactggtatcagcagaagcccggcaaggcccctaagctgctgatctacctggtgtccaagctggatagcggcgtgcccagcagattttctggcagcggcagcggaaccgacttcaccctgacaatatccagcctccagcctgaggacttcgccacctactactgctggcaaggcacccactttccattcaccttcggccagggcaccaaggtggaaatcaaaagactcgaggacctgaagaacgtgttcccacctgaggtggccgtgttcgagcctagcgaggccgagatcagccacacccagaaagccaccctcgtgtgcctggctaccggcttctaccccgaccatgtggaactgtcttggtgggtcaacggcaaagaggtgcacagcggcgtgtgtaccgacccccagccactgaaagaacagcccgccctgaacgacagccggtactgcctgagcagcagactgagagtgtccgccaccttctggcagaacccccggaaccacttcagatgccaggtgcagttctacggcctgagcgagaacgacgagtggacccaggacagagccaagcccgtgacccagatcgtgtctgccgaagcctggggcagagccgattgcgacgtgaagctggtggaaaagagcttcgagacagacaccaacctgaacttccagaacctgagcgtgatcggcttcagaatcctgctgctgaaagtggccggctttaacctgctgatgaccctgcggctgtggtccagcagggccaagcgatctggatctggagcaacaaacttctcactactcaaacaagcaggtgacgtggaggagaatcccgggcctactagtgccaccatggactggatttggcgcatccttttccttgtcggcgctgctaccggcgcccattccgggcccgaagtgcagctggttgaatctggcggaggactggttcaggctggcggatctctgagactgtcttgtgccgccagcggcagaacctttagcatgggctggtttagacaggcccctggcaaagagagagagttcgtcgccgccatcacatactctggcggcagcccttactacgccgactctgtgaagggcagattcaccatcagccgggacaacgccaagaacaccgtgtacctccagatgaacagcctgaagcctgaggacaccgccgtgtactactgcgccgccaatccaacatacggcagcgactggaacgccgagaattggggccagggaacccaagtgacagtgtctagcggatccggcggcggaggatctggcggaggcggatctgggggcggaggctctttcgaagaagtgcagctggttgaatcaggcggaggactggttcagcctggcggatctctgagactgtcttgtgccgccagcggctacaccttcaccagctactggatgaactgggtccgacaggcccctggcaaaggactggaatgggtcggaatgatcgaccccagcgacagcgagacacactacaaccacatcttcaaggaccgcttcaccatcagcgccgacaccagcaagaataccgcctacctccagatgaactccctgagagccgaggacaccgccgtgtactactgcgccagaaacctgtatctgttcggccagggaaccctggtcacagtgtcatctacgcgtatccagaaccctgatcctgccgtgtaccagctgcgggatagcaagagcagcgacaagagcgtgtgtctgttcaccgacttcgacagccagaccaacgtgtcccagagcaaggactccgacgtgtacatcaccgataagtgcgtgctggacatgcggagcatggacttcaagagcaactccgccgtggcctggtccaacaagtccgatttcgcctgcgccaacgccttcaacaacagcattatccccgaggacacattcttcccaagccccgagagcagctgcggctttaccagcgagagctaccagcagggcgtgctgagcgccaccatcctgtacgagatcctgctgggcaaggccaccctgtacgccgtgctggtgtctgccctggtgctgatggctatggtcaagcggaaggacagccggggacgcgccaagagaagcggatctggcgtgaagcagaccctgaatttcgacctgctgaagctggctggcgacgtggaatccaacccaggcccttctagaggccatatgaccgagtacaagcccacggtgcgcctcgccacccgcgacgacgtccccagggccgtacgcaccctcgccgccgcgttcgccgactaccccgccacgcgccacaccgtcgatccggaccgccacatcgagcgggtcaccgagctgcaagaactcttcctcacgcgcgtcgggctcgacatcggcaaggtgtgggtcgcggacgacggcgccgcggtggcggtctggaccacgccggagagcgtcgaagcgggggcggtgttcgccgagatcggcccgcgcatggccgagttgagcggttcccggctggccgcgcagcaacagatggaaggcctcctggcgccgcaccggcccaaggagcccgcgtggttcctggccaccgtcggcgtctcgcccgaccaccagggcaagggtctgggcagcgccgtcgtgctccccggagtggaggcggccgagcgcgccggggtgcccgccttcctggagacctccgcgccccgcaacctccccttctacgagcggctcggcttcaccgtcaccgccgacgtcgaggtgcccgaaggaccgcgcacctggtgcatgacccgcaagcccggtgcctga

SEQ ID NO: 36766 - DNA, 2841 bp, synthetic construct
  source 1..2841: mol_type = other DNA
atggccttaccagtgaccgccttgctcctgccgctggccttgctgctccacgccgccaggccggacatccagatgacacagagccctagcagcctgtctgccagcgtgggagacagagtgaccatcacatgcaagagcagccagagcctgctggactccgatggcaagacctacctgaactggtatcagcagaagcccggcaaggcccctaagctgctgatctacctggtgtccaagctggatagcggcgtgcccagcagattttctggcagcggcagcggaaccgacttcaccctgacaatatccagcctccagcctgaggacttcgccacctactactgctggcaaggcacccactttccattcaccttcggccagggcaccaaggtggaaatcaaaagactcgaggacctgaagaacgtgttcccacctgaggtggccgtgttcgagcctagcgaggccgagatcagccacacccagaaagccaccctcgtgtgcctggctaccggcttctaccccgaccatgtggaactgtcttggtgggtcaacggcaaagaggtgcacagcggcgtgtgtaccgacccccagccactgaaagaacagcccgccctgaacgacagccggtactgcctgagcagcagactgagagtgtccgccaccttctggcagaacccccggaaccacttcagatgccaggtgcagttctacggcctgagcgagaacgacgagtggacccaggacagagccaagcccgtgacccagatcgtgtctgccgaagcctggggcagagccgattgcgacgtgaagctggtggaaaagagcttcgagacagacaccaacctgaacttccagaacctgagcgtgatcggcttcagaatcctgctgctgaaagtggccggctttaacctgctgatgaccctgcggctgtggtccagcagggccaagcgatctggatctggagcaacaaacttctcactactcaaacaagcaggtgacgtggaggagaatcccgggcctactagtgccaccatggactggatttggcgcatccttttccttgtcggcgctgctaccggcgcccattccgggcccatgggaagctggcttgagttctaccacagactcaacgccattgacagcaggctgtgggcacttggcggaagcgaagctgaactcgccgcttttgaaaaagaaattgccgctttcgagtccgagcttcaggcttacaaaggcaaagggaatcctgaggtcgagagcctgagagatcacgctgcccacattagagagtggttgcaggcataccggcacaatggatccggcggcggaggatctggcggaggcggatctgggggcggaggctctttcgaagaagtgcagctggttgaatcaggcggaggactggttcagcctggcggatctctgagactgtcttgtgccgccagcggctacaccttcaccagctactggatgaactgggtccgacaggcccctggcaaaggactggaatgggtcggaatgatcgaccccagcgacagcgagacacactacaaccacatcttcaaggaccgcttcaccatcagcgccgacaccagcaagaataccgcctacctccagatgaactccctgagagccgaggacaccgccgtgtactactgcgccagaaacctgtatctgttcggccagggaaccctggtcacagtgtcatctacgcgtatccagaaccctgatcctgccgtgtaccagctgcgggatagcaagagcagcgacaagagcgtgtgtctgttcaccgacttcgacagccagaccaacgtgtcccagagcaaggactccgacgtgtacatcaccgataagtgcgtgctggacatgcggagcatggacttcaagagcaactccgccgtggcctggtccaacaagtccgatttcgcctgcgccaacgccttcaacaacagcattatccccgaggacacattcttcccaagccccgagagcagctgcggctttaccagcgagagctaccagcagggcgtgctgagcgccaccatcctgtacgagatcctgctgggcaaggccaccctgtacgccgtgctggtgtctgccctggtgctgatggctatggtcaagcggaaggacagccggggacgcgccaagagaagcggatctggcgtgaagcagaccctgaatttcgacctgctgaagctggctggcgacgtggaatccaacccaggcccttctagaggccatatgaccgagtacaagcccacggtgcgcctcgccacccgcgacgacgtccccagggccgtacgcaccctcgccgccgcgttcgccgactaccccgccacgcgccacaccgtcgatccggaccgccacatcgagcgggtcaccgagctgcaagaactcttcctcacgcgcgtcgggctcgacatcggcaaggtgtgggtcgcggacgacggcgccgcggtggcggtctggaccacgccggagagcgtcgaagcgggggcggtgttcgccgagatcggcccgcgcatggccgagttgagcggttcccggctggccgcgcagcaacagatggaaggcctcctggcgccgcaccggcccaaggagcccgcgtggttcctggccaccgtcggcgtctcgcccgaccaccagggcaagggtctgggcagcgccgtcgtgctccccggagtggaggcggccgagcgcgccggggtgcccgccttcctggagacctccgcgccccgcaacctccccttctacgagcggctcggcttcaccgtcaccgccgacgtcgaggtgcccgaaggaccgcgcacctggtgcatgacccgcaagcccggtgcctga

SEQ ID NO: 36767 - DNA, 2841 bp, synthetic construct
  source 1..2841: mol_type = other DNA
atggccttaccagtgaccgccttgctcctgccgctggccttgctgctccacgccgccaggccggcatgcatgggcagttggttcgagttctacgaccggctgaatgccatcgacgccagactgtgggctctcggaggatctgaagctgagctggccgccttcgagaaagagatcgccgcctttgagagcgagctgcaagcctacaaaggcaagggcaaccccgaggtggaaaacctgagagtgcacgccgctgccatcagagaatggctccaggcttacagacacaacggtaccggcggaggcggatctggcggcggaggtagcggtggcggaggatctgaattcgacatccagatgacacagagccctagcagcctgtctgccagcgtgggagacagagtgaccatcacatgcaagagcagccagagcctgctggactccgatggcaagacctacctgaactggtatcagcagaagcccggcaaggcccctaagctgctgatctacctggtgtccaagctggatagcggcgtgcccagcagattttctggcagcggcagcggaaccgacttcaccctgacaatatccagcctccagcctgaggacttcgccacctactactgctggcaaggcacccactttccattcaccttcggccagggcaccaaggtggaaatcaaaagactcgaggacctgaagaacgtgttcccacctgaggtggccgtgttcgagcctagcgaggccgagatcagccacacccagaaagccaccctcgtgtgcctggctaccggcttctaccccgaccatgtggaactgtcttggtgggtcaacggcaaagaggtgcacagcggcgtgtgtaccgacccccagccactgaaagaacagcccgccctgaacgacagccggtactgcctgagcagcagactgagagtgtccgccaccttctggcagaacccccggaaccacttcagatgccaggtgcagttctacggcctgagcgagaacgacgagtggacccaggacagagccaagcccgtgacccagatcgtgtctgccgaagcctggggcagagccgattgcgacgtgaagctggtggaaaagagcttcgagacagacaccaacctgaacttccagaacctgagcgtgatcggcttcagaatcctgctgctgaaagtggccggctttaacctgctgatgaccctgcggctgtggtccagcagggccaagcgatctggatctggagcaacaaacttctcactactcaaacaagcaggtgacgtggaggagaatcccgggcctactagtatggactggatttggcgcatccttttccttgtcggcgctgctaccggcgcgcattccttcgaagaagtgcagctggttgaatcaggcggaggactggttcagcctggcggatctctgagactgtcttgtgccgccagcggctacaccttcaccagctactggatgaactgggtccgacaggcccctggcaaaggactggaatgggtcggaatgatcgaccccagcgacagcgagacacactacaaccacatcttcaaggaccgcttcaccatcagcgccgacaccagcaagaataccgcctacctccagatgaactccctgagagccgaggacaccgccgtgtactactgcgccagaaacctgtatctgttcggccagggaaccctggtcacagtgtcatctacgcgtatccagaaccctgatcctgccgtgtaccagctgcgggatagcaagagcagcgacaagagcgtgtgtctgttcaccgacttcgacagccagaccaacgtgtcccagagcaaggactccgacgtgtacatcaccgataagtgcgtgctggacatgcggagcatggacttcaagagcaactccgccgtggcctggtccaacaagtccgatttcgcctgcgccaacgccttcaacaacagcattatccccgaggacacattcttcccaagccccgagagcagctgcggctttaccagcgagagctaccagcagggcgtgctgagcgccaccatcctgtacgagatcctgctgggcaaggccaccctgtacgccgtgctggtgtctgccctggtgctgatggctatggtcaagcggaaggacagccggggacgcgccaagagaagcggatctggcgtgaagcagaccctgaatttcgacctgctgaagctggctggcgacgtggaatccaacccaggcccttctagaggccatatgaccgagtacaagcccacggtgcgcctcgccacccgcgacgacgtccccagggccgtacgcaccctcgccgccgcgttcgccgactaccccgccacgcgccacaccgtcgatccggaccgccacatcgagcgggtcaccgagctgcaagaactcttcctcacgcgcgtcgggctcgacatcggcaaggtgtgggtcgcggacgacggcgccgcggtggcggtctggaccacgccggagagcgtcgaagcgggggcggtgttcgccgagatcggcccgcgcatggccgagttgagcggttcccggctggccgcgcagcaacagatggaaggcctcctggcgccgcaccggcccaaggagcccgcgtggttcctggccaccgtcggcgtctcgcccgaccaccagggcaagggtctgggcagcgccgtcgtgctccccggagtggaggcggccgagcgcgccggggtgcccgccttcctggagacctccgcgccccgcaacctccccttctacgagcggctcggcttcaccgtcaccgccgacgtcgaggtgcccgaaggaccgcgcacctggtgcatgacccgcaagcccggtgcctga

SEQ ID NO: 36768 - DNA, 3192 bp, synthetic construct
  source 1..3192: mol_type = other DNA
atggccttaccagtgaccgccttgctcctgccgctggccttgctgctccacgccgccaggccggcatgcatggaccccgacctggaaatcagagccgccttcctgcggcagagaaacacagccctgagaacagaggtggccgagctggaacaagaggtgcagcggctggaaaacgaggtgtcccagtacgagacaagatacggccctctcggaggcggaaaaggtaccggcggaggcggatctggcggcggaggtagcggtggcggaggatctgaattcgacatccagatgacacagagccctagcagcctgtctgccagcgtgggagacagagtgaccatcacatgcaagagcagccagagcctgctggactccgatggcaagacctacctgaactggtatcagcagaagcccggcaaggcccctaagctgctgatctacctggtgtccaagctggatagcggcgtgcccagcagattttctggcagcggcagcggaaccgacttcaccctgacaatatccagcctccagcctgaggacttcgccacctactactgctggcaaggcacccactttccattcaccttcggccagggcaccaaggtggaaatcaaaagactcgaggacctgaagaacgtgttcccacctgaggtggccgtgttcgagcctagcgaggccgagatcagccacacccagaaagccaccctcgtgtgcctggctaccggcttctaccccgaccatgtggaactgtcttggtgggtcaacggcaaagaggtgcacagcggcgtgtgtaccgacccccagccactgaaagaacagcccgccctgaacgacagccggtactgcctgagcagcagactgagagtgtccgccaccttctggcagaacccccggaaccacttcagatgccaggtgcagttctacggcctgagcgagaacgacgagtggacccaggacagagccaagcccgtgacccagatcgtgtctgccgaagcctggggcagagccgattgcgacgtgaagctggtggaaaagagcttcgagacagacaccaacctgaacttccagaacctgagcgtgatcggcttcagaatcctgctgctgaaagtggccggctttaacctgctgatgaccctgcggctgtggtccagcagggccaagcgatctggatctggagcaacaaacttctcactactcaaacaagcaggtgacgtggaggagaatcccgggcctactagtgccaccatggactggatttggcgcatccttttccttgtcggcgctgctaccggcgcccattccgggcccgaagtgcagctggttgaatctggcggaggactggttcaggctggcggatctctgagactgtcttgtgccgccagcggcagaacctttagcatgggctggtttagacaggcccctggcaaagagagagagttcgtcgccgccatcacatactctggcggcagcccttactacgccgactctgtgaagggcagattcaccatcagccgggacaacgccaagaacaccgtgtacctccagatgaacagcctgaagcctgaggacaccgccgtgtactactgcgccgccaatccaacatacggcagcgactggaacgccgagaattggggccagggaacccaagtgacagtgtctagcggatccggcggcggaggatctggcggaggcggatctgggggcggaggctctttcgaagaagtgcagctggttgaatcaggcggaggactggttcagcctggcggatctctgagactgtcttgtgccgccagcggctacaccttcaccagctactggatgaactgggtccgacaggcccctggcaaaggactggaatgggtcggaatgatcgaccccagcgacagcgagacacactacaaccacatcttcaaggaccgcttcaccatcagcgccgacaccagcaagaataccgcctacctccagatgaactccctgagagccgaggacaccgccgtgtactactgcgccagaaacctgtatctgttcggccagggaaccctggtcacagtgtcatctacgcgtatccagaaccctgatcctgccgtgtaccagctgcgggatagcaagagcagcgacaagagcgtgtgtctgttcaccgacttcgacagccagaccaacgtgtcccagagcaaggactccgacgtgtacatcaccgataagtgcgtgctggacatgcggagcatggacttcaagagcaactccgccgtggcctggtccaacaagtccgatttcgcctgcgccaacgccttcaacaacagcattatccccgaggacacattcttcccaagccccgagagcagctgcggctttaccagcgagagctaccagcagggcgtgctgagcgccaccatcctgtacgagatcctgctgggcaaggccaccctgtacgccgtgctggtgtctgccctggtgctgatggctatggtcaagcggaaggacagccggggacgcgccaagagaagcggatctggcgtgaagcagaccctgaatttcgacctgctgaagctggctggcgacgtggaatccaacccaggcccttctagaggccatatgaccgagtacaagcccacggtgcgcctcgccacccgcgacgacgtccccagggccgtacgcaccctcgccgccgcgttcgccgactaccccgccacgcgccacaccgtcgatccggaccgccacatcgagcgggtcaccgagctgcaagaactcttcctcacgcgcgtcgggctcgacatcggcaaggtgtgggtcgcggacgacggcgccgcggtggcggtctggaccacgccggagagcgtcgaagcgggggcggtgttcgccgagatcggcccgcgcatggccgagttgagcggttcccggctggccgcgcagcaacagatggaaggcctcctggcgccgcaccggcccaaggagcccgcgtggttcctggccaccgtcggcgtctcgcccgaccaccagggcaagggtctgggcagcgccgtcgtgctccccggagtggaggcggccgagcgcgccggggtgcccgccttcctggagacctccgcgccccgcaacctccccttctacgagcggctcggcttcaccgtcaccgccgacgtcgaggtgcccgaaggaccgcgcacctggtgcatgacccgcaagcccggtgcctga

SEQ ID NO: 36769 - DNA, 2841 bp, synthetic construct
  source 1..2841: mol_type = other DNA
atggccttaccagtgaccgccttgctcctgccgctggccttgctgctccacgccgccaggccggacatccagatgacacagagccctagcagcctgtctgccagcgtgggagacagagtgaccatcacatgcaagagcagccagagcctgctggactccgatggcaagacctacctgaactggtatcagcagaagcccggcaaggcccctaagctgctgatctacctggtgtccaagctggatagcggcgtgcccagcagattttctggcagcggcagcggaaccgacttcaccctgacaatatccagcctccagcctgaggacttcgccacctactactgctggcaaggcacccactttccattcaccttcggccagggcaccaaggtggaaatcaaaagactcgaggacctgaagaacgtgttcccacctgaggtggccgtgttcgagcctagcgaggccgagatcagccacacccagaaagccaccctcgtgtgcctggctaccggcttctaccccgaccatgtggaactgtcttggtgggtcaacggcaaagaggtgcacagcggcgtgtgtaccgacccccagccactgaaagaacagcccgccctgaacgacagccggtactgcctgagcagcagactgagagtgtccgccaccttctggcagaacccccggaaccacttcagatgccaggtgcagttctacggcctgagcgagaacgacgagtggacccaggacagagccaagcccgtgacccagatcgtgtctgccgaagcctggggcagagccgattgcgacgtgaagctggtggaaaagagcttcgagacagacaccaacctgaacttccagaacctgagcgtgatcggcttcagaatcctgctgctgaaagtggccggctttaacctgctgatgaccctgcggctgtggtccagcagggccaagcgatctggatctggagcaacaaacttctcactactcaaacaagcaggtgacgtggaggagaatcccgggcctactagtgccaccatggactggatttggcgcatccttttccttgtcggcgctgctaccggcgcccattccgggcccatgggatcttggagcgagttttacgatcggctgcacgccattcaccaccggctgtatgctctcggaggaagcgaagctgagctggccgcttttgaaaaagaaattgccgctttcgagtccgagcttcaggcttacaaaggcaaagggaatcctgaggtcgaggccctgagagataccgccgccttcatcagaacccggttgcaggcataccggcacaacggatccggcggcggaggatctggcggaggcggatctgggggcggaggctctttcgaagaagtgcagctggttgaatcaggcggaggactggttcagcctggcggatctctgagactgtcttgtgccgccagcggctacaccttcaccagctactggatgaactgggtccgacaggcccctggcaaaggactggaatgggtcggaatgatcgaccccagcgacagcgagacacactacaaccacatcttcaaggaccgcttcaccatcagcgccgacaccagcaagaataccgcctacctccagatgaactccctgagagccgaggacaccgccgtgtactactgcgccagaaacctgtatctgttcggccagggaaccctggtcacagtgtcatctacgcgtatccagaaccctgatcctgccgtgtaccagctgcgggatagcaagagcagcgacaagagcgtgtgtctgttcaccgacttcgacagccagaccaacgtgtcccagagcaaggactccgacgtgtacatcaccgataagtgcgtgctggacatgcggagcatggacttcaagagcaactccgccgtggcctggtccaacaagtccgatttcgcctgcgccaacgccttcaacaacagcattatccccgaggacacattcttcccaagccccgagagcagctgcggctttaccagcgagagctaccagcagggcgtgctgagcgccaccatcctgtacgagatcctgctgggcaaggccaccctgtacgccgtgctggtgtctgccctggtgctgatggctatggtcaagcggaaggacagccggggacgcgccaagagaagcggatctggcgtgaagcagaccctgaatttcgacctgctgaagctggctggcgacgtggaatccaacccaggcccttctagaggccatatgaccgagtacaagcccacggtgcgcctcgccacccgcgacgacgtccccagggccgtacgcaccctcgccgccgcgttcgccgactaccccgccacgcgccacaccgtcgatccggaccgccacatcgagcgggtcaccgagctgcaagaactcttcctcacgcgcgtcgggctcgacatcggcaaggtgtgggtcgcggacgacggcgccgcggtggcggtctggaccacgccggagagcgtcgaagcgggggcggtgttcgccgagatcggcccgcgcatggccgagttgagcggttcccggctggccgcgcagcaacagatggaaggcctcctggcgccgcaccggcccaaggagcccgcgtggttcctggccaccgtcggcgtctcgcccgaccaccagggcaagggtctgggcagcgccgtcgtgctccccggagtggaggcggccgagcgcgccggggtgcccgccttcctggagacctccgcgccccgcaacctccccttctacgagcggctcggcttcaccgtcaccgccgacgtcgaggtgcccgaaggaccgcgcacctggtgcatgacccgcaagcccggtgcctga

SEQ ID NO: 36770 - DNA, 3471 bp, synthetic construct
  source 1..3471: mol_type = other DNA
atggccttaccagtgaccgccttgctcctgccgctggccttgctgctccacgccgccaggccggacatccagatgacacagagccctagcagcctgtctgccagcgtgggagacagagtgaccatcacatgcaagagcagccagagcctgctggactccgatggcaagacctacctgaactggtatcagcagaagcccggcaaggcccctaagctgctgatctacctggtgtccaagctggatagcggcgtgcccagcagattttctggcagcggcagcggaaccgacttcaccctgacaatatccagcctccagcctgaggacttcgccacctactactgctggcaaggcacccactttccattcaccttcggccagggcaccaaggtggaaatcaaaagactcgaggacctgaagaacgtgttcccacctgaggtggccgtgttcgagcctagcgaggccgagatcagccacacccagaaagccaccctcgtgtgcctggctaccggcttctaccccgaccatgtggaactgtcttggtgggtcaacggcaaagaggtgcacagcggcgtgtgtaccgacccccagccactgaaagaacagcccgccctgaacgacagccggtactgcctgagcagcagactgagagtgtccgccaccttctggcagaacccccggaaccacttcagatgccaggtgcagttctacggcctgagcgagaacgacgagtggacccaggacagagccaagcccgtgacccagatcgtgtctgccgaagcctggggcagagccgattgcgacgtgaagctggtggaaaagagcttcgagacagacaccaacctgaacttccagaacctgagcgtgatcggcttcagaatcctgctgctgaaagtggccggctttaacctgctgatgaccctgcggctgtggtccagcagggccaagcgatctggatctggagcaacaaacttctcactactcaaacaagcaggtgacgtggaggagaatcccgggcctactagtaccatggactggatttggcgcatccttttccttgtcggcgctgctaccggcgcccattccctgttcaatcaagaggtgcagatccctctgaccgagagctactgtggcccctgtcctaagaactggatctgctacaagaacaactgctaccagttcttcgacgagagcaagaattggtacgagagccaggccagctgcatgagccagaatgccagcctgctgaaggtgtacagcaaagaggaccaggacctgctgaaactggtcaagagcgcccactggatgggccttgtgcacatccccaccaatggctcttggcagtgggaggacggcagcattctgagccctaacctgctgaccatcatcgagatgcagaagggcgactgcgccctgtacgccagcagctttaagggctacatcgagaattgcagcaccccgaacacctacatctgtatgcagagaaccgtttctggcggaggcggctctggaggaggcggaagtggcggcggaggcgacctctttaatcaagaagtccagattccactcaccgaatcctactgcggaccttgtccaaaaaattggatttgttataagaacaactgttatcaattctttgatgagtctaaaaattggtatgagtcccaggcttcctgcatgtctcagaacgcttctctgctgaaagtctactctaaagaagatcaggatctcctgaagctcgtcaagtctgcccattggatggggctcgtccacattcctaccaacggaagctggcaatgggaagatggctccatcctgtctccaaatctgctcacgattattgaaatgcagaaaggggattgtgctctctacgccagctccttcaagggatatattgagaactgtagcacgcccaatacttatatctgtatgcaacggaccgtgggatccggcggcggaggatctggcggaggcggatctgggggcggaggctctttcgaagaagtgcagctggttgaatcaggcggaggactggttcagcctggcggatctctgagactgtcttgtgccgccagcggctacaccttcaccagctactggatgaactgggtccgacaggcccctggcaaaggactggaatgggtcggaatgatcgaccccagcgacagcgagacacactacaaccacatcttcaaggaccgcttcaccatcagcgccgacaccagcaagaataccgcctacctccagatgaactccctgagagccgaggacaccgccgtgtactactgcgccagaaacctgtatctgttcggccagggaaccctggtcacagtgtcatctacgcgtatccagaaccctgatcctgccgtgtaccagctgcgggatagcaagagcagcgacaagagcgtgtgtctgttcaccgacttcgacagccagaccaacgtgtcccagagcaaggactccgacgtgtacatcaccgataagtgcgtgctggacatgcggagcatggacttcaagagcaactccgccgtggcctggtccaacaagtccgatttcgcctgcgccaacgccttcaacaacagcattatccccgaggacacattcttcccaagccccgagagcagctgcggctttaccagcgagagctaccagcagggcgtgctgagcgccaccatcctgtacgagatcctgctgggcaaggccaccctgtacgccgtgctggtgtctgccctggtgctgatggctatggtcaagcggaaggacagccggggacgcgccaagagaagcggatctggcgtgaagcagaccctgaatttcgacctgctgaagctggctggcgacgtggaatccaacccaggcccttctagaggccatatgaccgagtacaagcccacggtgcgcctcgccacccgcgacgacgtccccagggccgtacgcaccctcgccgccgcgttcgccgactaccccgccacgcgccacaccgtcgatccggaccgccacatcgagcgggtcaccgagctgcaagaactcttcctcacgcgcgtcgggctcgacatcggcaaggtgtgggtcgcggacgacggcgccgcggtggcggtctggaccacgccggagagcgtcgaagcgggggcggtgttcgccgagatcggcccgcgcatggccgagttgagcggttcccggctggccgcgcagcaacagatggaaggcctcctggcgccgcaccggcccaaggagcccgcgtggttcctggccaccgtcggcgtctcgcccgaccaccagggcaagggtctgggcagcgccgtcgtgctccccggagtggaggcggccgagcgcgccggggtgcccgccttcctggagacctccgcgccccgcaacctccccttctacgagcggctcggcttcaccgtcaccgccgacgtcgaggtgcccgaaggaccgcgcacctggtgcatgacccgcaagcccggtgcctga

SEQ ID NO: 36771 - DNA, 1857 bp, synthetic construct
  source 1..1857: mol_type = other DNA
atggccttaccagtgaccgccttgctcctgccgctggccttgctgctccacgccgccaggccggacatccagatgacacagagccctagcagcctgtctgccagcgtgggagacagagtgaccatcacatgcaagagcagccagagcctgctggactccgatggcaagacctacctgaactggtatcagcagaagcccggcaaggcccctaagctgctgatctacctggtgtccaagctggatagcggcgtgcccagcagattttctggcagcggcagcggaaccgacttcaccctgacaatatccagcctccagcctgaggacttcgccacctactactgctggcaaggcacccactttccattcaccttcggccagggcaccaaggtggaaatcaaaagactcgaggacctgaagaacgtgttcccacctgaggtggccgtgttcgagcctagcgaggccgagatcagccacacccagaaagccaccctcgtgtgcctggctaccggcttctaccccgaccatgtggaactgtcttggtgggtcaacggcaaagaggtgcacagcggcgtgtgtaccgacccccagccactgaaagaacagcccgccctgaacgacagccggtactgcctgagcagcagactgagagtgtccgccaccttctggcagaacccccggaaccacttcagatgccaggtgcagttctacggcctgagcgagaacgacgagtggacccaggacagagccaagcccgtgacccagatcgtgtctgccgaagcctggggcagagccgattgcggctttaccagcgagagctaccagcagggcgtgctgagcgccaccaacctgagcgtgatcggcttcagaatcctgctgctgaaagtggccggctttaacctgctgatgaccctgcggctgtggtccagcagggccaagcgatctggatctggagcaacaaacttctcactactcaaacaagcaggtgacgtggaggagaatcccgggcctactagtatggactggatttggcgcatccttttccttgtcggcgctgctaccggcgcgcattccttcgaagaagtgcagctggttgaatcaggcggaggactggttcagcctggcggatctctgagactgtcttgtgccgccagcggctacaccttcaccagctactggatgaactgggtccgacaggcccctggcaaaggactggaatgggtcggaatgatcgaccccagcgacagcgagacacactacaaccacatcttcaaggaccgcttcaccatcagcgccgacaccagcaagaataccgcctacctccagatgaactccctgagagccgaggacaccgccgtgtactactgcgccagaaacctgtatctgttcggccagggaaccctggtcacagtgtcatctacgcgtatccagaaccctgatcctgccgtgtaccagctgcgggatagcaagagcagcgacaagagcgtgtgtctgttcaccgacttcgacagccagaccaacgtgtcccagagcaaggactccgacgtgtacatcaccgataagtgcgtgctggacatgcggagcatggacttcaagagcaactccgccgtggcctggtccaacaagtccgatttcgcctgcgccaacgccttcaacaacagcattatccccgaggacacattcttcccaagccccgagagcagctgcgacgtgaagctggtggaaaagagcttcgagacagacaccaacctgaacttccagatcctgtacgagatcctgctgggcaaggccaccctgtacgccgtgctggtgtctgccctggtgctgatggctatggtcaagcggaaggacagccgggga

SEQ ID NO: 36772 - DNA, 1869 bp, synthetic construct
  source 1..1869: mol_type = other DNA
atggccttaccagtgaccgccttgctcctgccgctggccttgctgctccacgccgccaggccggacatccagatgacacagagccctagcagcctgtctgccagcgtgggagacagagtgaccatcacatgcaagagcagccagagcctgctggactccgatggcaagacctacctgaactggtatcagcagaagcccggcaaggcccctaagctgctgatctacctggtgtccaagctggatagcggcgtgcccagcagattttctggcagcggcagcggaaccgacttcaccctgacaatatccagcctccagcctgaggacttcgccacctactactgctggcaaggcacccactttccattcaccttcggccagggcaccaaggtggaaatcaaaagactcgagatccagaaccctgatcctgccgtgtaccagctgcgggatagcaagagcagcgacaagagcgtgtgtctgttcaccgacttcgacagccagaccaacgtgtcccagagcaaggactccgacgtgtacatcaccgataagtgcgtgctggacatgcggagcatggacttcaagagcaactccgccgtggcctggtccaacaagtccgatttcgcctgcgccaacgccttcaacaacagcattatccccgaggacacattcttcccaagccccgagagcagctgcgacgtgaagctggtggaaaagagcttcgagacagacaccaacctgaacttccagatcctgtacgagatcctgctgggcaaggccaccctgtacgccgtgctggtgtctgccctggtgctgatggctatggtcaagcggaaggacagccggggacgcgccaagagaagcggatctggcgtgaagcagaccctgaatttcgacctgctgaagctggctggcgacgtggaatccaacccaggccctactagtatggactggatttggcgcatccttttccttgtcggcgctgctaccggcgcgcattccttcgaagaagtgcagctggttgaatcaggcggaggactggttcagcctggcggatctctgagactgtcttgtgccgccagcggctacaccttcaccagctactggatgaactgggtccgacaggcccctggcaaaggactggaatgggtcggaatgatcgaccccagcgacagcgagacacactacaaccacatcttcaaggaccgcttcaccatcagcgccgacaccagcaagaataccgcctacctccagatgaactccctgagagccgaggacaccgccgtgtactactgcgccagaaacctgtatctgttcggccagggaaccctggtcacagtgtcatctacgcgtgaggacctgaagaacgtgttcccacctgaggtggccgtgttcgagcctagcgaggccgagatcagccacacccagaaagccaccctcgtgtgcctggctaccggcttctaccccgaccatgtggaactgtcttggtgggtcaacggcaaagaggtgcacagcggcgtgtgtaccgacccccagccactgaaagaacagcccgccctgaacgacagccggtactgcctgagcagcagactgagagtgtccgccaccttctggcagaacccccggaaccacttcagatgccaggtgcagttctacggcctgagcgagaacgacgagtggacccaggacagagccaagcccgtgacccagatcgtgtctgccgaagcctggggcagagccgattgcggctttaccagcgagagctaccagcagggcgtgctgagcgccaccaacctgagcgtgatcggcttcagaatcctgctgctgaaagtggccggctttaacctgctgatgaccctgcggctgtggtccagc

SEQ ID NO: 36773 - DNA, 2262 bp, synthetic construct
  source 1..2262: mol_type = other DNA
atggccttaccagtgaccgccttgctcctgccgctggccttgctgctccacgccgccaggccggaagtgcagctggttgaatctggcggaggactggttcagcctggcggatctctgagactgtcttgtgccgccagcggcttcagcttcagcgacttttggatgagctgggtccgacaggcccctggcaaaggacttgaatgggtcgccacaatcagccaggccggcagcgagaaggactacgtggactctgtgaagggcagattcaccatcagccgggacaacgccaagaagtccctgtacctccagatgaacagcctgagagccgaggacaccgccgtgtactattgtgcctctggcgtgtacagcttcgactacagaggccagggcaccctggtcacagtctcttctggtaccggcggaggcggatctggcggcggaggtagcggtggcggaggatctgaattcgacatccagatgacacagagccctagcagcctgtctgccagcgtgggagacagagtgaccatcacatgcaagagcagccagagcctgctggactccgatggcaagacctacctgaactggtatcagcagaagcccggcaaggcccctaagctgctgatctacctggtgtccaagctggatagcggcgtgcccagcagattttctggcagcggcagcggaaccgacttcaccctgacaatatccagcctccagcctgaggacttcgccacctactactgctggcaaggcacccactttccattcaccttcggccagggcaccaaggtggaaatcaaaagactcgaggacctgaagaacgtgttcccacctgaggtggccgtgttcgagcctagcgaggccgagatcagccacacccagaaagccaccctcgtgtgcctggctaccggcttctaccccgaccatgtggaactgtcttggtgggtcaacggcaaagaggtgcacagcggcgtgtgtaccgacccccagccactgaaagaacagcccgccctgaacgacagccggtactgcctgagcagcagactgagagtgtccgccaccttctggcagaacccccggaaccacttcagatgccaggtgcagttctacggcctgagcgagaacgacgagtggacccaggacagagccaagcccgtgacccagatcgtgtctgccgaagcctggggcagagccgattgcggctttaccagcgagagctaccagcagggcgtgctgagcgccaccaacctgagcgtgatcggcttcagaatcctgctgctgaaagtggccggctttaacctgctgatgaccctgcggctgtggtccagcagggccaagcgatctggatctggagcaacaaacttctcactactcaaacaagcaggtgacgtggaggagaatcccgggcctactagtatggactggatttggcgcatccttttccttgtcggcgctgctaccggcgcgcattccttcgaagaagtgcagctggttgaatcaggcggaggactggttcagcctggcggatctctgagactgtcttgtgccgccagcggctacaccttcaccagctactggatgaactgggtccgacaggcccctggcaaaggactggaatgggtcggaatgatcgaccccagcgacagcgagacacactacaaccacatcttcaaggaccgcttcaccatcagcgccgacaccagcaagaataccgcctacctccagatgaactccctgagagccgaggacaccgccgtgtactactgcgccagaaacctgtatctgttcggccagggaaccctggtcacagtgtcatctacgcgtatccagaaccctgatcctgccgtgtaccagctgcgggatagcaagagcagcgacaagagcgtgtgtctgttcaccgacttcgacagccagaccaacgtgtcccagagcaaggactccgacgtgtacatcaccgataagtgcgtgctggacatgcggagcatggacttcaagagcaactccgccgtggcctggtccaacaagtccgatttcgcctgcgccaacgccttcaacaacagcattatccccgaggacacattcttcccaagccccgagagcagctgcgacgtgaagctggtggaaaagagcttcgagacagacaccaacctgaacttccagatcctgtacgagatcctgctgggcaaggccaccctgtacgccgtgctggtgtctgccctggtgctgatggctatggtcaagcggaaggacagccgggga

SEQ ID NO: 36774 - DNA, 2274 bp, synthetic construct
  source 1..2274: mol_type = other DNA
atggccttaccagtgaccgccttgctcctgccgctggccttgctgctccacgccgccaggccggaagtgcagctggttgaatctggcggaggactggttcagcctggcggatctctgagactgtcttgtgccgccagcggcttcagcttcagcgacttttggatgagctgggtccgacaggcccctggcaaaggacttgaatgggtcgccacaatcagccaggccggcagcgagaaggactacgtggactctgtgaagggcagattcaccatcagccgggacaacgccaagaagtccctgtacctccagatgaacagcctgagagccgaggacaccgccgtgtactattgtgcctctggcgtgtacagcttcgactacagaggccagggcaccctggtcacagtctcttctggtaccggcggaggcggatctggcggcggaggtagcggtggcggaggatctgaattcgacatccagatgacacagagccctagcagcctgtctgccagcgtgggagacagagtgaccatcacatgcaagagcagccagagcctgctggactccgatggcaagacctacctgaactggtatcagcagaagcccggcaaggcccctaagctgctgatctacctggtgtccaagctggatagcggcgtgcccagcagattttctggcagcggcagcggaaccgacttcaccctgacaatatccagcctccagcctgaggacttcgccacctactactgctggcaaggcacccactttccattcaccttcggccagggcaccaaggtggaaatcaaaagactcgagatccagaaccctgatcctgccgtgtaccagctgcgggatagcaagagcagcgacaagagcgtgtgtctgttcaccgacttcgacagccagaccaacgtgtcccagagcaaggactccgacgtgtacatcaccgataagtgcgtgctggacatgcggagcatggacttcaagagcaactccgccgtggcctggtccaacaagtccgatttcgcctgcgccaacgccttcaacaacagcattatccccgaggacacattcttcccaagccccgagagcagctgcgacgtgaagctggtggaaaagagcttcgagacagacaccaacctgaacttccagatcctgtacgagatcctgctgggcaaggccaccctgtacgccgtgctggtgtctgccctggtgctgatggctatggtcaagcggaaggacagccggggacgcgccaagagaagcggatctggcgtgaagcagaccctgaatttcgacctgctgaagctggctggcgacgtggaatccaacccaggccctactagtatggactggatttggcgcatccttttccttgtcggcgctgctaccggcgcgcattccttcgaagaagtgcagctggttgaatcaggcggaggactggttcagcctggcggatctctgagactgtcttgtgccgccagcggctacaccttcaccagctactggatgaactgggtccgacaggcccctggcaaaggactggaatgggtcggaatgatcgaccccagcgacagcgagacacactacaaccacatcttcaaggaccgcttcaccatcagcgccgacaccagcaagaataccgcctacctccagatgaactccctgagagccgaggacaccgccgtgtactactgcgccagaaacctgtatctgttcggccagggaaccctggtcacagtgtcatctacgcgtgaggacctgaagaacgtgttcccacctgaggtggccgtgttcgagcctagcgaggccgagatcagccacacccagaaagccaccctcgtgtgcctggctaccggcttctaccccgaccatgtggaactgtcttggtgggtcaacggcaaagaggtgcacagcggcgtgtgtaccgacccccagccactgaaagaacagcccgccctgaacgacagccggtactgcctgagcagcagactgagagtgtccgccaccttctggcagaacccccggaaccacttcagatgccaggtgcagttctacggcctgagcgagaacgacgagtggacccaggacagagccaagcccgtgacccagatcgtgtctgccgaagcctggggcagagccgattgcggctttaccagcgagagctaccagcagggcgtgctgagcgccaccaacctgagcgtgatcggcttcagaatcctgctgctgaaagtggccggctttaacctgctgatgaccctgcggctgtggtccagc

SEQ ID NO: 36775 - DNA, 2673 bp, synthetic construct
  source 1..2673: mol_type = other DNA
atggccttaccagtgaccgccttgctcctgccgctggccttgctgctccacgccgccaggccggaagtgcagctggttgaatctggcggaggactggttcagcctggcggatctctgagactgtcttgtgccgccagcggcttcagcttcagcgacttttggatgagctgggtccgacaggcccctggcaaaggacttgaatgggtcgccacaatcagccaggccggcagcgagaaggactacgtggactctgtgaagggcagattcaccatcagccgggacaacgccaagaagtccctgtacctccagatgaacagcctgagagccgaggacaccgccgtgtactattgtgcctctggcgtgtacagcttcgactacagaggccagggcaccctggtcacagtctcttctggtaccggcggaggcggatctggcggcggaggtagcggtggcggaggatctgaattcgacatccagatgacacagagccctagcagcctgtctgccagcgtgggagacagagtgaccatcacatgcaagagcagccagagcctgctggactccgatggcaagacctacctgaactggtatcagcagaagcccggcaaggcccctaagctgctgatctacctggtgtccaagctggatagcggcgtgcccagcagattttctggcagcggcagcggaaccgacttcaccctgacaatatccagcctccagcctgaggacttcgccacctactactgctggcaaggcacccactttccattcaccttcggccagggcaccaaggtggaaatcaaaagactcgaggacctgaagaacgtgttcccacctgaggtggccgtgttcgagcctagcgaggccgagatcagccacacccagaaagccaccctcgtgtgcctggctaccggcttctaccccgaccatgtggaactgtcttggtgggtcaacggcaaagaggtgcacagcggcgtgtgtaccgacccccagccactgaaagaacagcccgccctgaacgacagccggtactgcctgagcagcagactgagagtgtccgccaccttctggcagaacccccggaaccacttcagatgccaggtgcagttctacggcctgagcgagaacgacgagtggacccaggacagagccaagcccgtgacccagatcgtgtctgccgaagcctggggcagagccgattgcggctttaccagcgagagctaccagcagggcgtgctgagcgccaccaacctgagcgtgatcggcttcagaatcctgctgctgaaagtggccggctttaacctgctgatgaccctgcggctgtggtccagcagggccaagcgatctggatctggagcaacaaacttctcactactcaaacaagcaggtgacgtggaggagaatcccgggcctactagtatggactggatttggcgcatccttttccttgtcggcgctgctaccggcgcgcattccgggccccagctccagctgcaagagtctggacctggcctggtcaagcctagcgagacactgagcctgacctgtaccgtgtccggcgatagcatcagcagcggcgattactactggggctggatcagacagcctcctggcaaaggactggaatggatcggccacatctactacagcggcgtgacctactacaaccccagcctgaagtccagagtgaccatcagcgtggacaccagccggaaccagttctccctgaagctgtctagcgtgacagccgccgataccgccgtgtactactgcaccagagaggacagcagcaactggcggagtagaggccagggaacactggtcacagttagctctggatccggcggaggcggaagtggaggcggaggatctggcggcggaggctctttcgaagaagtgcagctggttgaatcaggcggaggactggttcagcctggcggatctctgagactgtcttgtgccgccagcggctacaccttcaccagctactggatgaactgggtccgacaggcccctggcaaaggactggaatgggtcggaatgatcgaccccagcgacagcgagacacactacaaccacatcttcaaggaccgcttcaccatcagcgccgacaccagcaagaataccgcctacctccagatgaactccctgagagccgaggacaccgccgtgtactactgcgccagaaacctgtatctgttcggccagggaaccctggtcacagtgtcatctacgcgtatccagaaccctgatcctgccgtgtaccagctgcgggatagcaagagcagcgacaagagcgtgtgtctgttcaccgacttcgacagccagaccaacgtgtcccagagcaaggactccgacgtgtacatcaccgataagtgcgtgctggacatgcggagcatggacttcaagagcaactccgccgtggcctggtccaacaagtccgatttcgcctgcgccaacgccttcaacaacagcattatccccgaggacacattcttcccaagccccgagagcagctgcgacgtgaagctggtggaaaagagcttcgagacagacaccaacctgaacttccagatcctgtacgagatcctgctgggcaaggccaccctgtacgccgtgctggtgtctgccctggtgctgatggctatggtcaagcggaaggacagccgggga

SEQ ID NO: 36776 - DNA, 2685 bp, synthetic construct
  source 1..2685: mol_type = other DNA
atggccttaccagtgaccgccttgctcctgccgctggccttgctgctccacgccgccaggccggaagtgcagctggttgaatctggcggaggactggttcagcctggcggatctctgagactgtcttgtgccgccagcggcttcagcttcagcgacttttggatgagctgggtccgacaggcccctggcaaaggacttgaatgggtcgccacaatcagccaggccggcagcgagaaggactacgtggactctgtgaagggcagattcaccatcagccgggacaacgccaagaagtccctgtacctccagatgaacagcctgagagccgaggacaccgccgtgtactattgtgcctctggcgtgtacagcttcgactacagaggccagggcaccctggtcacagtctcttctggtaccggcggaggcggatctggcggcggaggtagcggtggcggaggatctgaattcgacatccagatgacacagagccctagcagcctgtctgccagcgtgggagacagagtgaccatcacatgcaagagcagccagagcctgctggactccgatggcaagacctacctgaactggtatcagcagaagcccggcaaggcccctaagctgctgatctacctggtgtccaagctggatagcggcgtgcccagcagattttctggcagcggcagcggaaccgacttcaccctgacaatatccagcctccagcctgaggacttcgccacctactactgctggcaaggcacccactttccattcaccttcggccagggcaccaaggtggaaatcaaaagactcgagatccagaaccctgatcctgccgtgtaccagctgcgggatagcaagagcagcgacaagagcgtgtgtctgttcaccgacttcgacagccagaccaacgtgtcccagagcaaggactccgacgtgtacatcaccgataagtgcgtgctggacatgcggagcatggacttcaagagcaactccgccgtggcctggtccaacaagtccgatttcgcctgcgccaacgccttcaacaacagcattatccccgaggacacattcttcccaagccccgagagcagctgcgacgtgaagctggtggaaaagagcttcgagacagacaccaacctgaacttccagatcctgtacgagatcctgctgggcaaggccaccctgtacgccgtgctggtgtctgccctggtgctgatggctatggtcaagcggaaggacagccggggacgcgccaagagaagcggatctggcgtgaagcagaccctgaatttcgacctgctgaagctggctggcgacgtggaatccaacccaggccctactagtatggactggatttggcgcatccttttccttgtcggcgctgctaccggcgcgcattccgggccccagctccagctgcaagagtctggacctggcctggtcaagcctagcgagacactgagcctgacctgtaccgtgtccggcgatagcatcagcagcggcgattactactggggctggatcagacagcctcctggcaaaggactggaatggatcggccacatctactacagcggcgtgacctactacaaccccagcctgaagtccagagtgaccatcagcgtggacaccagccggaaccagttctccctgaagctgtctagcgtgacagccgccgataccgccgtgtactactgcaccagagaggacagcagcaactggcggagtagaggccagggaacactggtcacagttagctctggatccggcggaggcggaagtggaggcggaggatctggcggcggaggctctttcgaagaagtgcagctggttgaatcaggcggaggactggttcagcctggcggatctctgagactgtcttgtgccgccagcggctacaccttcaccagctactggatgaactgggtccgacaggcccctggcaaaggactggaatgggtcggaatgatcgaccccagcgacagcgagacacactacaaccacatcttcaaggaccgcttcaccatcagcgccgacaccagcaagaataccgcctacctccagatgaactccctgagagccgaggacaccgccgtgtactactgcgccagaaacctgtatctgttcggccagggaaccctggtcacagtgtcatctacgcgtgaggacctgaagaacgtgttcccacctgaggtggccgtgttcgagcctagcgaggccgagatcagccacacccagaaagccaccctcgtgtgcctggctaccggcttctaccccgaccatgtggaactgtcttggtgggtcaacggcaaagaggtgcacagcggcgtgtgtaccgacccccagccactgaaagaacagcccgccctgaacgacagccggtactgcctgagcagcagactgagagtgtccgccaccttctggcagaacccccggaaccacttcagatgccaggtgcagttctacggcctgagcgagaacgacgagtggacccaggacagagccaagcccgtgacccagatcgtgtctgccgaagcctggggcagagccgattgcggctttaccagcgagagctaccagcagggcgtgctgagcgccaccaacctgagcgtgatcggcttcagaatcctgctgctgaaagtggccggctttaacctgctgatgaccctgcggctgtggtccagc

SEQ ID NO: 36777 - DNA, 2169 bp, synthetic construct
  source 1..2169: mol_type = other DNA
atggccttaccagtgaccgccttgctcctgccgctggccttgctgctccacgccgccaggccggacatccagatgacacagagccctagcagcctgtctgccagcgtgggagacagagtgaccatcacatgcaagagcagccagagcctgctggactccgatggcaagacctacctgaactggtatcagcagaagcccggcaaggcccctaagctgctgatctacctggtgtccaagctggatagcggcgtgcccagcagattttctggcagcggcagcggaaccgacttcaccctgacaatatccagcctccagcctgaggacttcgccacctactactgctggcaaggcacccactttccattcaccttcggccagggcaccaaggtggaaatcaaaagactcgaggacctgaagaacgtgttcccacctgaggtggccgtgttcgagcctagcgaggccgagatcagccacacccagaaagccaccctcgtgtgcctggctaccggcttctaccccgaccatgtggaactgtcttggtgggtcaacggcaaagaggtgcacagcggcgtgtgtaccgacccccagccactgaaagaacagcccgccctgaacgacagccggtactgcctgagcagcagactgagagtgtccgccaccttctggcagaacccccggaaccacttcagatgccaggtgcagttctacggcctgagcgagaacgacgagtggacccaggacagagccaagcccgtgacccagatcgtgtctgccgaagcctggggcagagccgatgatgtgattaagatccactggcaggaaaagaagtccaacaccatcctgggcagccaggaaggcaacaccatgaagaccaacgacacctacatgaagttcagctggctgaccgtgcccgagaagtccctggacaaagaacacagatgcatcgtgcggcacgaaaacaacaagaacggcgtggaccaggaaatcatcttcccacccatcaagaccgatgtgattacaatggaccccaaggacaactgctccaaggacgccaacgataccctgctgctccagctgaccaacaccagcgcctactacatgtacttgttgctgctgctgaagtccgtggtgtacttcgccatcatcacatgctgcctgctgatggctatggtcaagcggaaggacagccggggaagggccaagcgatctggatctggagcaacaaacttctcactactcaaacaagcaggtgacgtggaggagaatcccgggcctactagtatggactggatttggcgcatccttttccttgtcggcgctgctaccggcgcgcattccttcgaagaagtgcagctggttgaatcaggcggaggactggttcagcctggcggatctctgagactgtcttgtgccgccagcggctacaccttcaccagctactggatgaactgggtccgacaggcccctggcaaaggactggaatgggtcggaatgatcgaccccagcgacagcgagacacactacaaccacatcttcaaggaccgcttcaccatcagcgccgacaccagcaagaataccgcctacctccagatgaactccctgagagccgaggacaccgccgtgtactactgcgccagaaacctgtatctgttcggccagggaaccctggtcacagtgtcatctacgcgtatccagaaccctgatcctgccgtgtaccagctgcgggatagcaagagcagcgacaagagcgtgtgtctgttcaccgacttcgacagccagaccaacgtgtcccagagcaaggactccgacgtgtacatcaccgataagtgcgtgctggacatgcggagcatggacttcaagagcaactccgccgtggcctggtccaacaagtccgatttcgcctgcgccaacgccttcaacaacagcattatccccgaggacacattcttcccaagccccgagagcagcgactccaccgaccacgtgaagcccaaagagacagagaacaccaagcagcccagcaagagctgccacaagcccaaggccatcgtgcacaccgagaaagtgaacatgatgagcctgaccgtgctgggcctgcggatgctgttcgccaaaaccgtggccgtgaacttcctgctgaccgccaagctgttcttcctcctcaccgcc

SEQ ID NO: 36778 - DNA, 2181 bp, synthetic construct
  source 1..2181: mol_type = other DNA
atggccttaccagtgaccgccttgctcctgccgctggccttgctgctccacgccgccaggccggacatccagatgacacagagccctagcagcctgtctgccagcgtgggagacagagtgaccatcacatgcaagagcagccagagcctgctggactccgatggcaagacctacctgaactggtatcagcagaagcccggcaaggcccctaagctgctgatctacctggtgtccaagctggatagcggcgtgcccagcagattttctggcagcggcagcggaaccgacttcaccctgacaatatccagcctccagcctgaggacttcgccacctactactgctggcaaggcacccactttccattcaccttcggccagggcaccaaggtggaaatcaaaagactcgagatccagaaccctgatcctgccgtgtaccagctgcgggatagcaagagcagcgacaagagcgtgtgtctgttcaccgacttcgacagccagaccaacgtgtcccagagcaaggactccgacgtgtacatcaccgataagtgcgtgctggacatgcggagcatggacttcaagagcaactccgccgtggcctggtccaacaagtccgatttcgcctgcgccaacgccttcaacaacagcattatccccgaggacacattcttcccaagccccgagagcagcgactccaccgaccacgtgaagcccaaagagacagagaacaccaagcagcccagcaagagctgccacaagcccaaggccatcgtgcacaccgagaaagtgaacatgatgagcctgaccgtgctgggcctgcggatgctgttcgccaaaaccgtggccgtgaacttcctgctgaccgccaagctgttcttcctcctcaccgcccgcgccaagagaagcggatctggcgtgaagcagaccctgaatttcgacctgctgaagctggctggcgacgtggaatccaacccaggccctactagtatggactggatttggcgcatccttttccttgtcggcgctgctaccggcgcgcattccttcgaagaagtgcagctggttgaatcaggcggaggactggttcagcctggcggatctctgagactgtcttgtgccgccagcggctacaccttcaccagctactggatgaactgggtccgacaggcccctggcaaaggactggaatgggtcggaatgatcgaccccagcgacagcgagacacactacaaccacatcttcaaggaccgcttcaccatcagcgccgacaccagcaagaataccgcctacctccagatgaactccctgagagccgaggacaccgccgtgtactactgcgccagaaacctgtatctgttcggccagggaaccctggtcacagtgtcatctacgcgtgaggacctgaagaacgtgttcccacctgaggtggccgtgttcgagcctagcgaggccgagatcagccacacccagaaagccaccctcgtgtgcctggctaccggcttctaccccgaccatgtggaactgtcttggtgggtcaacggcaaagaggtgcacagcggcgtgtgtaccgacccccagccactgaaagaacagcccgccctgaacgacagccggtactgcctgagcagcagactgagagtgtccgccaccttctggcagaacccccggaaccacttcagatgccaggtgcagttctacggcctgagcgagaacgacgagtggacccaggacagagccaagcccgtgacccagatcgtgtctgccgaagcctggggcagagccgatgatgtgattaagatccactggcaggaaaagaagtccaacaccatcctgggcagccaggaaggcaacaccatgaagaccaacgacacctacatgaagttcagctggctgaccgtgcccgagaagtccctggacaaagaacacagatgcatcgtgcggcacgaaaacaacaagaacggcgtggaccaggaaatcatcttcccacccatcaagaccgatgtgattacaatggaccccaaggacaactgctccaaggacgccaacgataccctgctgctccagctgaccaacaccagcgcctactacatgtacttgttgctgctgctgaagtccgtggtgtacttcgccatcatcacatgctgcctgctgatggctatggtcaagcggaaggacagccgggga

SEQ ID NO: 36779 - DNA, 2574 bp, synthetic construct
  source 1..2574: mol_type = other DNA
atggccttaccagtgaccgccttgctcctgccgctggccttgctgctccacgccgccaggccggaagtgcagctggttgaatctggcggaggactggttcagcctggcggatctctgagactgtcttgtgccgccagcggcttcagcttcagcgacttttggatgagctgggtccgacaggcccctggcaaaggacttgaatgggtcgccacaatcagccaggccggcagcgagaaggactacgtggactctgtgaagggcagattcaccatcagccgggacaacgccaagaagtccctgtacctccagatgaacagcctgagagccgaggacaccgccgtgtactattgtgcctctggcgtgtacagcttcgactacagaggccagggcaccctggtcacagtctcttctggtaccggcggaggcggatctggcggcggaggtagcggtggcggaggatctgaattcgacatccagatgacacagagccctagcagcctgtctgccagcgtgggagacagagtgaccatcacatgcaagagcagccagagcctgctggactccgatggcaagacctacctgaactggtatcagcagaagcccggcaaggcccctaagctgctgatctacctggtgtccaagctggatagcggcgtgcccagcagattttctggcagcggcagcggaaccgacttcaccctgacaatatccagcctccagcctgaggacttcgccacctactactgctggcaaggcacccactttccattcaccttcggccagggcaccaaggtggaaatcaaaagactcgaggacctgaagaacgtgttcccacctgaggtggccgtgttcgagcctagcgaggccgagatcagccacacccagaaagccaccctcgtgtgcctggctaccggcttctaccccgaccatgtggaactgtcttggtgggtcaacggcaaagaggtgcacagcggcgtgtgtaccgacccccagccactgaaagaacagcccgccctgaacgacagccggtactgcctgagcagcagactgagagtgtccgccaccttctggcagaacccccggaaccacttcagatgccaggtgcagttctacggcctgagcgagaacgacgagtggacccaggacagagccaagcccgtgacccagatcgtgtctgccgaagcctggggcagagccgatgatgtgattaagatccactggcaggaaaagaagtccaacaccatcctgggcagccaggaaggcaacaccatgaagaccaacgacacctacatgaagttcagctggctgaccgtgcccgagaagtccctggacaaagaacacagatgcatcgtgcggcacgaaaacaacaagaacggcgtggaccaggaaatcatcttcccacccatcaagaccgatgtgattacaatggaccccaaggacaactgctccaaggacgccaacgataccctgctgctccagctgaccaacaccagcgcctactacatgtacttgttgctgctgctgaagtccgtggtgtacttcgccatcatcacatgctgcctgctgatggctatggtcaagcggaaggacagccggggaagggccaagcgatctggatctggagcaacaaacttctcactactcaaacaagcaggtgacgtggaggagaatcccgggcctactagtatggactggatttggcgcatccttttccttgtcggcgctgctaccggcgcgcattccttcgaagaagtgcagctggttgaatcaggcggaggactggttcagcctggcggatctctgagactgtcttgtgccgccagcggctacaccttcaccagctactggatgaactgggtccgacaggcccctggcaaaggactggaatgggtcggaatgatcgaccccagcgacagcgagacacactacaaccacatcttcaaggaccgcttcaccatcagcgccgacaccagcaagaataccgcctacctccagatgaactccctgagagccgaggacaccgccgtgtactactgcgccagaaacctgtatctgttcggccagggaaccctggtcacagtgtcatctacgcgtatccagaaccctgatcctgccgtgtaccagctgcgggatagcaagagcagcgacaagagcgtgtgtctgttcaccgacttcgacagccagaccaacgtgtcccagagcaaggactccgacgtgtacatcaccgataagtgcgtgctggacatgcggagcatggacttcaagagcaactccgccgtggcctggtccaacaagtccgatttcgcctgcgccaacgccttcaacaacagcattatccccgaggacacattcttcccaagccccgagagcagcgactccaccgaccacgtgaagcccaaagagacagagaacaccaagcagcccagcaagagctgccacaagcccaaggccatcgtgcacaccgagaaagtgaacatgatgagcctgaccgtgctgggcctgcggatgctgttcgccaaaaccgtggccgtgaacttcctgctgaccgccaagctgttcttcctcctcaccgcc

SEQ ID NO: 36780 - DNA, 2586 bp, synthetic construct
  source 1..2586: mol_type = other DNA
atggccttaccagtgaccgccttgctcctgccgctggccttgctgctccacgccgccaggccggaagtgcagctggttgaatctggcggaggactggttcagcctggcggatctctgagactgtcttgtgccgccagcggcttcagcttcagcgacttttggatgagctgggtccgacaggcccctggcaaaggacttgaatgggtcgccacaatcagccaggccggcagcgagaaggactacgtggactctgtgaagggcagattcaccatcagccgggacaacgccaagaagtccctgtacctccagatgaacagcctgagagccgaggacaccgccgtgtactattgtgcctctggcgtgtacagcttcgactacagaggccagggcaccctggtcacagtctcttctggtaccggcggaggcggatctggcggcggaggtagcggtggcggaggatctgaattcgacatccagatgacacagagccctagcagcctgtctgccagcgtgggagacagagtgaccatcacatgcaagagcagccagagcctgctggactccgatggcaagacctacctgaactggtatcagcagaagcccggcaaggcccctaagctgctgatctacctggtgtccaagctggatagcggcgtgcccagcagattttctggcagcggcagcggaaccgacttcaccctgacaatatccagcctccagcctgaggacttcgccacctactactgctggcaaggcacccactttccattcaccttcggccagggcaccaaggtggaaatcaaaagactcgagatccagaaccctgatcctgccgtgtaccagctgcgggatagcaagagcagcgacaagagcgtgtgtctgttcaccgacttcgacagccagaccaacgtgtcccagagcaaggactccgacgtgtacatcaccgataagtgcgtgctggacatgcggagcatggacttcaagagcaactccgccgtggcctggtccaacaagtccgatttcgcctgcgccaacgccttcaacaacagcattatccccgaggacacattcttcccaagccccgagagcagcgactccaccgaccacgtgaagcccaaagagacagagaacaccaagcagcccagcaagagctgccacaagcccaaggccatcgtgcacaccgagaaagtgaacatgatgagcctgaccgtgctgggcctgcggatgctgttcgccaaaaccgtggccgtgaacttcctgctgaccgccaagctgttcttcctcctcaccgcccgcgccaagagaagcggatctggcgtgaagcagaccctgaatttcgacctgctgaagctggctggcgacgtggaatccaacccaggccctactagtatggactggatttggcgcatccttttccttgtcggcgctgctaccggcgcgcattccttcgaagaagtgcagctggttgaatcaggcggaggactggttcagcctggcggatctctgagactgtcttgtgccgccagcggctacaccttcaccagctactggatgaactgggtccgacaggcccctggcaaaggactggaatgggtcggaatgatcgaccccagcgacagcgagacacactacaaccacatcttcaaggaccgcttcaccatcagcgccgacaccagcaagaataccgcctacctccagatgaactccctgagagccgaggacaccgccgtgtactactgcgccagaaacctgtatctgttcggccagggaaccctggtcacagtgtcatctacgcgtgaggacctgaagaacgtgttcccacctgaggtggccgtgttcgagcctagcgaggccgagatcagccacacccagaaagccaccctcgtgtgcctggctaccggcttctaccccgaccatgtggaactgtcttggtgggtcaacggcaaagaggtgcacagcggcgtgtgtaccgacccccagccactgaaagaacagcccgccctgaacgacagccggtactgcctgagcagcagactgagagtgtccgccaccttctggcagaacccccggaaccacttcagatgccaggtgcagttctacggcctgagcgagaacgacgagtggacccaggacagagccaagcccgtgacccagatcgtgtctgccgaagcctggggcagagccgatgatgtgattaagatccactggcaggaaaagaagtccaacaccatcctgggcagccaggaaggcaacaccatgaagaccaacgacacctacatgaagttcagctggctgaccgtgcccgagaagtccctggacaaagaacacagatgcatcgtgcggcacgaaaacaacaagaacggcgtggaccaggaaatcatcttcccacccatcaagaccgatgtgattacaatggaccccaaggacaactgctccaaggacgccaacgataccctgctgctccagctgaccaacaccagcgcctactacatgtacttgttgctgctgctgaagtccgtggtgtacttcgccatcatcacatgctgcctgctgatggctatggtcaagcggaaggacagccgggga

SEQ ID NO: 36781 - DNA, 2985 bp, synthetic construct
  source 1..2985: mol_type = other DNA
atggccttaccagtgaccgccttgctcctgccgctggccttgctgctccacgccgccaggccggaagtgcagctggttgaatctggcggaggactggttcagcctggcggatctctgagactgtcttgtgccgccagcggcttcagcttcagcgacttttggatgagctgggtccgacaggcccctggcaaaggacttgaatgggtcgccacaatcagccaggccggcagcgagaaggactacgtggactctgtgaagggcagattcaccatcagccgggacaacgccaagaagtccctgtacctccagatgaacagcctgagagccgaggacaccgccgtgtactattgtgcctctggcgtgtacagcttcgactacagaggccagggcaccctggtcacagtctcttctggtaccggcggaggcggatctggcggcggaggtagcggtggcggaggatctgaattcgacatccagatgacacagagccctagcagcctgtctgccagcgtgggagacagagtgaccatcacatgcaagagcagccagagcctgctggactccgatggcaagacctacctgaactggtatcagcagaagcccggcaaggcccctaagctgctgatctacctggtgtccaagctggatagcggcgtgcccagcagattttctggcagcggcagcggaaccgacttcaccctgacaatatccagcctccagcctgaggacttcgccacctactactgctggcaaggcacccactttccattcaccttcggccagggcaccaaggtggaaatcaaaagactcgaggacctgaagaacgtgttcccacctgaggtggccgtgttcgagcctagcgaggccgagatcagccacacccagaaagccaccctcgtgtgcctggctaccggcttctaccccgaccatgtggaactgtcttggtgggtcaacggcaaagaggtgcacagcggcgtgtgtaccgacccccagccactgaaagaacagcccgccctgaacgacagccggtactgcctgagcagcagactgagagtgtccgccaccttctggcagaacccccggaaccacttcagatgccaggtgcagttctacggcctgagcgagaacgacgagtggacccaggacagagccaagcccgtgacccagatcgtgtctgccgaagcctggggcagagccgatgatgtgattaagatccactggcaggaaaagaagtccaacaccatcctgggcagccaggaaggcaacaccatgaagaccaacgacacctacatgaagttcagctggctgaccgtgcccgagaagtccctggacaaagaacacagatgcatcgtgcggcacgaaaacaacaagaacggcgtggaccaggaaatcatcttcccacccatcaagaccgatgtgattacaatggaccccaaggacaactgctccaaggacgccaacgataccctgctgctccagctgaccaacaccagcgcctactacatgtacttgttgctgctgctgaagtccgtggtgtacttcgccatcatcacatgctgcctgctgatggctatggtcaagcggaaggacagccggggaagggccaagcgatctggatctggagcaacaaacttctcactactcaaacaagcaggtgacgtggaggagaatcccgggcctactagtatggactggatttggcgcatccttttccttgtcggcgctgctaccggcgcgcattccgggccccagctccagctgcaagagtctggacctggcctggtcaagcctagcgagacactgagcctgacctgtaccgtgtccggcgatagcatcagcagcggcgattactactggggctggatcagacagcctcctggcaaaggactggaatggatcggccacatctactacagcggcgtgacctactacaaccccagcctgaagtccagagtgaccatcagcgtggacaccagccggaaccagttctccctgaagctgtctagcgtgacagccgccgataccgccgtgtactactgcaccagagaggacagcagcaactggcggagtagaggccagggaacactggtcacagttagctctggatccggcggaggcggaagtggaggcggaggatctggcggcggaggctctttcgaagaagtgcagctggttgaatcaggcggaggactggttcagcctggcggatctctgagactgtcttgtgccgccagcggctacaccttcaccagctactggatgaactgggtccgacaggcccctggcaaaggactggaatgggtcggaatgatcgaccccagcgacagcgagacacactacaaccacatcttcaaggaccgcttcaccatcagcgccgacaccagcaagaataccgcctacctccagatgaactccctgagagccgaggacaccgccgtgtactactgcgccagaaacctgtatctgttcggccagggaaccctggtcacagtgtcatctacgcgtatccagaaccctgatcctgccgtgtaccagctgcgggatagcaagagcagcgacaagagcgtgtgtctgttcaccgacttcgacagccagaccaacgtgtcccagagcaaggactccgacgtgtacatcaccgataagtgcgtgctggacatgcggagcatggacttcaagagcaactccgccgtggcctggtccaacaagtccgatttcgcctgcgccaacgccttcaacaacagcattatccccgaggacacattcttcccaagccccgagagcagcgactccaccgaccacgtgaagcccaaagagacagagaacaccaagcagcccagcaagagctgccacaagcccaaggccatcgtgcacaccgagaaagtgaacatgatgagcctgaccgtgctgggcctgcggatgctgttcgccaaaaccgtggccgtgaacttcctgctgaccgccaagctgttcttcctcctcaccgcc

SEQ ID NO: 36782 - DNA, 2997 bp, synthetic construct
  source 1..2997: mol_type = other DNA
atggccttaccagtgaccgccttgctcctgccgctggccttgctgctccacgccgccaggccggaagtgcagctggttgaatctggcggaggactggttcagcctggcggatctctgagactgtcttgtgccgccagcggcttcagcttcagcgacttttggatgagctgggtccgacaggcccctggcaaaggacttgaatgggtcgccacaatcagccaggccggcagcgagaaggactacgtggactctgtgaagggcagattcaccatcagccgggacaacgccaagaagtccctgtacctccagatgaacagcctgagagccgaggacaccgccgtgtactattgtgcctctggcgtgtacagcttcgactacagaggccagggcaccctggtcacagtctcttctggtaccggcggaggcggatctggcggcggaggtagcggtggcggaggatctgaattcgacatccagatgacacagagccctagcagcctgtctgccagcgtgggagacagagtgaccatcacatgcaagagcagccagagcctgctggactccgatggcaagacctacctgaactggtatcagcagaagcccggcaaggcccctaagctgctgatctacctggtgtccaagctggatagcggcgtgcccagcagattttctggcagcggcagcggaaccgacttcaccctgacaatatccagcctccagcctgaggacttcgccacctactactgctggcaaggcacccactttccattcaccttcggccagggcaccaaggtggaaatcaaaagactcgagatccagaaccctgatcctgccgtgtaccagctgcgggatagcaagagcagcgacaagagcgtgtgtctgttcaccgacttcgacagccagaccaacgtgtcccagagcaaggactccgacgtgtacatcaccgataagtgcgtgctggacatgcggagcatggacttcaagagcaactccgccgtggcctggtccaacaagtccgatttcgcctgcgccaacgccttcaacaacagcattatccccgaggacacattcttcccaagccccgagagcagcgactccaccgaccacgtgaagcccaaagagacagagaacaccaagcagcccagcaagagctgccacaagcccaaggccatcgtgcacaccgagaaagtgaacatgatgagcctgaccgtgctgggcctgcggatgctgttcgccaaaaccgtggccgtgaacttcctgctgaccgccaagctgttcttcctcctcaccgcccgcgccaagagaagcggatctggcgtgaagcagaccctgaatttcgacctgctgaagctggctggcgacgtggaatccaacccaggccctactagtatggactggatttggcgcatccttttccttgtcggcgctgctaccggcgcgcattccgggccccagctccagctgcaagagtctggacctggcctggtcaagcctagcgagacactgagcctgacctgtaccgtgtccggcgatagcatcagcagcggcgattactactggggctggatcagacagcctcctggcaaaggactggaatggatcggccacatctactacagcggcgtgacctactacaaccccagcctgaagtccagagtgaccatcagcgtggacaccagccggaaccagttctccctgaagctgtctagcgtgacagccgccgataccgccgtgtactactgcaccagagaggacagcagcaactggcggagtagaggccagggaacactggtcacagttagctctggatccggcggaggcggaagtggaggcggaggatctggcggcggaggctctttcgaagaagtgcagctggttgaatcaggcggaggactggttcagcctggcggatctctgagactgtcttgtgccgccagcggctacaccttcaccagctactggatgaactgggtccgacaggcccctggcaaaggactggaatgggtcggaatgatcgaccccagcgacagcgagacacactacaaccacatcttcaaggaccgcttcaccatcagcgccgacaccagcaagaataccgcctacctccagatgaactccctgagagccgaggacaccgccgtgtactactgcgccagaaacctgtatctgttcggccagggaaccctggtcacagtgtcatctacgcgtgaggacctgaagaacgtgttcccacctgaggtggccgtgttcgagcctagcgaggccgagatcagccacacccagaaagccaccctcgtgtgcctggctaccggcttctaccccgaccatgtggaactgtcttggtgggtcaacggcaaagaggtgcacagcggcgtgtgtaccgacccccagccactgaaagaacagcccgccctgaacgacagccggtactgcctgagcagcagactgagagtgtccgccaccttctggcagaacccccggaaccacttcagatgccaggtgcagttctacggcctgagcgagaacgacgagtggacccaggacagagccaagcccgtgacccagatcgtgtctgccgaagcctggggcagagccgatgatgtgattaagatccactggcaggaaaagaagtccaacaccatcctgggcagccaggaaggcaacaccatgaagaccaacgacacctacatgaagttcagctggctgaccgtgcccgagaagtccctggacaaagaacacagatgcatcgtgcggcacgaaaacaacaagaacggcgtggaccaggaaatcatcttcccacccatcaagaccgatgtgattacaatggaccccaaggacaactgctccaaggacgccaacgataccctgctgctccagctgaccaacaccagcgcctactacatgtacttgttgctgctgctgaagtccgtggtgtacttcgccatcatcacatgctgcctgctgatggctatggtcaagcggaaggacagccgggga

SEQ ID NO: 36783 - DNA, 2163 bp, synthetic construct
  source 1..2163: mol_type = other DNA
atggccttaccagtgaccgccttgctcctgccgctggccttgctgctccacgccgccaggccggacatccagatgacacagagccctagcagcctgtctgccagcgtgggagacagagtgaccatcacatgcaagagcagccagagcctgctggactccgatggcaagacctacctgaactggtatcagcagaagcccggcaaggcccctaagctgctgatctacctggtgtccaagctggatagcggcgtgcccagcagattttctggcagcggcagcggaaccgacttcaccctgacaatatccagcctccagcctgaggacttcgccacctactactgctggcaaggcacccactttccattcaccttcggccagggcaccaaggtggaaatcaaaagactcgaggacctgaagaacgtgttcccacctgaggtggccgtgttcgagcctagcgaggccgagatcagccacacccagaaagccaccctcgtgtgcctggctaccggcttctaccccgaccatgtggaactgtcttggtgggtcaacggcaaagaggtgcacagcggcgtgtgtaccgacccccagccactgaaagaacagcccgccctgaacgacagccggtactgcctgagcagcagactgagagtgtccgccaccttctggcagaacccccggaaccacttcagatgccaggtgcagttctacggcctgagcgagaacgacgagtggacccaggacagagccaagcccgtgacccagatcgtgtctgccgaagcctggggcagagccgatgatgtgattaagatccactggcaggaaaagaagtccaacaccatcctgggcagccaggaaggcaacaccatgaagaccaacgacacctacatgaagttcagctggctgaccgtgcccgagaagtccctggacaaagaacacagatgcatcgtgcggcacgaaaacaacaagaacggcgtggaccaggaaatcatcttcccacccatcaagaccgatgtgattacaatggaccccaaggacaactgctccaaggacgccaacgataccctgctgctccagctgaccaacaccagcgcctactacatgtacttgttgctgctgctgaagtccgtggtgtacttcgccatcatcacatgctgcctgctgcggagaaccgccttctgctgcaacggcgagaagtctagggccaagcgatctggatctggagcaacaaacttctcactactcaaacaagcaggtgacgtggaggagaatcccgggcctactagtatggactggatttggcgcatccttttccttgtcggcgctgctaccggcgcgcattccttcgaagaagtgcagctggttgaatcaggcggaggactggttcagcctggcggatctctgagactgtcttgtgccgccagcggctacaccttcaccagctactggatgaactgggtccgacaggcccctggcaaaggactggaatgggtcggaatgatcgaccccagcgacagcgagacacactacaaccacatcttcaaggaccgcttcaccatcagcgccgacaccagcaagaataccgcctacctccagatgaactccctgagagccgaggacaccgccgtgtactactgcgccagaaacctgtatctgttcggccagggaaccctggtcacagtgtcatctacgcgtatccagaaccctgatcctgccgtgtaccagctgcgggatagcaagagcagcgacaagagcgtgtgtctgttcaccgacttcgacagccagaccaacgtgtcccagagcaaggactccgacgtgtacatcaccgataagtgcgtgctggacatgcggagcatggacttcaagagcaactccgccgtggcctggtccaacaagtccgatttcgcctgcgccaacgccttcaacaacagcattatccccgaggacacattcttcccaagccccgagagcagcgactccaccgaccacgtgaagcccaaagagacagagaacaccaagcagcccagcaagagctgccacaagcccaaggccatcgtgcacaccgagaaagtgaacatgatgagcctgaccgtgctgggcctgcggatgctgttcgccaaaaccgtggccgtgaacttcctgctgaccgccaagctgttcttcctc

SEQ ID NO: 36784 - DNA, 2175 bp, synthetic construct
  source 1..2175: mol_type = other DNA
atggccttaccagtgaccgccttgctcctgccgctggccttgctgctccacgccgccaggccggacatccagatgacacagagccctagcagcctgtctgccagcgtgggagacagagtgaccatcacatgcaagagcagccagagcctgctggactccgatggcaagacctacctgaactggtatcagcagaagcccggcaaggcccctaagctgctgatctacctggtgtccaagctggatagcggcgtgcccagcagattttctggcagcggcagcggaaccgacttcaccctgacaatatccagcctccagcctgaggacttcgccacctactactgctggcaaggcacccactttccattcaccttcggccagggcaccaaggtggaaatcaaaagactcgagatccagaaccctgatcctgccgtgtaccagctgcgggatagcaagagcagcgacaagagcgtgtgtctgttcaccgacttcgacagccagaccaacgtgtcccagagcaaggactccgacgtgtacatcaccgataagtgcgtgctggacatgcggagcatggacttcaagagcaactccgccgtggcctggtccaacaagtccgatttcgcctgcgccaacgccttcaacaacagcattatccccgaggacacattcttcccaagccccgagagcagcgactccaccgaccacgtgaagcccaaagagacagagaacaccaagcagcccagcaagagctgccacaagcccaaggccatcgtgcacaccgagaaagtgaacatgatgagcctgaccgtgctgggcctgcggatgctgttcgccaaaaccgtggccgtgaacttcctgctgaccgccaagctgttcttcctccgcgccaagagaagcggatctggcgtgaagcagaccctgaatttcgacctgctgaagctggctggcgacgtggaatccaacccaggccctactagtatggactggatttggcgcatccttttccttgtcggcgctgctaccggcgcgcattccttcgaagaagtgcagctggttgaatcaggcggaggactggttcagcctggcggatctctgagactgtcttgtgccgccagcggctacaccttcaccagctactggatgaactgggtccgacaggcccctggcaaaggactggaatgggtcggaatgatcgaccccagcgacagcgagacacactacaaccacatcttcaaggaccgcttcaccatcagcgccgacaccagcaagaataccgcctacctccagatgaactccctgagagccgaggacaccgccgtgtactactgcgccagaaacctgtatctgttcggccagggaaccctggtcacagtgtcatctacgcgtgaggacctgaagaacgtgttcccacctgaggtggccgtgttcgagcctagcgaggccgagatcagccacacccagaaagccaccctcgtgtgcctggctaccggcttctaccccgaccatgtggaactgtcttggtgggtcaacggcaaagaggtgcacagcggcgtgtgtaccgacccccagccactgaaagaacagcccgccctgaacgacagccggtactgcctgagcagcagactgagagtgtccgccaccttctggcagaacccccggaaccacttcagatgccaggtgcagttctacggcctgagcgagaacgacgagtggacccaggacagagccaagcccgtgacccagatcgtgtctgccgaagcctggggcagagccgatgatgtgattaagatccactggcaggaaaagaagtccaacaccatcctgggcagccaggaaggcaacaccatgaagaccaacgacacctacatgaagttcagctggctgaccgtgcccgagaagtccctggacaaagaacacagatgcatcgtgcggcacgaaaacaacaagaacggcgtggaccaggaaatcatcttcccacccatcaagaccgatgtgattacaatggaccccaaggacaactgctccaaggacgccaacgataccctgctgctccagctgaccaacaccagcgcctactacatgtacttgttgctgctgctgaagtccgtggtgtacttcgccatcatcacatgctgcctgctgcggagaaccgccttctgctgcaacggcgagaagtct

SEQ ID NO: 36785 - DNA, 2568 bp, synthetic construct
  source 1..2568: mol_type = other DNA
atggccttaccagtgaccgccttgctcctgccgctggccttgctgctccacgccgccaggccggaagtgcagctggttgaatctggcggaggactggttcagcctggcggatctctgagactgtcttgtgccgccagcggcttcagcttcagcgacttttggatgagctgggtccgacaggcccctggcaaaggacttgaatgggtcgccacaatcagccaggccggcagcgagaaggactacgtggactctgtgaagggcagattcaccatcagccgggacaacgccaagaagtccctgtacctccagatgaacagcctgagagccgaggacaccgccgtgtactattgtgcctctggcgtgtacagcttcgactacagaggccagggcaccctggtcacagtctcttctggtaccggcggaggcggatctggcggcggaggtagcggtggcggaggatctgaattcgacatccagatgacacagagccctagcagcctgtctgccagcgtgggagacagagtgaccatcacatgcaagagcagccagagcctgctggactccgatggcaagacctacctgaactggtatcagcagaagcccggcaaggcccctaagctgctgatctacctggtgtccaagctggatagcggcgtgcccagcagattttctggcagcggcagcggaaccgacttcaccctgacaatatccagcctccagcctgaggacttcgccacctactactgctggcaaggcacccactttccattcaccttcggccagggcaccaaggtggaaatcaaaagactcgaggacctgaagaacgtgttcccacctgaggtggccgtgttcgagcctagcgaggccgagatcagccacacccagaaagccaccctcgtgtgcctggctaccggcttctaccccgaccatgtggaactgtcttggtgggtcaacggcaaagaggtgcacagcggcgtgtgtaccgacccccagccactgaaagaacagcccgccctgaacgacagccggtactgcctgagcagcagactgagagtgtccgccaccttctggcagaacccccggaaccacttcagatgccaggtgcagttctacggcctgagcgagaacgacgagtggacccaggacagagccaagcccgtgacccagatcgtgtctgccgaagcctggggcagagccgatgatgtgattaagatccactggcaggaaaagaagtccaacaccatcctgggcagccaggaaggcaacaccatgaagaccaacgacacctacatgaagttcagctggctgaccgtgcccgagaagtccctggacaaagaacacagatgcatcgtgcggcacgaaaacaacaagaacggcgtggaccaggaaatcatcttcccacccatcaagaccgatgtgattacaatggaccccaaggacaactgctccaaggacgccaacgataccctgctgctccagctgaccaacaccagcgcctactacatgtacttgttgctgctgctgaagtccgtggtgtacttcgccatcatcacatgctgcctgctgcggagaaccgccttctgctgcaacggcgagaagtctagggccaagcgatctggatctggagcaacaaacttctcactactcaaacaagcaggtgacgtggaggagaatcccgggcctactagtatggactggatttggcgcatccttttccttgtcggcgctgctaccggcgcgcattccttcgaagaagtgcagctggttgaatcaggcggaggactggttcagcctggcggatctctgagactgtcttgtgccgccagcggctacaccttcaccagctactggatgaactgggtccgacaggcccctggcaaaggactggaatgggtcggaatgatcgaccccagcgacagcgagacacactacaaccacatcttcaaggaccgcttcaccatcagcgccgacaccagcaagaataccgcctacctccagatgaactccctgagagccgaggacaccgccgtgtactactgcgccagaaacctgtatctgttcggccagggaaccctggtcacagtgtcatctacgcgtatccagaaccctgatcctgccgtgtaccagctgcgggatagcaagagcagcgacaagagcgtgtgtctgttcaccgacttcgacagccagaccaacgtgtcccagagcaaggactccgacgtgtacatcaccgataagtgcgtgctggacatgcggagcatggacttcaagagcaactccgccgtggcctggtccaacaagtccgatttcgcctgcgccaacgccttcaacaacagcattatccccgaggacacattcttcccaagccccgagagcagcgactccaccgaccacgtgaagcccaaagagacagagaacaccaagcagcccagcaagagctgccacaagcccaaggccatcgtgcacaccgagaaagtgaacatgatgagcctgaccgtgctgggcctgcggatgctgttcgccaaaaccgtggccgtgaacttcctgctgaccgccaagctgttcttcctc

SEQ ID NO: 36786 - DNA, 2979 bp, synthetic construct
  source 1..2979: mol_type = other DNA
atggccttaccagtgaccgccttgctcctgccgctggccttgctgctccacgccgccaggccggaagtgcagctggttgaatctggcggaggactggttcagcctggcggatctctgagactgtcttgtgccgccagcggcttcagcttcagcgacttttggatgagctgggtccgacaggcccctggcaaaggacttgaatgggtcgccacaatcagccaggccggcagcgagaaggactacgtggactctgtgaagggcagattcaccatcagccgggacaacgccaagaagtccctgtacctccagatgaacagcctgagagccgaggacaccgccgtgtactattgtgcctctggcgtgtacagcttcgactacagaggccagggcaccctggtcacagtctcttctggtaccggcggaggcggatctggcggcggaggtagcggtggcggaggatctgaattcgacatccagatgacacagagccctagcagcctgtctgccagcgtgggagacagagtgaccatcacatgcaagagcagccagagcctgctggactccgatggcaagacctacctgaactggtatcagcagaagcccggcaaggcccctaagctgctgatctacctggtgtccaagctggatagcggcgtgcccagcagattttctggcagcggcagcggaaccgacttcaccctgacaatatccagcctccagcctgaggacttcgccacctactactgctggcaaggcacccactttccattcaccttcggccagggcaccaaggtggaaatcaaaagactcgaggacctgaagaacgtgttcccacctgaggtggccgtgttcgagcctagcgaggccgagatcagccacacccagaaagccaccctcgtgtgcctggctaccggcttctaccccgaccatgtggaactgtcttggtgggtcaacggcaaagaggtgcacagcggcgtgtgtaccgacccccagccactgaaagaacagcccgccctgaacgacagccggtactgcctgagcagcagactgagagtgtccgccaccttctggcagaacccccggaaccacttcagatgccaggtgcagttctacggcctgagcgagaacgacgagtggacccaggacagagccaagcccgtgacccagatcgtgtctgccgaagcctggggcagagccgatgatgtgattaagatccactggcaggaaaagaagtccaacaccatcctgggcagccaggaaggcaacaccatgaagaccaacgacacctacatgaagttcagctggctgaccgtgcccgagaagtccctggacaaagaacacagatgcatcgtgcggcacgaaaacaacaagaacggcgtggaccaggaaatcatcttcccacccatcaagaccgatgtgattacaatggaccccaaggacaactgctccaaggacgccaacgataccctgctgctccagctgaccaacaccagcgcctactacatgtacttgttgctgctgctgaagtccgtggtgtacttcgccatcatcacatgctgcctgctgcggagaaccgccttctgctgcaacggcgagaagtctagggccaagcgatctggatctggagcaacaaacttctcactactcaaacaagcaggtgacgtggaggagaatcccgggcctactagtatggactggatttggcgcatccttttccttgtcggcgctgctaccggcgcgcattccgggccccagctccagctgcaagagtctggacctggcctggtcaagcctagcgagacactgagcctgacctgtaccgtgtccggcgatagcatcagcagcggcgattactactggggctggatcagacagcctcctggcaaaggactggaatggatcggccacatctactacagcggcgtgacctactacaaccccagcctgaagtccagagtgaccatcagcgtggacaccagccggaaccagttctccctgaagctgtctagcgtgacagccgccgataccgccgtgtactactgcaccagagaggacagcagcaactggcggagtagaggccagggaacactggtcacagttagctctggatccggcggaggcggaagtggaggcggaggatctggcggcggaggctctttcgaagaagtgcagctggttgaatcaggcggaggactggttcagcctggcggatctctgagactgtcttgtgccgccagcggctacaccttcaccagctactggatgaactgggtccgacaggcccctggcaaaggactggaatgggtcggaatgatcgaccccagcgacagcgagacacactacaaccacatcttcaaggaccgcttcaccatcagcgccgacaccagcaagaataccgcctacctccagatgaactccctgagagccgaggacaccgccgtgtactactgcgccagaaacctgtatctgttcggccagggaaccctggtcacagtgtcatctacgcgtatccagaaccctgatcctgccgtgtaccagctgcgggatagcaagagcagcgacaagagcgtgtgtctgttcaccgacttcgacagccagaccaacgtgtcccagagcaaggactccgacgtgtacatcaccgataagtgcgtgctggacatgcggagcatggacttcaagagcaactccgccgtggcctggtccaacaagtccgatttcgcctgcgccaacgccttcaacaacagcattatccccgaggacacattcttcccaagccccgagagcagcgactccaccgaccacgtgaagcccaaagagacagagaacaccaagcagcccagcaagagctgccacaagcccaaggccatcgtgcacaccgagaaagtgaacatgatgagcctgaccgtgctgggcctgcggatgctgttcgccaaaaccgtggccgtgaacttcctgctgaccgccaagctgttcttcctc

SEQ ID NO: 36787 - DNA, 1857 bp, synthetic construct
  source 1..1857: mol_type = other DNA
atggccttaccagtgaccgccttgctcctgccgctggccttgctgctccacgccgccaggccggacatccagatgacacagagccctagcagcctgtctgccagcgtgggagacagagtgaccatcacatgcaagagcagccagagcctgctggactccgatggcaagacctacctgaactggtatcagcagaagcccggcaaggcccctaagctgctgatctacctggtgtccaagctggatagcggcgtgcccagcagattttctggcagcggcagcggaaccgacttcaccctgacaatatccagcctccagcctgaggacttcgccacctactactgctggcaaggcacccactttccattcaccttcggccagggcaccaaggtggaaatcaaaagactcgaggacctgaagaacgtgttcccacctgaggtggccgtgttcgagcctagcgaggccgagatcagccacacccagaaagccaccctcgtgtgcctggctaccggcttctaccccgaccatgtggaactgtcttggtgggtcaacggcaaagaggtgcacagcggcgtgtctaccgacccccagccactgaaagaacagcccgccctgaacgacagccggtactgcctgagcagcagactgagagtgtccgccaccttctggcagaacccccggaaccacttcagatgccaggtgcagttctacggcctgagcgagaacgacgagtggacccaggacagagccaagcccgtgacccagatcgtgtctgccgaagcctggggcagagccgattgcgacgtgaagctggtggaaaagagcttcgagacagacaccaacctgaacttccagaacctgagcgtgatcggcttcagaatcctgctgctgaaagtggccggctttaacctgctgatgaccctgcggctgtggtccagcagggccaagcgatctggatctggagcaacaaacttctcactactcaaacaagcaggtgacgtggaggagaatcccgggcctactagtatggactggatttggcgcatccttttccttgtcggcgctgctaccggcgcgcattccttcgaagaagtgcagctggttgaatcaggcggaggactggttcagcctggcggatctctgagactgtcttgtgccgccagcggctacaccttcaccagctactggatgaactgggtccgacaggcccctggcaaaggactggaatgggtcggaatgatcgaccccagcgacagcgagacacactacaaccacatcttcaaggaccgcttcaccatcagcgccgacaccagcaagaataccgcctacctccagatgaactccctgagagccgaggacaccgccgtgtactactgcgccagaaacctgtatctgttcggccagggaaccctggtcacagtgtcatctacgcgtatccagaaccctgatcctgccgtgtaccagctgcgggatagcaagagcagcgacaagagcgtgtgtctgttcaccgacttcgacagccagaccaacgtgtcccagagcaaggactccgacgtgtacatcaccgataagaccgtgctggacatgcggagcatggacttcaagagcaactccgccgtggcctggtccaacaagtccgatttcgcctgcgccaacgccttcaacaacagcattatccccgaggacacattcttcccaagccccgagagcagctgcggctttaccagcgagagctaccagcagggcgtgctgagcgccaccatcctgtacgagatcctgctgggcaaggccaccctgtacgccgtgctggtgtctgccctggtgctgatggctatggtcaagcggaaggacagccgggga

SEQ ID NO: 36788 - DNA, 1857 bp, synthetic construct
  source 1..1857: mol_type = other DNA
atggccttaccagtgaccgccttgctcctgccgctggccttgctgctccacgccgccaggccggacatccagatgacacagagccctagcagcctgtctgccagcgtgggagacagagtgaccatcacatgcaagagcagccagagcctgctggactccgatggcaagacctacctgaactggtatcagcagaagcccggcaaggcccctaagctgctgatctacctggtgtccaagctggatagcggcgtgcccagcagattttctggcagcggcagcggaaccgacttcaccctgacaatatccagcctccagcctgaggacttcgccacctactactgctggcaaggcacccactttccattcaccttcggccagggcaccaaggtggaaatcaaaagactcgaggacctgaagaacgtgttcccacctgaggtggccgtgttcgagcctagcgaggccgagatcagccacacccagaaagccaccctcgtgtgcctggctaccggcttctaccccgaccatgtggaactgtcttggtgggtcaacggcaaagaggtgcacagcggcgtgtctaccgacccccagccactgaaagaacagcccgccctgaacgacagccggtactgcctgagcagcagactgagagtgtccgccaccttctggcagaacccccggaaccacttcagatgccaggtgcagttctacggcctgagcgagaacgacgagtggacccaggacagagccaagcccgtgacccagatcgtgtctgccgaagcctggggcagagccgattgcggctttaccagcgagagctaccagcagggcgtgctgagcgccaccaacctgagcgtgatcggcttcagaatcctgctgctgaaagtggccggctttaacctgctgatgaccctgcggctgtggtccagcagggccaagcgatctggatctggagcaacaaacttctcactactcaaacaagcaggtgacgtggaggagaatcccgggcctactagtatggactggatttggcgcatccttttccttgtcggcgctgctaccggcgcgcattccttcgaagaagtgcagctggttgaatcaggcggaggactggttcagcctggcggatctctgagactgtcttgtgccgccagcggctacaccttcaccagctactggatgaactgggtccgacaggcccctggcaaaggactggaatgggtcggaatgatcgaccccagcgacagcgagacacactacaaccacatcttcaaggaccgcttcaccatcagcgccgacaccagcaagaataccgcctacctccagatgaactccctgagagccgaggacaccgccgtgtactactgcgccagaaacctgtatctgttcggccagggaaccctggtcacagtgtcatctacgcgtatccagaaccctgatcctgccgtgtaccagctgcgggatagcaagagcagcgacaagagcgtgtgtctgttcaccgacttcgacagccagaccaacgtgtcccagagcaaggactccgacgtgtacatcaccgataagaccgtgctggacatgcggagcatggacttcaagagcaactccgccgtggcctggtccaacaagtccgatttcgcctgcgccaacgccttcaacaacagcattatccccgaggacacattcttcccaagccccgagagcagctgcgacgtgaagctggtggaaaagagcttcgagacagacaccaacctgaacttccagatcctgtacgagatcctgctgggcaaggccaccctgtacgccgtgctggtgtctgccctggtgctgatggctatggtcaagcggaaggacagccgggga

SEQ ID NO: 36789 - DNA, 2169 bp, synthetic construct
  source 1..2169: mol_type = other DNA
atggccttaccagtgaccgccttgctcctgccgctggccttgctgctccacgccgccaggccggacatccagatgacacagagccctagcagcctgtctgccagcgtgggagacagagtgaccatcacatgcaagagcagccagagcctgctggactccgatggcaagacctacctgaactggtatcagcagaagcccggcaaggcccctaagctgctgatctacctggtgtccaagctggatagcggcgtgcccagcagattttctggcagcggcagcggaaccgacttcaccctgacaatatccagcctccagcctgaggacttcgccacctactactgctggcaaggcacccactttccattcaccttcggccagggcaccaaggtggaaatcaaaagactcgaggacctgaagaacgtgttcccacctgaggtggccgtgttcgagcctagcgaggccgagatcagccacacccagaaagccaccctcgtgtgcctggctaccggcttctaccccgaccatgtggaactgtcttggtgggtcaacggcaaagaggtgcacagcggcgtgtctaccgacccccagccactgaaagaacagcccgccctgaacgacagccggtactgcctgagcagcagactgagagtgtccgccaccttctggcagaacccccggaaccacttcagatgccaggtgcagttctacggcctgagcgagaacgacgagtggacccaggacagagccaagcccgtgacccagatcgtgtctgccgaagcctggggcagagccgatgatgtgattaagatccactggcaggaaaagaagtccaacaccatcctgggcagccaggaaggcaacaccatgaagaccaacgacacctacatgaagttcagctggctgaccgtgcccgagaagtccctggacaaagaacacagatgcatcgtgcggcacgaaaacaacaagaacggcgtggaccaggaaatcatcttcccacccatcaagaccgatgtgattacaatggaccccaaggacaactgctccaaggacgccaacgataccctgctgctccagctgaccaacaccagcgcctactacatgtacttgttgctgctgctgaagtccgtggtgtacttcgccatcatcacatgctgcctgctgatggctatggtcaagcggaaggacagccggggaagggccaagcgatctggatctggagcaacaaacttctcactactcaaacaagcaggtgacgtggaggagaatcccgggcctactagtatggactggatttggcgcatccttttccttgtcggcgctgctaccggcgcgcattccttcgaagaagtgcagctggttgaatcaggcggaggactggttcagcctggcggatctctgagactgtcttgtgccgccagcggctacaccttcaccagctactggatgaactgggtccgacaggcccctggcaaaggactggaatgggtcggaatgatcgaccccagcgacagcgagacacactacaaccacatcttcaaggaccgcttcaccatcagcgccgacaccagcaagaataccgcctacctccagatgaactccctgagagccgaggacaccgccgtgtactactgcgccagaaacctgtatctgttcggccagggaaccctggtcacagtgtcatctacgcgtatccagaaccctgatcctgccgtgtaccagctgcgggatagcaagagcagcgacaagagcgtgtgtctgttcaccgacttcgacagccagaccaacgtgtcccagagcaaggactccgacgtgtacatcaccgataagaccgtgctggacatgcggagcatggacttcaagagcaactccgccgtggcctggtccaacaagtccgatttcgcctgcgccaacgccttcaacaacagcattatccccgaggacacattcttcccaagccccgagagcagcgactccaccgaccacgtgaagcccaaagagacagagaacaccaagcagcccagcaagagctgccacaagcccaaggccatcgtgcacaccgagaaagtgaacatgatgagcctgaccgtgctgggcctgcggatgctgttcgccaaaaccgtggccgtgaacttcctgctgaccgccaagctgttcttcctcctcaccgcc

SEQ ID NO: 36790 - DNA, 2163 bp, synthetic construct
  source 1..2163: mol_type = other DNA
atggccttaccagtgaccgccttgctcctgccgctggccttgctgctccacgccgccaggccggacatccagatgacacagagccctagcagcctgtctgccagcgtgggagacagagtgaccatcacatgcaagagcagccagagcctgctggactccgatggcaagacctacctgaactggtatcagcagaagcccggcaaggcccctaagctgctgatctacctggtgtccaagctggatagcggcgtgcccagcagattttctggcagcggcagcggaaccgacttcaccctgacaatatccagcctccagcctgaggacttcgccacctactactgctggcaaggcacccactttccattcaccttcggccagggcaccaaggtggaaatcaaaagactcgaggacctgaagaacgtgttcccacctgaggtggccgtgttcgagcctagcgaggccgagatcagccacacccagaaagccaccctcgtgtgcctggctaccggcttctaccccgaccatgtggaactgtcttggtgggtcaacggcaaagaggtgcacagcggcgtgtctaccgacccccagccactgaaagaacagcccgccctgaacgacagccggtactgcctgagcagcagactgagagtgtccgccaccttctggcagaacccccggaaccacttcagatgccaggtgcagttctacggcctgagcgagaacgacgagtggacccaggacagagccaagcccgtgacccagatcgtgtctgccgaagcctggggcagagccgatgatgtgattaagatccactggcaggaaaagaagtccaacaccatcctgggcagccaggaaggcaacaccatgaagaccaacgacacctacatgaagttcagctggctgaccgtgcccgagaagtccctggacaaagaacacagatgcatcgtgcggcacgaaaacaacaagaacggcgtggaccaggaaatcatcttcccacccatcaagaccgatgtgattacaatggaccccaaggacaactgctccaaggacgccaacgataccctgctgctccagctgaccaacaccagcgcctactacatgtacttgttgctgctgctgaagtccgtggtgtacttcgccatcatcacatgctgcctgctgcggagaaccgccttctgctgcaacggcgagaagtctagggccaagcgatctggatctggagcaacaaacttctcactactcaaacaagcaggtgacgtggaggagaatcccgggcctactagtatggactggatttggcgcatccttttccttgtcggcgctgctaccggcgcgcattccttcgaagaagtgcagctggttgaatcaggcggaggactggttcagcctggcggatctctgagactgtcttgtgccgccagcggctacaccttcaccagctactggatgaactgggtccgacaggcccctggcaaaggactggaatgggtcggaatgatcgaccccagcgacagcgagacacactacaaccacatcttcaaggaccgcttcaccatcagcgccgacaccagcaagaataccgcctacctccagatgaactccctgagagccgaggacaccgccgtgtactactgcgccagaaacctgtatctgttcggccagggaaccctggtcacagtgtcatctacgcgtatccagaaccctgatcctgccgtgtaccagctgcgggatagcaagagcagcgacaagagcgtgtgtctgttcaccgacttcgacagccagaccaacgtgtcccagagcaaggactccgacgtgtacatcaccgataagaccgtgctggacatgcggagcatggacttcaagagcaactccgccgtggcctggtccaacaagtccgatttcgcctgcgccaacgccttcaacaacagcattatccccgaggacacattcttcccaagccccgagagcagcgactccaccgaccacgtgaagcccaaagagacagagaacaccaagcagcccagcaagagctgccacaagcccaaggccatcgtgcacaccgagaaagtgaacatgatgagcctgaccgtgctgggcctgcggatgctgttcgccaaaaccgtggccgtgaacttcctgctgaccgccaagctgttcttcctc

SEQ ID NO: 36791 - DNA, 2595 bp, synthetic construct
  source 1..2595: mol_type = other DNA
atggccttaccagtgaccgccttgctcctgccgctggccttgctgctccacgccgccaggccgctcgaggaggacctgaagaacgtgttcccacctgaggtggccgtgttcgagcctagcgaggccgagatcagccacacccagaaagccaccctcgtgtgcctggctaccggcttctaccccgaccatgtggaactgtcttggtgggtcaacggcaaagaggtgcacagcggcgtgtgtaccgacccccagccactgaaagaacagcccgccctgaacgacagccggtactgcctgagcagcagactgagagtgtccgccaccttctggcagaacccccggaaccacttcagatgccaggtgcagttctacggcctgagcgagaacgacgagtggacccaggacagagccaagcccgtgacccagatcgtgtctgccgaagcctggggcagagccgattgcggctttaccagcgagagctaccagcagggcgtgctgagcgccaccaacctgagcgtgatcggcttcagaatcctgctgctgaaagtggccggctttaacctgctgatgaccctgcggctgtggtccagcagggccaagcgatctggatctggagcaacaaacttctcactactcaaacaagcaggtgacgtggaggagaatcccgggcctactagcatggccttaccagtgaccgccttgctcctgccgctggccttgctgctccacgccgccaggccggacatccagatgacacagagccctagcagcctgtctgccagcgtgggagacagagtgaccatcacatgcaagagcagccagagcctgctggactccgatggcaagacctacctgaactggtatcagcagaagcccggcaaggcccctaagctgctgatctacctggtgtccaagctggatagcggcgtgcccagcagattttctggcagcggcagcggaaccgacttcaccctgacaatatccagcctccagcctgaggacttcgccacctactactgctggcaaggcacccactttccattcaccttcggccagggcaccaaggtggaaatcaaaagaggcggaggcggaagtggaggcggaggatctggcggcggaggctctgaagtgcagctggttgaatcaggcggaggactggttcagcctggcggatctctgagactgtcttgtgccgccagcggctacaccttcaccagctactggatgaactgggtccgacaggcccctggcaaaggactggaatgggtcggaatgatcgaccccagcgacagcgagacacactacaaccacatcttcaaggaccgcttcaccatcagcgccgacaccagcaagaataccgcctacctccagatgaactccctgagagccgaggacaccgccgtgtactactgcgccagaaacctgtatctgttcggccagggaaccctggtcacagtgtcatctacgcgtatccagaaccctgatcctgccgtgtaccagctgcgggatagcaagagcagcgacaagagcgtgtgtctgttcaccgacttcgacagccagaccaacgtgtcccagagcaaggactccgacgtgtacatcaccgataagtgcgtgctggacatgcggagcatggacttcaagagcaactccgccgtggcctggtccaacaagtccgatttcgcctgcgccaacgccttcaacaacagcattatccccgaggacacattcttcccaagccccgagagcagctgcgacgtgaagctggtggaaaagagcttcgagacagacaccaacctgaacttccagatcctgtacgaggtgatcggcttcagaatcctgctgctgaaagtggccggctttaacctgctgatgaccctgcggctgtggtccagccgcgccaagagaagcggatctggcgtgaagcagaccctgaatttcgacctgctgaagctggctggcgacgtggaatccaacccaggcccttctagaggccatatgaccgagtacaagcccacggtgcgcctcgccacccgcgacgacgtccccagggccgtacgcaccctcgccgccgcgttcgccgactaccccgccacgcgccacaccgtcgatccggaccgccacatcgagcgggtcaccgagctgcaagaactcttcctcacgcgcgtcgggctcgacatcggcaaggtgtgggtcgcggacgacggcgccgcggtggcggtctggaccacgccggagagcgtcgaagcgggggcggtgttcgccgagatcggcccgcgcatggccgagttgagcggttcccggctggccgcgcagcaacagatggaaggcctcctggcgccgcaccggcccaaggagcccgcgtggttcctggccaccgtcggcgtctcgcccgaccaccagggcaagggtctgggcagcgccgtcgtgctccccggagtggaggcggccgagcgcgccggggtgcccgccttcctggagacctccgcgccccgcaacctccccttctacgagcggctcggcttcaccgtcaccgccgacgtcgaggtgcccgaaggaccgcgcacctggtgcatgacccgcaagcccggtgcctga

SEQ ID NO: 36792 - DNA, 2595 bp, synthetic construct
  source 1..2595: mol_type = other DNA
atggccttaccagtgaccgccttgctcctgccgctggccttgctgctccacgccgccaggccgctcgagatccagaaccctgatcctgccgtgtaccagctgcgggatagcaagagcagcgacaagagcgtgtgtctgttcaccgacttcgacagccagaccaacgtgtcccagagcaaggactccgacgtgtacatcaccgataagtgcgtgctggacatgcggagcatggacttcaagagcaactccgccgtggcctggtccaacaagtccgatttcgcctgcgccaacgccttcaacaacagcattatccccgaggacacattcttcccaagccccgagagcagctgcgacgtgaagctggtggaaaagagcttcgagacagacaccaacctgaacttccagatcctgtacgaggtgatcggcttcagaatcctgctgctgaaagtggccggctttaacctgctgatgaccctgcggctgtggtccagcagggccaagcgatctggatctggagcaacaaacttctcactactcaaacaagcaggtgacgtggaggagaatcccgggcctactagcatggccttaccagtgaccgccttgctcctgccgctggccttgctgctccacgccgccaggccggacatccagatgacacagagccctagcagcctgtctgccagcgtgggagacagagtgaccatcacatgcaagagcagccagagcctgctggactccgatggcaagacctacctgaactggtatcagcagaagcccggcaaggcccctaagctgctgatctacctggtgtccaagctggatagcggcgtgcccagcagattttctggcagcggcagcggaaccgacttcaccctgacaatatccagcctccagcctgaggacttcgccacctactactgctggcaaggcacccactttccattcaccttcggccagggcaccaaggtggaaatcaaaagaggcggaggcggaagtggaggcggaggatctggcggcggaggctctgaagtgcagctggttgaatcaggcggaggactggttcagcctggcggatctctgagactgtcttgtgccgccagcggctacaccttcaccagctactggatgaactgggtccgacaggcccctggcaaaggactggaatgggtcggaatgatcgaccccagcgacagcgagacacactacaaccacatcttcaaggaccgcttcaccatcagcgccgacaccagcaagaataccgcctacctccagatgaactccctgagagccgaggacaccgccgtgtactactgcgccagaaacctgtatctgttcggccagggaaccctggtcacagtgtcatctacgcgtgaggacctgaagaacgtgttcccacctgaggtggccgtgttcgagcctagcgaggccgagatcagccacacccagaaagccaccctcgtgtgcctggctaccggcttctaccccgaccatgtggaactgtcttggtgggtcaacggcaaagaggtgcacagcggcgtgtgtaccgacccccagccactgaaagaacagcccgccctgaacgacagccggtactgcctgagcagcagactgagagtgtccgccaccttctggcagaacccccggaaccacttcagatgccaggtgcagttctacggcctgagcgagaacgacgagtggacccaggacagagccaagcccgtgacccagatcgtgtctgccgaagcctggggcagagccgattgcggctttaccagcgagagctaccagcagggcgtgctgagcgccaccaacctgagcgtgatcggcttcagaatcctgctgctgaaagtggccggctttaacctgctgatgaccctgcggctgtggtccagccgcgccaagagaagcggatctggcgtgaagcagaccctgaatttcgacctgctgaagctggctggcgacgtggaatccaacccaggcccttctagaggccatatgaccgagtacaagcccacggtgcgcctcgccacccgcgacgacgtccccagggccgtacgcaccctcgccgccgcgttcgccgactaccccgccacgcgccacaccgtcgatccggaccgccacatcgagcgggtcaccgagctgcaagaactcttcctcacgcgcgtcgggctcgacatcggcaaggtgtgggtcgcggacgacggcgccgcggtggcggtctggaccacgccggagagcgtcgaagcgggggcggtgttcgccgagatcggcccgcgcatggccgagttgagcggttcccggctggccgcgcagcaacagatggaaggcctcctggcgccgcaccggcccaaggagcccgcgtggttcctggccaccgtcggcgtctcgcccgaccaccagggcaagggtctgggcagcgccgtcgtgctccccggagtggaggcggccgagcgcgccggggtgcccgccttcctggagacctccgcgccccgcaacctccccttctacgagcggctcggcttcaccgtcaccgccgacgtcgaggtgcccgaaggaccgcgcacctggtgcatgacccgcaagcccggtgcctga

SEQ ID NO: 36793 - DNA, 2595 bp, synthetic construct; identical to SEQ ID NO: 36791
  source 1..2595: mol_type = other DNA

SEQ ID NO: 36794 - DNA, 2919 bp, synthetic construct
  source 1..2919: mol_type = other DNA
atggccttaccagtgaccgccttgctcctgccgctggccttgctgctccacgccgccaggccgctcgaggaggacctgaagaacgtgttcccacctgaggtggccgtgttcgagcctagcgaggccgagatcagccacacccagaaagccaccctcgtgtgcctggctaccggcttctaccccgaccatgtggaactgtcttggtgggtcaacggcaaagaggtgcacagcggcgtgtctaccgacccccagccactgaaagaacagcccgccctgaacgacagccggtactgcctgagcagcagactgagagtgtccgccaccttctggcagaacccccggaaccacttcagatgccaggtgcagttctacggcctgagcgagaacgacgagtggacccaggacagagccaagcccgtgacccagatcgtgtctgccgaagcctggggcagagccgatgatgtgattaagatccactggcaggaaaagaagtccaacaccatcctgggcagccaggaaggcaacaccatgaagaccaacgacacctacatgaagttcagctggctgaccgtgcccgagaagtccctggacaaagaacacagatgcatcgtgcggcacgaaaacaacaagaacggcgtggaccaggaaatcatcttcccacccatcaagaccgatgtgattacaatggaccccaaggacaactgctccaaggacgccaacgataccctgctgctccagctgaccaacaccagcgcctactacatgtacttgttgctgctgctgaagtccgtggtgtacttcgccatcatcacatgctgcctgctgatggctatggtcaagcggaaggacagccggggaagggccaagcgatctggatctggagcaacaaacttctcactactcaaacaagcaggtgacgtggaggagaatcccgggcctactagcatggccttaccagtgaccgccttgctcctgccgctggccttgctgctccacgccgccaggccggacatccagatgacacagagccctagcagcctgtctgccagcgtgggagacagagtgaccatcacatgcaagagcagccagagcctgctggactccgatggcaagacctacctgaactggtatcagcagaagcccggcaaggcccctaagctgctgatctacctggtgtccaagctggatagcggcgtgcccagcagattttctggcagcggcagcggaaccgacttcaccctgacaatatccagcctccagcctgaggacttcgccacctactactgctggcaaggcacccactttccattcaccttcggccagggcaccaaggtggaaatcaaaagaggcggaggcggaagtggaggcggaggatctggcggcggaggctctgaagtgcagctggttgaatcaggcggaggactggttcagcctggcggatctctgagactgtcttgtgccgccagcggctacaccttcaccagctactggatgaactgggtccgacaggcccctggcaaaggactggaatgggtcggaatgatcgaccccagcgacagcgagacacactacaaccacatcttcaaggaccgcttcaccatcagcgccgacaccagcaagaataccgcctacctccagatgaactccctgagagccgaggacaccgccgtgtactactgcgccagaaacctgtatctgttcggccagggaaccctggtcacagtgtcatctacgcgtatccagaaccctgatcctgccgtgtaccagctgcgggatagcaagagcagcgacaagagcgtgtgtctgttcaccgacttcgacagccagaccaacgtgtcccagagcaaggactccgacgtgtacatcaccgataagaccgtgctggacatgcggagcatggacttcaagagcaactccgccgtggcctggtccaacaagtccgatttcgcctgcgccaacgccttcaacaacagcattatccccgaggacacattcttcccaagccccgagagcagcgactccaccgaccacgtgaagcccaaagagacagagaacaccaagcagcccagcaagagctgccacaagcccaaggccatcgtgcacaccgagaaagtgaacatgatgagcctgaccgtgctgggcctgcggatgctgttcgccaaaaccgtggccgtgaacttcctgctgaccgccaagctgttcttcctcctcaccgcccgcgccaagagaagcggatctggcgtgaagcagaccctgaatttcgacctgctgaagctggctggcgacgtggaatccaacccaggcccttctagaggccatatgaccgagtacaagcccacggtgcgcctcgccacccgcgacgacgtccccagggccgtacgcaccctcgccgccgcgttcgccgactaccccgccacgcgccacaccgtcgatccggaccgccacatcgagcgggtcaccgagctgcaagaactcttcctcacgcgcgtcgggctcgacatcggcaaggtgtgggtcgcggacgacggcgccgcggtggcggtctggaccacgccggagagcgtcgaagcgggggcggtgttcgccgagatcggcccgcgcatggccgagttgagcggttcccggctggccgcgcagcaacagatggaaggcctcctggcgccgcaccggcccaaggagcccgcgtggttcctggccaccgtcggcgtctcgcccgaccaccagggcaagggtctgggcagcgccgtcgtgctccccggagtggaggcggccgagcgcgccggggtgcccgccttcctggagacctccgcgccccgcaacctccccttctacgagcggctcggcttcaccgtcaccgccgacgtcgaggtgcccgaaggaccgcgcacctggtgcatgacccgcaagcccggtgcctga

SEQ ID NO: 36795 - DNA, 2919 bp, synthetic construct
  source 1..2919: mol_type = other DNA
atggccttaccagtgaccgccttgctcctgccgctggccttgctgctccacgccgccaggccgctcgagatccagaaccctgatcctgccgtgtaccagctgcgggatagcaagagcagcgacaagagcgtgtgtctgttcaccgacttcgacagccagaccaacgtgtcccagagcaaggactccgacgtgtacatcaccgataagaccgtgctggacatgcggagcatggacttcaagagcaactccgccgtggcctggtccaacaagtccgatttcgcctgcgccaacgccttcaacaacagcattatccccgaggacacattcttcccaagccccgagagcagcgactccaccgaccacgtgaagcccaaagagacagagaacaccaagcagcccagcaagagctgccacaagcccaaggccatcgtgcacaccgagaaagtgaacatgatgagcctgaccgtgctgggcctgcggatgctgttcgccaaaaccgtggccgtgaacttcctgctgaccgccaagctgttcttcctcctcaccgccagggccaagcgatctggatctggagcaacaaacttctcactactcaaacaagcaggtgacgtggaggagaatcccgggcctactagcatggccttaccagtgaccgccttgctcctgccgctggccttgctgctccacgccgccaggccggacatccagatgacacagagccctagcagcctgtctgccagcgtgggagacagagtgaccatcacatgcaagagcagccagagcctgctggactccgatggcaagacctacctgaactggtatcagcagaagcccggcaaggcccctaagctgctgatctacctggtgtccaagctggatagcggcgtgcccagcagattttctggcagcggcagcggaaccgacttcaccctgacaatatccagcctccagcctgaggacttcgccacctactactgctggcaaggcacccactttccattcaccttcggccagggcaccaaggtggaaatcaaaagaggcggaggcggaagtggaggcggaggatctggcggcggaggctctgaagtgcagctggttgaatcaggcggaggactggttcagcctggcggatctctgagactgtcttgtgccgccagcggctacaccttcaccagctactggatgaactgggtccgacaggcccctggcaaaggactggaatgggtcggaatgatcgaccccagcgacagcgagacacactacaaccacatcttcaaggaccgcttcaccatcagcgccgacaccagcaagaataccgcctacctccagatgaactccctgagagccgaggacaccgccgtgtactactgcgccagaaacctgtatctgttcggccagggaaccctggtcacagtgtcatctacgcgtgaggacctgaagaacgtgttcccacctgaggtggccgtgttcgagcctagcgaggccgagatcagccacacccagaaagccaccctcgtgtgcctggctaccggcttctaccccgaccatgtggaactgtcttggtgggtcaacggcaaagaggtgcacagcggcgtgtctaccgacccccagccactgaaagaacagcccgccctgaacgacagccggtactgcctgagcagcagactgagagtgtccgccaccttctggcagaacccccggaaccacttcagatgccaggtgcagttctacggcctgagcgagaacgacgagtggacccaggacagagccaagcccgtgacccagatcgtgtctgccgaagcctggggcagagccgatgatgtgattaagatccactggcaggaaaagaagtccaacaccatcctgggcagccaggaaggcaacaccatgaagaccaacgacacctacatgaagttcagctggctgaccgtgcccgagaagtccctggacaaagaacacagatgcatcgtgcggcacgaaaacaacaagaacggcgtggaccaggaaatcatcttcccacccatcaagaccgatgtgattacaatggaccccaaggacaactgctccaaggacgccaacgataccctgctgctccagctgaccaacaccagcgcctactacatgtacttgttgctgctgctgaagtccgtggtgtacttcgccatcatcacatgctgcctgctgatggctatggtcaagcggaaggacagccggggacgcgccaagagaagcggatctggcgtgaagcagaccctgaatttcgacctgctgaagctggctggcgacgtggaatccaacccaggcccttctagaggccatatgaccgagtacaagcccacggtgcgcctcgccacccgcgacgacgtccccagggccgtacgcaccctcgccgccgcgttcgccgactaccccgccacgcgccacaccgtcgatccggaccgccacatcgagcgggtcaccgagctgcaagaactcttcctcacgcgcgtcgggctcgacatcggcaaggtgtgggtcgcggacgacggcgccgcggtggcggtctggaccacgccggagagcgtcgaagcgggggcggtgttcgccgagatcggcccgcgcatggccgagttgagcggttcccggctggccgcgcagcaacagatggaaggcctcctggcgccgcaccggcccaaggagcccgcgtggttcctggccaccgtcggcgtctcgcccgaccaccagggcaagggtctgggcagcgccgtcgtgctccccggagtggaggcggccgagcgcgccggggtgcccgccttcctggagacctccgcgccccgcaacctccccttctacgagcggctcggcttcaccgtcaccgccgacgtcgaggtgcccgaaggaccgcgcacctggtgcatgacccgcaagcccggtgcctga

SEQ ID NO: 36796 - DNA, 2913 bp, synthetic construct
  source 1..2913: mol_type = other DNA
atggccttaccagtgaccgccttgctcctgccgctggccttgctgctccacgccgccaggccgctcgaggaggacctgaagaacgtgttcccacctgaggtggccgtgttcgagcctagcgaggccgagatcagccacacccagaaagccaccctcgtgtgcctggctaccggcttctaccccgaccatgtggaactgtcttggtgggtcaacggcaaagaggtgcacagcggcgtgtgtaccgacccccagccactgaaagaacagcccgccctgaacgacagccggtactgcctgagcagcagactgagagtgtccgccaccttctggcagaacccccggaaccacttcagatgccaggtgcagttctacggcctgagcgagaacgacgagtggacccaggacagagccaagcccgtgacccagatcgtgtctgccgaagcctggggcagagccgatgatgtgattaagatccactggcaggaaaagaagtccaacaccatcctgggcagccaggaaggcaacaccatgaagaccaacgacacctacatgaagttcagctggctgaccgtgcccgagaagtccctggacaaagaacacagatgcatcgtgcggcacgaaaacaacaagaacggcgtggaccaggaaatcatcttcccacccatcaagaccgatgtgattacaatggaccccaaggacaactgctccaaggacgccaacgataccctgctgctccagctgaccaacaccagcgcctactacatgtacttgttgctgctgctgaagtccgtggtgtacttcgccatcatcacatgctgcctgctgcggagaaccgccttctgctgcaacggcgagaagtctagggccaagcgatctggatctggagcaacaaacttctcactactcaaacaagcaggtgacgtggaggagaatcccgggcctactagcatggccttaccagtgaccgccttgctcctgccgctggccttgctgctccacgccgccaggccggacatccagatgacacagagccctagcagcctgtctgccagcgtgggagacagagtgaccatcacatgcaagagcagccagagcctgctggactccgatggcaagacctacctgaactggtatcagcagaagcccggcaaggcccctaagctgctgatctacctggtgtccaagctggatagcggcgtgcccagcagattttctggcagcggcagcggaaccgacttcaccctgacaatatccagcctccagcctgaggacttcgccacctactactgctggcaaggcacccactttccattcaccttcggccagggcaccaaggtggaaatcaaaagaggcggaggcggaagtggaggcggaggatctggcggcggaggctctgaagtgcagctggttgaatcaggcggaggactggttcagcctggcggatctctgagactgtcttgtgccgccagcggctacaccttcaccagctactggatgaactgggtccgacaggcccctggcaaaggactggaatgggtcggaatgatcgaccccagcgacagcgagacacactacaaccacatcttcaaggaccgcttcaccatcagcgccgacaccagcaagaataccgcctacctccagatgaactccctgagagccgaggacaccgccgtgtactactgcgccagaaacctgtatctgttcggccagggaaccctggtcacagtgtcatctacgcgtatccagaaccctgatcctgccgtgtaccagctgcgggatagcaagagcagcgacaagagcgtgtgtctgttcaccgacttcgacagccagaccaacgtgtcccagagcaaggactccgacgtgtacatcaccgataagtgcgtgctggacatgcggagcatggacttcaagagcaactccgccgtggcctggtccaacaagtccgatttcgcctgcgccaacgccttcaacaacagcattatccccgaggacacattcttcccaagccccgagagcagcgactccaccgaccacgtgaagcccaaagagacagagaacaccaagcagcccagcaagagctgccacaagcccaaggccatcgtgcacaccgagaaagtgaacatgatgagcctgaccgtgctgggcctgcggatgctgttcgccaaaaccgtggccgtgaacttcctgctgaccgccaagctgttcttcctccgcgccaagagaagcggatctggcgtgaagcagaccctgaatttcgacctgctgaagctggctggcgacgtggaatccaacccaggcccttctagaggccatatgaccgagtacaagcccacggtgcgcctcgccacccgcgacgacgtccccagggccgtacgcaccctcgccgccgcgttcgccgactaccccgccacgcgccacaccgtcgatccggaccgccacatcgagcgggtcaccgagctgcaagaactcttcctcacgcgcgtcgggctcgacatcggcaaggtgtgggtcgcggacgacggcgccgcggtggcggtctggaccacgccggagagcgtcgaagcgggggcggtgttcgccgagatcggcccgcgcatggccgagttgagcggttcccggctggccgcgcagcaacagatggaaggcctcctggcgccgcaccggcccaaggagcccgcgtggttcctggccaccgtcggcgtctcgcccgaccaccagggcaagggtctgggcagcgccgtcgtgctccccggagtggaggcggccgagcgcgccggggtgcccgccttcctggagacctccgcgccccgcaacctccccttctacgagcggctcggcttcaccgtcaccgccgacgtcgaggtgcccgaaggaccgcgcacctggtgcatgacccgcaagcccggtgcctga

SEQ ID NO: 36797 - DNA, 2913 bp, synthetic construct
  source 1..2913: mol_type = other DNA
atggccttaccagtgaccgccttgctcctgccgctggccttgctgctccacgccgccaggccgctcgagatccagaaccctgatcctgccgtgtaccagctgcgggatagcaagagcagcgacaagagcgtgtgtctgttcaccgacttcgacagccagaccaacgtgtcccagagcaaggactccgacgtgtacatcaccgataagtgcgtgctggacatgcggagcatggacttcaagagcaactccgccgtggcctggtccaacaagtccgatttcgcctgcgccaacgccttcaacaacagcattatccccgaggacacattcttcccaagccccgagagcagcgactccaccgaccacgtgaagcccaaagagacagagaacaccaagcagcccagcaagagctgccacaagcccaaggccatcgtgcacaccgagaaagtgaacatgatgagcctgaccgtgctgggcctgcggatgctgttcgccaaaaccgtggccgtgaacttcctgctgaccgccaagctgttcttcctcagggccaagcgatctggatctggagcaacaaacttctcactactcaaacaagcaggtgacgtggaggagaatcccgggcctactagcatggccttaccagtgaccgccttgctcctgccgctggccttgctgctccacgccgccaggccggacatccagatgacacagagccctagcagcctgtctgccagcgtgggagacagagtgaccatcacatgcaagagcagccagagcctgctggactccgatggcaagacctacctgaactggtatcagcagaagcccggcaaggcccctaagctgctgatctacctggtgtccaagctggatagcggcgtgcccagcagattttctggcagcggcagcggaaccgacttcaccctgacaatatccagcctccagcctgaggacttcgccacctactactgctggcaaggcacccactttccattcaccttcggccagggcaccaaggtggaaatcaaaagaggcggaggcggaagtggaggcggaggatctggcggcggaggctctgaagtgcagctggttgaatcaggcggaggactggttcagcctggcggatctctgagactgtcttgtgccgccagcggctacaccttcaccagctactggatgaactgggtccgacaggcccctggcaaaggactggaatgggtcggaatgatcgaccccagcgacagcgagacacactacaaccacatcttcaaggaccgcttcaccatcagcgccgacaccagcaagaataccgcctacctccagatgaactccctgagagccgaggacaccgccgtgtactactgcgccagaaacctgtatctgttcggccagggaaccctggtcacagtgtcatctacgcgtgaggacctgaagaacgtgttcccacctgaggtggccgtgttcgagcctagcgaggccgagatcagccacacccagaaagccaccctcgtgtgcctggctaccggcttctaccccgaccatgtggaactgtcttggtgggtcaacggcaaagaggtgcacagcggcgtgtgtaccgacccccagccactgaaagaacagcccgccctgaacgacagccggtactgcctgagcagcagactgagagtgtccgccaccttctggcagaacccccggaaccacttcagatgccaggtgcagttctacggcctgagcgagaacgacgagtggacccaggacagagccaagcccgtgacccagatcgtgtctgccgaagcctggggcagagccgatgatgtgattaagatccactggcaggaaaagaagtccaacaccatcctgggcagccaggaaggcaacaccatgaagaccaacgacacctacatgaagttcagctggctgaccgtgcccgagaagtccctggacaaagaacacagatgcatcgtgcggcacgaaaacaacaagaacggcgtggaccaggaaatcatcttcccacccatcaagaccgatgtgattacaatggaccccaaggacaactgctccaaggacgccaacgataccctgctgctccagctgaccaacaccagcgcctactacatgtacttgttgctgctgctgaagtccgtggtgtacttcgccatcatcacatgctgcctgctgcggagaaccgccttctgctgcaacggcgagaagtctcgcgccaagagaagcggatctggcgtgaagcagaccctgaatttcgacctgctgaagctggctggcgacgtggaatccaacccaggcccttctagaggccatatgaccgagtacaagcccacggtgcgcctcgccacccgcgacgacgtccccagggccgtacgcaccctcgccgccgcgttcgccgactaccccgccacgcgccacaccgtcgatccggaccgccacatcgagcgggtcaccgagctgcaagaactcttcctcacgcgcgtcgggctcgacatcggcaaggtgtgggtcgcggacgacggcgccgcggtggcggtctggaccacgccggagagcgtcgaagcgggggcggtgttcgccgagatcggcccgcgcatggccgagttgagcggttcccggctggccgcgcagcaacagatggaaggcctcctggcgccgcaccggcccaaggagcccgcgtggttcctggccaccgtcggcgtctcgcccgaccaccagggcaagggtctgggcagcgccgtcgtgctccccggagtggaggcggccgagcgcgccggggtgcccgccttcctggagacctccgcgccccgcaacctccccttctacgagcggctcggcttcaccgtcaccgccgacgtcgaggtgcccgaaggaccgcgcacctggtgcatgacccgcaagcccggtgcctga

SEQ ID NO: 36798 - DNA, 2913 bp, synthetic construct
  source 1..2913: mol_type = other DNA
atggccttaccagtgaccgccttgctcctgccgctggccttgctgctccacgccgccaggccgctcgaggaggacctgaagaacgtgttcccacctgaggtggccgtgttcgagcctagcgaggccgagatcagccacacccagaaagccaccctcgtgtgcctggctaccggcttctaccccgaccatgtggaactgtcttggtgggtcaacggcaaagaggtgcacagcggcgtgtctaccgacccccagccactgaaagaacagcccgccctgaacgacagccggtactgcctgagcagcagactgagagtgtccgccaccttctggcagaacccccggaaccacttcagatgccaggtgcagttctacggcctgagcgagaacgacgagtggacccaggacagagccaagcccgtgacccagatcgtgtctgccgaagcctggggcagagccgatgatgtgattaagatccactggcaggaaaagaagtccaacaccatcctgggcagccaggaaggcaacaccatgaagaccaacgacacctacatgaagttcagctggctgaccgtgcccgagaagtccctggacaaagaacacagatgcatcgtgcggcacgaaaacaacaagaacggcgtggaccaggaaatcatcttcccacccatcaagaccgatgtgattacaatggaccccaaggacaactgctccaaggacgccaacgataccctgctgctccagctgaccaacaccagcgcctactacatgtacttgttgctgctgctgaagtccgtggtgtacttcgccatcatcacatgctgcctgctgcggagaaccgccttctgctgcaacggcgagaagtctagggccaagcgatctggatctggagcaacaaacttctcactactcaaacaagcaggtgacgtggaggagaatcccgggcctactagcatggccttaccagtgaccgccttgctcctgccgctggccttgctgctccacgccgccaggccggacatccagatgacacagagccctagcagcctgtctgccagcgtgggagacagagtgaccatcacatgcaagagcagccagagcctgctggactccgatggcaagacctacctgaactggtatcagcagaagcccggcaaggcccctaagctgctgatctacctggtgtccaagctggatagcggcgtgcccagcagattttctggcagcggcagcggaaccgacttcaccctgacaatatccagcctccagcctgaggacttcgccacctactactgctggcaaggcacccactttccattcaccttcggccagggcaccaaggtggaaatcaaaagaggcggaggcggaagtggaggcggaggatctggcggcggaggctctgaagtgcagctggttgaatcaggcggaggactggttcagcctggcggatctctgagactgtcttgtgccgccagcggctacaccttcaccagctactggatgaactgggtccgacaggcccctggcaaaggactggaatgggtcggaatgatcgaccccagcgacagcgagacacactacaaccacatcttcaaggaccgcttcaccatcagcgccgacaccagcaagaataccgcctacctccagatgaactccctgagagccgaggacaccgccgtgtactactgcgccagaaacctgtatctgttcggccagggaaccctggtcacagtgtcatctacgcgtatccagaaccctgatcctgccgtgtaccagctgcgggatagcaagagcagcgacaagagcgtgtgtctgttcaccgacttcgacagccagaccaacgtgtcccagagcaaggactccgacgtgtacatcaccgataagaccgtgctggacatgcggagcatggacttcaagagcaactccgccgtggcctggtccaacaagtccgatttcgcctgcgccaacgccttcaacaacagcattatccccgaggacacattcttcccaagccccgagagcagcgactccaccgaccacgtgaagcccaaagagacagagaacaccaagcagcccagcaagagctgccacaagcccaaggccatcgtgcacaccgagaaagtgaacatgatgagcctgaccgtgctgggcctgcggatgctgttcgccaaaaccgtggccgtgaacttcctgctgaccgccaagctgttcttcctccgcgccaagagaagcggatctggcgtgaagcagaccctgaatttcgacctgctgaagctggctggcgacgtggaatccaacccaggcccttctagaggccatatgaccgagtacaagcccacggtgcgcctcgccacccgcgacgacgtccccagggccgtacgcaccctcgccgccgcgttcgccgactaccccgccacgcgccacaccgtcgatccggaccgccacatcgagcgggtcaccgagctgcaagaactcttcctcacgcgcgtcgggctcgacatcggcaaggtgtgggtcgcggacgacggcgccgcggtggcggtctggaccacgccggagagcgtcgaagcgggggcggtgttcgccgagatcggcccgcgcatggccgagttgagcggttcccggctggccgcgcagcaacagatggaaggcctcctggcgccgcaccggcccaaggagcccgcgtggttcctggccaccgtcggcgtctcgcccgaccaccagggcaagggtctgggcagcgccgtcgtgctccccggagtggaggcggccgagcgcgccggggtgcccgccttcctggagacctccgcgccccgcaacctccccttctacgagcggctcggcttcaccgtcaccgccgacgtcgaggtgcccgaaggaccgcgcacctggtgcatgacccgcaagcccggtgcctga

SEQ ID NO: 36799 - DNA, 2913 bp, synthetic construct
  source 1..2913: mol_type = other DNA
atggccttaccagtgaccgccttgctcctgccgctggccttgctgctccacgccgccaggccgctcgagatccagaaccctgatcctgccgtgtaccagctgcgggatagcaagagcagcgacaagagcgtgtgtctgttcaccgacttcgacagccagaccaacgtgtcccagagcaaggactccgacgtgtacatcaccgataagaccgtgctggacatgcggagcatggacttcaagagcaactccgccgtggcctggtccaacaagtccgatttcgcctgcgccaacgccttcaacaacagcattatccccgaggacacattcttcccaagccccgagagcagcgactccaccgaccacgtgaagcccaaagagacagagaacaccaagcagcccagcaagagctgccacaagcccaaggccatcgtgcacaccgagaaagtgaacatgatgagcctgaccgtgctgggcctgcggatgctgttcgccaaaaccgtggccgtgaacttcctgctgaccgccaagctgttcttcctcagggccaagcgatctggatctggagcaacaaacttctcactactcaaacaagcaggtgacgtggaggagaatcccgggcctactagcatggccttaccagtgaccgccttgctcctgccgctggccttgctgctccacgccgccaggccggacatccagatgacacagagccctagcagcctgtctgccagcgtgggagacagagtgaccatcacatgcaagagcagccagagcctgctggactccgatggcaagacctacctgaactggtatcagcagaagcccggcaaggcccctaagctgctgatctacctggtgtccaagctggatagcggcgtgcccagcagattttctggcagcggcagcggaaccgacttcaccctgacaatatccagcctccagcctgaggacttcgccacctactactgctggcaaggcacccactttccattcaccttcggccagggcaccaaggtggaaatcaaaagaggcggaggcggaagtggaggcggaggatctggcggcggaggctctgaagtgcagctggttgaatcaggcggaggactggttcagcctggcggatctctgagactgtcttgtgccgccagcggctacaccttcaccagctactggatgaactgggtccgacaggcccctggcaaaggactggaatgggtcggaatgatcgaccccagcgacagcgagacacactacaaccacatcttcaaggaccgcttcaccatcagcgccgacaccagcaagaataccgcctacctccagatgaactccctgagagccgaggacaccgccgtgtactactgcgccagaaacctgtatctgttcggccagggaaccctggtcacagtgtcatctacgcgtgaggacctgaagaacgtgttcccacctgaggtggccgtgttcgagcctagcgaggccgagatcagccacacccagaaagccaccctcgtgtgcctggctaccggcttctaccccgaccatgtggaactgtcttggtgggtcaacggcaaagaggtgcacagcggcgtgtctaccgacccccagccactgaaagaacagcccgccctgaacgacagccggtactgcctgagcagcagactgagagtgtccgccaccttctggcagaacccccggaaccacttcagatgccaggtgcagttctacggcctgagcgagaacgacgagtggacccaggacagagccaagcccgtgacccagatcgtgtctgccgaagcctggggcagagccgatgatgtgattaagatccactggcaggaaaagaagtccaacaccatcctgggcagccaggaaggcaacaccatgaagaccaacgacacctacatgaagttcagctggctgaccgtgcccgagaagtccctggacaaagaacacagatgcatcgtgcggcacgaaaacaacaagaacggcgtggaccaggaaatcatcttcccacccatcaagaccgatgtgattacaatggaccccaaggacaactgctccaaggacgccaacgataccctgctgctccagctgaccaacaccagcgcctactacatgtacttgttgctgctgctgaagtccgtggtgtacttcgccatcatcacatgctgcctgctgcggagaaccgccttctgctgcaacggcgagaagtctcgcgccaagagaagcggatctggcgtgaagcagaccctgaatttcgacctgctgaagctggctggcgacgtggaatccaacccaggcccttctagaggccatatgaccgagtacaagcccacggtgcgcctcgccacccgcgacgacgtccccagggccgtacgcaccctcgccgccgcgttcgccgactaccccgccacgcgccacaccgtcgatccggaccgccacatcgagcgggtcaccgagctgcaagaactcttcctcacgcgcgtcgggctcgacatcggcaaggtgtgggtcgcggacgacggcgccgcggtggcggtctggaccacgccggagagcgtcgaagcgggggcggtgttcgccgagatcggcccgcgcatggccgagttgagcggttcccggctggccgcgcagcaacagatggaaggcctcctggcgccgcaccggcccaaggagcccgcgtggttcctggccaccgtcggcgtctcgcccgaccaccagggcaagggtctgggcagcgccgtcgtgctccccggagtggaggcggccgagcgcgccggggtgcccgccttcctggagacctccgcgccccgcaacctccccttctacgagcggctcggcttcaccgtcaccgccgacgtcgaggtgcccgaaggaccgcgcacctggtgcatgacccgcaagcccggtgcctga

SEQ ID NO: 36800 - DNA, 2607 bp, synthetic construct
  source 1..2607: mol_type = other DNA
atggccttaccagtgaccgccttgctcctgccgctggccttgctgctccacgccgccaggccgctcgaggaggacctgaagaacgtgttcccacctgaggtggccgtgttcgagcctagcaaggccgagatcgcccacacccagaaagccaccctcgtgtgcctggctaccggcttctaccccgaccatgtggaactgtcttggtgggtcaacggcaaagaggtgcacagcggcgtgtgtaccgacccccagccactgaaagaacagcccgccctgaacgacagccggtactgcctgagcagcagactgagagtgtccgccaccttctggcagaacccccggaaccacttcagatgccaggtgcagttctacggcctgagcgagaacgacgagtggacccaggacagagccaagcccgtgacccagatcgtgtctgccgaagcctggggcagagccgattgcggcatcaccagcgccagctaccaccagggcgtgctgagcgccaccatcctgtacgagatcctgctgggcaaggccaccctgtacgccgtgctggtgtctgccctggtgctgatggctatggtcaagcggaaggacagccggggaagggccaagcgatctggatctggagcaacaaacttctcactactcaaacaagcaggtgacgtggaggagaatcccgggcctactagcatggccttaccagtgaccgccttgctcctgccgctggccttgctgctccacgccgccaggccggacatccagatgacacagagccctagcagcctgtctgccagcgtgggagacagagtgaccatcacatgcaagagcagccagagcctgctggactccgatggcaagacctacctgaactggtatcagcagaagcccggcaaggcccctaagctgctgatctacctggtgtccaagctggatagcggcgtgcccagcagattttctggcagcggcagcggaaccgacttcaccctgacaatatccagcctccagcctgaggacttcgccacctactactgctggcaaggcacccactttccattcaccttcggccagggcaccaaggtggaaatcaaaagaggcggaggcggaagtggaggcggaggatctggcggcggaggctctgaagtgcagctggttgaatcaggcggaggactggttcagcctggcggatctctgagactgtcttgtgccgccagcggctacaccttcaccagctactggatgaactgggtccgacaggcccctggcaaaggactggaatgggtcggaatgatcgaccccagcgacagcgagacacactacaaccacatcttcaaggaccgcttcaccatcagcgccgacaccagcaagaataccgcctacctccagatgaactccctgagagccgaggacaccgccgtgtactactgcgccagaaacctgtatctgttcggccagggaaccctggtcacagtgtcatctacgcgtatccagaaccctgatcctgccgtgtaccagctgcgggatagcaagagcagcgacaagagcgtgtgtctgttcaccgacttcgacagccagaccaacgtgtcccagagcaaggactccgacgtgtacatcaccgataagtgcgtgctggacatgcggagcatggacttcaagagcaactccgccgtggcctggtccaacaagtccgatttcgcctgcgccaacgccttcaacaacagcattatccccgaggacacattcttcccaagcagcgacgtgccctgcgacgtgaagctggtggaaaagagcttcgagacagacaccaacctgaacttccagaacctgagcgtgatcggcttcagaatcctgctgctgaaagtggccggctttaacctgctgatgaccctgcggctgtggtccagccgcgccaagagaagcggatctggcgtgaagcagaccctgaatttcgacctgctgaagctggctggcgacgtggaatccaacccaggcccttctagaggccatatgaccgagtacaagcccacggtgcgcctcgccacccgcgacgacgtccccagggccgtacgcaccctcgccgccgcgttcgccgactaccccgccacgcgccacaccgtcgatccggaccgccacatcgagcgggtcaccgagctgcaagaactcttcctcacgcgcgtcgggctcgacatcggcaaggtgtgggtcgcggacgacggcgccgcggtggcggtctggaccacgccggagagcgtcgaagcgggggcggtgttcgccgagatcggcccgcgcatggccgagttgagcggttcccggctggccgcgcagcaacagatggaaggcctcctggcgccgcaccggcccaaggagcccgcgtggttcctggccaccgtcggcgtctcgcccgaccaccagggcaagggtctgggcagcgccgtcgtgctccccggagtggaggcggccgagcgcgccggggtgcccgccttcctggagacctccgcgccccgcaacctccccttctacgagcggctcggcttcaccgtcaccgccgacgtcgaggtgcccgaaggaccgcgcacctggtgcatgacccgcaagcccggtgcctga

SEQ ID NO: 36801 - DNA, 2607 bp, synthetic construct
  source 1..2607: mol_type = other DNA
atggccttaccagtgaccgccttgctcctgccgctggccttgctgctccacgccgccaggccgctcgagatccagaaccctgatcctgccgtgtaccagctgcgggatagcaagagcagcgacaagagcgtgtgtctgttcaccgacttcgacagccagaccaacgtgtcccagagcaaggactccgacgtgtacatcaccgataagtgcgtgctggacatgcggagcatggacttcaagagcaactccgccgtggcctggtccaacaagtccgatttcgcctgcgccaacgccttcaacaacagcattatccccgaggacacattcttcccaagcagcgacgtgccctgcgacgtgaagctggtggaaaagagcttcgagacagacaccaacctgaacttccagaacctgagcgtgatcggcttcagaatcctgctgctgaaagtggccggctttaacctgctgatgaccctgcggctgtggtccagcagggccaagcgatctggatctggagcaacaaacttctcactactcaaacaagcaggtgacgtggaggagaatcccgggcctactagcatggccttaccagtgaccgccttgctcctgccgctggccttgctgctccacgccgccaggccggacatccagatgacacagagccctagcagcctgtctgccagcgtgggagacagagtgaccatcacatgcaagagcagccagagcctgctggactccgatggcaagacctacctgaactggtatcagcagaagcccggcaaggcccctaagctgctgatctacctggtgtccaagctggatagcggcgtgcccagcagattttctggcagcggcagcggaaccgacttcaccctgacaatatccagcctccagcctgaggacttcgccacctactactgctggcaaggcacccactttccattcaccttcggccagggcaccaaggtggaaatcaaaagaggcggaggcggaagtggaggcggaggatctggcggcggaggctctgaagtgcagctggttgaatcaggcggaggactggttcagcctggcggatctctgagactgtcttgtgccgccagcggctacaccttcaccagctactggatgaactgggtccgacaggcccctggcaaaggactggaatgggtcggaatgatcgaccccagcgacagcgagacacactacaaccacatcttcaaggaccgcttcaccatcagcgccgacaccagcaagaataccgcctacctccagatgaactccctgagagccgaggacaccgccgtgtactactgcgccagaaacctgtatctgttcggccagggaaccctggtcacagtgtcatctacgcgtgaggacctgaagaacgtgttcccacctgaggtggccgtgttcgagcctagcaaggccgagatcgcccacacccagaaagccaccctcgtgtgcctggctaccggcttctaccccgaccatgtggaactgtcttggtgggtcaacggcaaagaggtgcacagcggcgtgtgtaccgacccccagccactgaaagaacagcccgccctgaacgacagccggtactgcctgagcagcagactgagagtgtccgccaccttctggcagaacccccggaaccacttcagatgccaggtgcagttctacggcctgagcgagaacgacgagtggacccaggacagagccaagcccgtgacccagatcgtgtctgccgaagcctggggcagagccgattgcggcatcaccagcgccagctaccaccagggcgtgctgagcgccaccatcctgtacgagatcctgctgggcaaggccaccctgtacgccgtgctggtgtctgccctggtgctgatggctatggtcaagcggaaggacagccggggacgcgccaagagaagcggatctggcgtgaagcagaccctgaatttcgacctgctgaagctggctggcgacgtggaatccaacccaggcccttctagaggccatatgaccgagtacaagcccacggtgcgcctcgccacccgcgacgacgtccccagggccgtacgcaccctcgccgccgcgttcgccgactaccccgccacgcgccacaccgtcgatccggaccgccacatcgagcgggtcaccgagctgcaagaactcttcctcacgcgcgtcgggctcgacatcggcaaggtgtgggtcgcggacgacggcgccgcggtggcggtctggaccacgccggagagcgtcgaagcgggggcggtgttcgccgagatcggcccgcgcatggccgagttgagcggttcccggctggccgcgcagcaacagatggaaggcctcctggcgccgcaccggcccaaggagcccgcgtggttcctggccaccgtcggcgtctcgcccgaccaccagggcaagggtctgggcagcgccgtcgtgctccccggagtggaggcggccgagcgcgccggggtgcccgccttcctggagacctccgcgccccgcaacctccccttctacgagcggctcggcttcaccgtcaccgccgacgtcgaggtgcccgaaggaccgcgcacctggtgcatgacccgcaagcccggtgcctga

SEQ ID NO: 36802 - DNA, 2286 bp, synthetic construct
  source 1..2286: mol_type = other DNA
atggccttaccagtgaccgccttgctcctgccgctggccttgctgctccacgccgccaggccgctcgagcagagttttgggttgttggaccctaaattgtgctatctgttggacggaatcctgttcatttacggagtgatcctgaccgcattgttcctgcgggttaagttttccagatccgcagacgcacccgcttaccaacaagggcagaaccaactctacaatgaacttaatttggggcggagggaagagtacgacgttctggacaaaaggaggggacgagatcccgagatgggcggaaagcctcagcgaaggaagaatccgcaagaggggctttataacgaactccagaaagataaaatggcagaagcctatagtgagattgggatgaagggagaaaggaggaggggtaaaggtcacgatgggttgtaccaaggattgagcacagccactaaagatacctatgatgcgctccacatgcaggccctgccgccaagaagggccaagcgatctggatctggagcaacaaacttctcactactcaaacaagcaggtgacgtggaggagaatcccgggcctactagcatggccttaccagtgaccgccttgctcctgccgctggccttgctgctccacgccgccaggccggacatccagatgacacagagccctagcagcctgtctgccagcgtgggagacagagtgaccatcacatgcaagagcagccagagcctgctggactccgatggcaagacctacctgaactggtatcagcagaagcccggcaaggcccctaagctgctgatctacctggtgtccaagctggatagcggcgtgcccagcagattttctggcagcggcagcggaaccgacttcaccctgacaatatccagcctccagcctgaggacttcgccacctactactgctggcaaggcacccactttccattcaccttcggccagggcaccaaggtggaaatcaaaagaggcggaggcggaagtggaggcggaggatctggcggcggaggctctgaagtgcagctggttgaatcaggcggaggactggttcagcctggcggatctctgagactgtcttgtgccgccagcggctacaccttcaccagctactggatgaactgggtccgacaggcccctggcaaaggactggaatgggtcggaatgatcgaccccagcgacagcgagacacactacaaccacatcttcaaggaccgcttcaccatcagcgccgacaccagcaagaataccgcctacctccagatgaactccctgagagccgaggacaccgccgtgtactactgcgccagaaacctgtatctgttcggccagggaaccctggtcacagtgtcatctacgcgtgagctgggagagcctcagctgtgctatatcctggacgccatcctgtttctgtacggcatcgtgctgaccctgctgtactgccggctgaagatccaagtgcggaaggccgccatcaccagctacgagaaatccgacggcgtgtacaccggcctgagcaccagaaatcaagagacatacgagacactgaagcacgaaaagcctccacaacgcgccaagagaagcggatctggcgtgaagcagaccctgaatttcgacctgctgaagctggctggcgacgtggaatccaacccaggcccttctagaggccatatgaccgagtacaagcccacggtgcgcctcgccacccgcgacgacgtccccagggccgtacgcaccctcgccgccgcgttcgccgactaccccgccacgcgccacaccgtcgatccggaccgccacatcgagcgggtcaccgagctgcaagaactcttcctcacgcgcgtcgggctcgacatcggcaaggtgtgggtcgcggacgacggcgccgcggtggcggtctggaccacgccggagagcgtcgaagcgggggcggtgttcgccgagatcggcccgcgcatggccgagttgagcggttcccggctggccgcgcagcaacagatggaaggcctcctggcgccgcaccggcccaaggagcccgcgtggttcctggccaccgtcggcgtctcgcccgaccaccagggcaagggtctgggcagcgccgtcgtgctccccggagtggaggcggccgagcgcgccggggtgcccgccttcctggagacctccgcgccccgcaacctccccttctacgagcggctcggcttcaccgtcaccgccgacgtcgaggtgcccgaaggaccgcgcacctggtgcatgacccgcaagcccggtgcctga

SEQ ID NO: 36803 - DNA, 2919 bp, synthetic construct; identical to SEQ ID NO: 36794
  source 1..2919: mol_type = other DNA

SEQ ID NO: 36804 - DNA, 2919 bp, synthetic construct; identical to SEQ ID NO: 36795
  source 1..2919: mol_type = other DNA

SEQ ID NO: 36805 - DNA, 2916 bp, synthetic construct
  source 1..2916: mol_type = other DNA
atggccttaccagtgaccgccttgctcctgccgctggccttgctgctccacgccgccaggccgctcgaggaggaggacctgaagaacgtgttcccacctgaggtggccgtgttcgagcctagcgaggccgagatcagccacacccagaaagccaccctcgtgtgcctggctaccggcttctaccccgaccatgtggaactgtcttggtgggtcaacggcaaagaggtgcacagcggcgtgtgtaccgacccccagccactgaaagaacagcccgccctgaacgacagccggtactgcctgagcagcagactgagagtgtccgccaccttctggcagaacccccggaaccacttcagatgccaggtgcagttctacggcctgagcgagaacgacgagtggacccaggacagagccaagcccgtgacccagatcgtgtctgccgaagcctggggcagagccgatgatgtgattaagatccactggcaggaaaagaagtccaacaccatcctgggcagccaggaaggcaacaccatgaagaccaacgacacctacatgaagttcagctggctgaccgtgcccgagaagtccctggacaaagaacacagatgcatcgtgcggcacgaaaacaacaagaacggcgtggaccaggaaatcatcttcccacccatcaagaccgatgtgattacaatggaccccaaggacaactgctccaaggacgccaacgataccctgctgctccagctgaccaacaccagcgcctactacatgtacttgttgctgctgctgaagtccgtggtgtacttcgccatcatcacatgctgcctgctgcggagaaccgccttctgctgcaacggcgagaagtctagggccaagcgatctggatctggagcaacaaacttctcactactcaaacaagcaggtgacgtggaggagaatcccgggcctactagcatggccttaccagtgaccgccttgctcctgccgctggccttgctgctccacgccgccaggccggacatccagatgacacagagccctagcagcctgtctgccagcgtgggagacagagtgaccatcacatgcaagagcagccagagcctgctggactccgatggcaagacctacctgaactggtatcagcagaagcccggcaaggcccctaagctgctgatctacctggtgtccaagctggatagcggcgtgcccagcagattttctggcagcggcagcggaaccgacttcaccctgacaatatccagcctccagcctgaggacttcgccacctactactgctggcaaggcacccactttccattcaccttcggccagggcaccaaggtggaaatcaaaagaggcggaggcggaagtggaggcggaggatctggcggcggaggctctgaagtgcagctggttgaatcaggcggaggactggttcagcctggcggatctctgagactgtcttgtgccgccagcggctacaccttcaccagctactggatgaactgggtccgacaggcccctggcaaaggactggaatgggtcggaatgatcgaccccagcgacagcgagacacactacaaccacatcttcaaggaccgcttcaccatcagcgccgacaccagcaagaataccgcctacctccagatgaactccctgagagccgaggacaccgccgtgtactactgcgccagaaacctgtatctgttcggccagggaaccctggtcacagtgtcatctacgcgtatccagaaccctgatcctgccgtgtaccagctgcgggatagcaagagcagcgacaagagcgtgtgtctgttcaccgacttcgacagccagaccaacgtgtcccagagcaaggactccgacgtgtacatcaccgataagtgcgtgctggacatgcggagcatggacttcaagagcaactccgccgtggcctggtccaacaagtccgatttcgcctgcgccaacgccttcaacaacagcattatccccgaggacacattcttcccaagccccgagagcagcgactccaccgaccacgtgaagcccaaagagacagagaacaccaagcagcccagcaagagctgccacaagcccaaggccatcgtgcacaccgagaaagtgaacatgatgagcctgaccgtgctgggcctgcggatgctgttcgccaaaaccgtggccgtgaacttcctgctgaccgccaagctgttcttcctccgcgccaagagaagcggatctggcgtgaagcagaccctgaatttcgacctgctgaagctggctggcgacgtggaatccaacccaggcccttctagaggccatatgaccgagtacaagcccacggtgcgcctcgccacccgcgacgacgtccccagggccgtacgcaccctcgccgccgcgttcgccgactaccccgccacgcgccacaccgtcgatccggaccgccacatcgagcgggtcaccgagctgcaagaactcttcctcacgcgcgtcgggctcgacatcggcaaggtgtgggtcgcggacgacggcgccgcggtggcggtctggaccacgccggagagcgtcgaagcgggggcggtgttcgccgagatcggcccgcgcatggccgagttgagcggttcccggctggccgcgcagcaacagatggaaggcctcctggcgccgcaccggcccaaggagcccgcgtggttcctggccaccgtcggcgtctcgcccgaccaccagggcaagggtctgggcagcgccgtcgtgctccccggagtggaggcggccgagcgcgccggggtgcccgccttcctggagacctccgcgccccgcaacctccccttctacgagcggctcggcttcaccgtcaccgccgacgtcgaggtgcccgaaggaccgcgcacctggtgcatgacccgcaagcccggtgcctga

SEQ ID NO: 36806 - DNA, 2916 bp, synthetic construct
  source 1..2916: mol_type = other DNA
atggccttaccagtgaccgccttgctcctgccgctggccttgctgctccacgccgccaggccgctcgagatccagaaccctgatcctgccgtgtaccagctgcgggatagcaagagcagcgacaagagcgtgtgtctgttcaccgacttcgacagccagaccaacgtgtcccagagcaaggactccgacgtgtacatcaccgataagtgcgtgctggacatgcggagcatggacttcaagagcaactccgccgtggcctggtccaacaagtccgatttcgcctgcgccaacgccttcaacaacagcattatccccgaggacacattcttcccaagccccgagagcagcgactccaccgaccacgtgaagcccaaagagacagagaacaccaagcagcccagcaagagctgccacaagcccaaggccatcgtgcacaccgagaaagtgaacatgatgagcctgaccgtgctgggcctgcggatgctgttcgccaaaaccgtggccgtgaacttcctgctgaccgccaagctgttcttcctcagggccaagcgatctggatctggagcaacaaacttctcactactcaaacaagcaggtgacgtggaggagaatcccgggcctactagcatggccttaccagtgaccgccttgctcctgccgctggccttgctgctccacgccgccaggccggacatccagatgacacagagccctagcagcctgtctgccagcgtgggagacagagtgaccatcacatgcaagagcagccagagcctgctggactccgatggcaagacctacctgaactggtatcagcagaagcccggcaaggcccctaagctgctgatctacctggtgtccaagctggatagcggcgtgcccagcagattttctggcagcggcagcggaaccgacttcaccctgacaatatccagcctccagcctgaggacttcgccacctactactgctggcaaggcacccactttccattcaccttcggccagggcaccaaggtggaaatcaaaagaggcggaggcggaagtggaggcggaggatctggcggcggaggctctgaagtgcagctggttgaatcaggcggaggactggttcagcctggcggatctctgagactgtcttgtgccgccagcggctacaccttcaccagctactggatgaactgggtccgacaggcccctggcaaaggactggaatgggtcggaatgatcgaccccagcgacagcgagacacactacaaccacatcttcaaggaccgcttcaccatcagcgccgacaccagcaagaataccgcctacctccagatgaactccctgagagccgaggacaccgccgtgtactactgcgccagaaacctgtatctgttcggccagggaaccctggtcacagtgtcatctacgcgtgaggaggacctgaagaacgtgttcccacctgaggtggccgtgttcgagcctagcgaggccgagatcagccacacccagaaagccaccctcgtgtgcctggctaccggcttctaccccgaccatgtggaactgtcttggtgggtcaacggcaaagaggtgcacagcggcgtgtgtaccgacccccagccactgaaagaacagcccgccctgaacgacagccggtactgcctgagcagcagactgagagtgtccgccaccttctggcagaacccccggaaccacttcagatgccaggtgcagttctacggcctgagcgagaacgacgagtggacccaggacagagccaagcccgtgacccagatcgtgtctgccgaagcctggggcagagccgatgatgtgattaagatccactggcaggaaaagaagtccaacaccatcctgggcagccaggaaggcaacaccatgaagaccaacgacacctacatgaagttcagctggctgaccgtgcccgagaagtccctggacaaagaacacagatgcatcgtgcggcacgaaaacaacaagaacggcgtggaccaggaaatcatcttcccacccatcaagaccgatgtgattacaatggaccccaaggacaactgctccaaggacgccaacgataccctgctgctccagctgaccaacaccagcgcctactacatgtacttgttgctgctgctgaagtccgtggtgtacttcgccatcatcacatgctgcctgctgcggagaaccgccttctgctgcaacggcgagaagtctcgcgccaagagaagcggatctggcgtgaagcagaccctgaatttcgacctgctgaagctggctggcgacgtggaatccaacccaggcccttctagaggccatatgaccgagtacaagcccacggtgcgcctcgccacccgcgacgacgtccccagggccgtacgcaccctcgccgccgcgttcgccgactaccccgccacgcgccacaccgtcgatccggaccgccacatcgagcgggtcaccgagctgcaagaactcttcctcacgcgcgtcgggctcgacatcggcaaggtgtgggtcgcggacgacggcgccgcggtggcggtctggaccacgccggagagcgtcgaagcgggggcggtgttcgccgagatcggcccgcgcatggccgagttgagcggttcccggctggccgcgcagcaacagatggaaggcctcctggcgccgcaccggcccaaggagcccgcgtggttcctggccaccgtcggcgtctcgcccgaccaccagggcaagggtctgggcagcgccgtcgtgctccccggagtggaggcggccgagcgcgccggggtgcccgccttcctggagacctccgcgccccgcaacctccccttctacgagcggctcggcttcaccgtcaccgccgacgtcgaggtgcccgaaggaccgcgcacctggtgcatgacccgcaagcccggtgcctga

SEQ ID NO: 36807 - DNA, 2607 bp, synthetic construct
  source 1..2607: mol_type = other DNA
atggccttaccagtgaccgccttgctcctgccgctggccttgctgctccacgccgccaggccgctcgaggaggacctgaagaacgtgttcccacctgaggtggccgtgttcgagcctagcgaggccgagatcagccacacccagaaagccaccctcgtgtgcctggctaccggcttctaccccgaccatgtggaactgtcttggtgggtcaacggcaaagaggtgcacagcggcgtgtctaccgacccccagccactgaaagaacagcccgccctgaacgacagccggtactgcctgagcagcagactgagagtgtccgccaccttctggcagaacccccggaaccacttcagatgccaggtgcagttctacggcctgagcgagaacgacgagtggacccaggacagagccaagcccgtgacccagatcgtgtctgccgaagcctggggcagagccgattgcggctttaccagcgagagctaccagcagggcgtgctgagcgccaccaacctgagcgtgatcggcttcagaatcctgctgctgaaagtggccggctttaacctgctgatgaccctgcggctgtggtccagcagggccaagcgatctggatctggagcaacaaacttctcactactcaaacaagcaggtgacgtggaggagaatcccgggcctactagcatggccttaccagtgaccgccttgctcctgccgctggccttgctgctccacgccgccaggccggacatccagatgacacagagccctagcagcctgtctgccagcgtgggagacagagtgaccatcacatgcaagagcagccagagcctgctggactccgatggcaagacctacctgaactggtatcagcagaagcccggcaaggcccctaagctgctgatctacctggtgtccaagctggatagcggcgtgcccagcagattttctggcagcggcagcggaaccgacttcaccctgacaatatccagcctccagcctgaggacttcgccacctactactgctggcaaggcacccactttccattcaccttcggccagggcaccaaggtggaaatcaaaagaggcggaggcggaagtggaggcggaggatctggcggcggaggctctgaagtgcagctggttgaatcaggcggaggactggttcagcctggcggatctctgagactgtcttgtgccgccagcggctacaccttcaccagctactggatgaactgggtccgacaggcccctggcaaaggactggaatgggtcggaatgatcgaccccagcgacagcgagacacactacaaccacatcttcaaggaccgcttcaccatcagcgccgacaccagcaagaataccgcctacctccagatgaactccctgagagccgaggacaccgccgtgtactactgcgccagaaacctgtatctgttcggccagggaaccctggtcacagtgtcatctacgcgtatccagaaccctgatcctgccgtgtaccagctgcgggatagcaagagcagcgacaagagcgtgtgtctgttcaccgacttcgacagccagaccaacgtgtcccagagcaaggactccgacgtgtacatcaccgataagaccgtgctggacatgcggagcatggacttcaagagcaactccgccgtggcctggtccaacaagtccgatttcgcctgcgccaacgccttcaacaacagcattatccccgaggacacattcttcccaagccccgagagcagctgcgacgtgaagctggtggaaaagagcttcgagacagacaccaacctgaacttccagatcctgtacgagatcctgctgggcaaggccaccctgtacgccgtgctggtgtctgccctggtgctgatggctatggtcaagcggaaggacagccggggacgcgccaagagaagcggatctggcgtgaagcagaccctgaatttcgacctgctgaagctggctggcgacgtggaatccaacccaggcccttctagaggccatatgaccgagtacaagcccacggtgcgcctcgccacccgcgacgacgtccccagggccgtacgcaccctcgccgccgcgttcgccgactaccccgccacgcgccacaccgtcgatccggaccgccacatcgagcgggtcaccgagctgcaagaactcttcctcacgcgcgtcgggctcgacatcggcaaggtgtgggtcgcggacgacggcgccgcggtggcggtctggaccacgccggagagcgtcgaagcgggggcggtgttcgccgagatcggcccgcgcatggccgagttgagcggttcccggctggccgcgcagcaacagatggaaggcctcctggcgccgcaccggcccaaggagcccgcgtggttcctggccaccgtcggcgtctcgcccgaccaccagggcaagggtctgggcagcgccgtcgtgctccccggagtggaggcggccgagcgcgccggggtgcccgccttcctggagacctccgcgccccgcaacctccccttctacgagcggctcggcttcaccgtcaccgccgacgtcgaggtgcccgaaggaccgcgcacctggtgcatgacccgcaagcccggtgcctga

SEQ ID NO: 36808 - DNA, 2607 bp, synthetic construct
  source 1..2607: mol_type = other DNA
atggccttaccagtgaccgccttgctcctgccgctggccttgctgctccacgccgccaggccgctcgagatccagaaccctgatcctgccgtgtaccagctgcgggatagcaagagcagcgacaagagcgtgtgtctgttcaccgacttcgacagccagaccaacgtgtcccagagcaaggactccgacgtgtacatcaccgataagaccgtgctggacatgcggagcatggacttcaagagcaactccgccgtggcctggtccaacaagtccgatttcgcctgcgccaacgccttcaacaacagcattatccccgaggacacattcttcccaagccccgagagcagctgcgacgtgaagctggtggaaaagagcttcgagacagacaccaacctgaacttccagatcctgtacgagatcctgctgggcaaggccaccctgtacgccgtgctggtgtctgccctggtgctgatggctatggtcaagcggaaggacagccggggaagggccaagcgatctggatctggagcaacaaacttctcactactcaaacaagcaggtgacgtggaggagaatcccgggcctactagcatggccttaccagtgaccgccttgctcctgccgctggccttgctgctccacgccgccaggccggacatccagatgacacagagccctagcagcctgtctgccagcgtgggagacagagtgaccatcacatgcaagagcagccagagcctgctggactccgatggcaagacctacctgaactggtatcagcagaagcccggcaaggcccctaagctgctgatctacctggtgtccaagctggatagcggcgtgcccagcagattttctggcagcggcagcggaaccgacttcaccctgacaatatccagcctccagcctgaggacttcgccacctactactgctggcaaggcacccactttccattcaccttcggccagggcaccaaggtggaaatcaaaagaggcggaggcggaagtggaggcggaggatctggcggcggaggctctgaagtgcagctggttgaatcaggcggaggactggttcagcctggcggatctctgagactgtcttgtgccgccagcggctacaccttcaccagctactggatgaactgggtccgacaggcccctggcaaaggactggaatgggtcggaatgatcgaccccagcgacagcgagacacactacaaccacatcttcaaggaccgcttcaccatcagcgccgacaccagcaagaataccgcctacctccagatgaactccctgagagccgaggacaccgccgtgtactactgcgccagaaacctgtatctgttcggccagggaaccctggtcacagtgtcatctacgcgtgaggacctgaagaacgtgttcccacctgaggtggccgtgttcgagcctagcgaggccgagatcagccacacccagaaagccaccctcgtgtgcctggctaccggcttctaccccgaccatgtggaactgtcttggtgggtcaacggcaaagaggtgcacagcggcgtgtctaccgacccccagccactgaaagaacagcccgccctgaacgacagccggtactgcctgagcagcagactgagagtgtccgccaccttctggcagaacccccggaaccacttcagatgccaggtgcagttctacggcctgagcgagaacgacgagtggacccaggacagagccaagcccgtgacccagatcgtgtctgccgaagcctggggcagagccgattgcggctttaccagcgagagctaccagcagggcgtgctgagcgccaccaacctgagcgtgatcggcttcagaatcctgctgctgaaagtggccggctttaacctgctgatgaccctgcggctgtggtccagccgcgccaagagaagcggatctggcgtgaagcagaccctgaatttcgacctgctgaagctggctggcgacgtggaatccaacccaggcccttctagaggccatatgaccgagtacaagcccacggtgcgcctcgccacccgcgacgacgtccccagggccgtacgcaccctcgccgccgcgttcgccgactaccccgccacgcgccacaccgtcgatccggaccgccacatcgagcgggtcaccgagctgcaagaactcttcctcacgcgcgtcgggctcgacatcggcaaggtgtgggtcgcggacgacggcgccgcggtggcggtctggaccacgccggagagcgtcgaagcgggggcggtgttcgccgagatcggcccgcgcatggccgagttgagcggttcccggctggccgcgcagcaacagatggaaggcctcctggcgccgcaccggcccaaggagcccgcgtggttcctggccaccgtcggcgtctcgcccgaccaccagggcaagggtctgggcagcgccgtcgtgctccccggagtggaggcggccgagcgcgccggggtgcccgccttcctggagacctccgcgccccgcaacctccccttctacgagcggctcggcttcaccgtcaccgccgacgtcgaggtgcccgaaggaccgcgcacctggtgcatgacccgcaagcccggtgcctga

SEQ ID NO: 36809 - DNA, 2607 bp, synthetic construct
  source 1..2607: mol_type = other DNA
atggccttaccagtgaccgccttgctcctgccgctggccttgctgctccacgccgccaggccgctcgaggaggacctgaagaacgtgttcccacctgaggtggccgtgttcgagcctagcgaggccgagatcagccacacccagaaagccaccctcgtgtgcctggctaccggcttctaccccgaccatgtggaactgtcttggtgggtcaacggcaaagaggtgcacagcggcgtgtgtaccgacccccagccactgaaagaacagcccgccctgaacgacagccggtactgcctgagcagcagactgagagtgtccgccaccttctggcagaacccccggaaccacttcagatgccaggtgcagttctacggcctgagcgagaacgacgagtggacccaggacagagccaagcccgtgacccagatcgtgtctgccgaagcctggggcagagccgattgcgacgtgaagctggtggaaaagagcttcgagacagacaccaacctgaacttccagaacctgagcgtgatcggcttcagaatcctgctgctgaaagtggccggctttaacctgctgatgaccctgcggctgtggtccagcagggccaagcgatctggatctggagcaacaaacttctcactactcaaacaagcaggtgacgtggaggagaatcccgggcctactagcatggccttaccagtgaccgccttgctcctgccgctggccttgctgctccacgccgccaggccggacatccagatgacacagagccctagcagcctgtctgccagcgtgggagacagagtgaccatcacatgcaagagcagccagagcctgctggactccgatggcaagacctacctgaactggtatcagcagaagcccggcaaggcccctaagctgctgatctacctggtgtccaagctggatagcggcgtgcccagcagattttctggcagcggcagcggaaccgacttcaccctgacaatatccagcctccagcctgaggacttcgccacctactactgctggcaaggcacccactttccattcaccttcggccagggcaccaaggtggaaatcaaaagaggcggaggcggaagtggaggcggaggatctggcggcggaggctctgaagtgcagctggttgaatcaggcggaggactggttcagcctggcggatctctgagactgtcttgtgccgccagcggctacaccttcaccagctactggatgaactgggtccgacaggcccctggcaaaggactggaatgggtcggaatgatcgaccccagcgacagcgagacacactacaaccacatcttcaaggaccgcttcaccatcagcgccgacaccagcaagaataccgcctacctccagatgaactccctgagagccgaggacaccgccgtgtactactgcgccagaaacctgtatctgttcggccagggaaccctggtcacagtgtcatctacgcgtatccagaaccctgatcctgccgtgtaccagctgcgggatagcaagagcagcgacaagagcgtgtgtctgttcaccgacttcgacagccagaccaacgtgtcccagagcaaggactccgacgtgtacatcaccgataagtgcgtgctggacatgcggagcatggacttcaagagcaactccgccgtggcctggtccaacaagtccgatttcgcctgcgccaacgccttcaacaacagcattatccccgaggacacattcttcccaagccccgagagcagctgcggctttaccagcgagagctaccagcagggcgtgctgagcgccaccatcctgtacgagatcctgctgggcaaggccaccctgtacgccgtgctggtgtctgccctggtgctgatggctatggtcaagcggaaggacagccggggacgcgccaagagaagcggatctggcgtgaagcagaccctgaatttcgacctgctgaagctggctggcgacgtggaatccaacccaggcccttctagaggccatatgaccgagtacaagcccacggtgcgcctcgccacccgcgacgacgtccccagggccgtacgcaccctcgccgccgcgttcgccgactaccccgccacgcgccacaccgtcgatccggaccgccacatcgagcgggtcaccgagctgcaagaactcttcctcacgcgcgtcgggctcgacatcggcaaggtgtgggtcgcggacgacggcgccgcggtggcggtctggaccacgccggagagcgtcgaagcgggggcggtgttcgccgagatcggcccgcgcatggccgagttgagcggttcccggctggccgcgcagcaacagatggaaggcctcctggcgccgcaccggcccaaggagcccgcgtggttcctggccaccgtcggcgtctcgcccgaccaccagggcaagggtctgggcagcgccgtcgtgctccccggagtggaggcggccgagcgcgccggggtgcccgccttcctggagacctccgcgccccgcaacctccccttctacgagcggctcggcttcaccgtcaccgccgacgtcgaggtgcccgaaggaccgcgcacctggtgcatgacccgcaagcccggtgcctga

SEQ ID NO: 36810 - DNA, 2607 bp, synthetic construct
  source 1..2607: mol_type = other DNA
atggccttaccagtgaccgccttgctcctgccgctggccttgctgctccacgccgccaggccgctcgaggaggacctgaagaacgtgttcccacctgaggtggccgtgttcgagcctagcgaggccgagatcagccacacccagaaagccaccctcgtgtgcctggctaccggcttctaccccgaccatgtggaactgtcttggtgggtcaacggcaaagaggtgcacagcggcgtgtctaccgacccccagccactgaaagaacagcccgccctgaacgacagccggtactgcctgagcagcagactgagagtgtccgccaccttctggcagaacccccggaaccacttcagatgccaggtgcagttctacggcctgagcgagaacgacgagtggacccaggacagagccaagcccgtgacccagatcgtgtctgccgaagcctggggcagagccgattgcgacgtgaagctggtggaaaagagcttcgagacagacaccaacctgaacttccagaacctgagcgtgatcggcttcagaatcctgctgctgaaagtggccggctttaacctgctgatgaccctgcggctgtggtccagcagggccaagcgatctggatctggagcaacaaacttctcactactcaaacaagcaggtgacgtggaggagaatcccgggcctactagcatggccttaccagtgaccgccttgctcctgccgctggccttgctgctccacgccgccaggccggacatccagatgacacagagccctagcagcctgtctgccagcgtgggagacagagtgaccatcacatgcaagagcagccagagcctgctggactccgatggcaagacctacctgaactggtatcagcagaagcccggcaaggcccctaagctgctgatctacctggtgtccaagctggatagcggcgtgcccagcagattttctggcagcggcagcggaaccgacttcaccctgacaatatccagcctccagcctgaggacttcgccacctactactgctggcaaggcacccactttccattcaccttcggccagggcaccaaggtggaaatcaaaagaggcggaggcggaagtggaggcggaggatctggcggcggaggctctgaagtgcagctggttgaatcaggcggaggactggttcagcctggcggatctctgagactgtcttgtgccgccagcggctacaccttcaccagctactggatgaactgggtccgacaggcccctggcaaaggactggaatgggtcggaatgatcgaccccagcgacagcgagacacactacaaccacatcttcaaggaccgcttcaccatcagcgccgacaccagcaagaataccgcctacctccagatgaactccctgagagccgaggacaccgccgtgtactactgcgccagaaacctgtatctgttcggccagggaaccctggtcacagtgtcatctacgcgtatccagaaccctgatcctgccgtgtaccagctgcgggatagcaagagcagcgacaagagcgtgtgtctgttcaccgacttcgacagccagaccaacgtgtcccagagcaaggactccgacgtgtacatcaccgataagaccgtgctggacatgcggagcatggacttcaagagcaactccgccgtggcctggtccaacaagtccgatttcgcctgcgccaacgccttcaacaacagcattatccccgaggacacattcttcccaagccccgagagcagctgcggctttaccagcgagagctaccagcagggcgtgctgagcgccaccatcctgtacgagatcctgctgggcaaggccaccctgtacgccgtgctggtgtctgccctggtgctgatggctatggtcaagcggaaggacagccggggacgcgccaagagaagcggatctggcgtgaagcagaccctgaatttcgacctgctgaagctggctggcgacgtggaatccaacccaggcccttctagaggccatatgaccgagtacaagcccacggtgcgcctcgccacccgcgacgacgtccccagggccgtacgcaccctcgccgccgcgttcgccgactaccccgccacgcgccacaccgtcgatccggaccgccacatcgagcgggtcaccgagctgcaagaactcttcctcacgcgcgtcgggctcgacatcggcaaggtgtgggtcgcggacgacggcgccgcggtggcggtctggaccacgccggagagcgtcgaagcgggggcggtgttcgccgagatcggcccgcgcatggccgagttgagcggttcccggctggccgcgcagcaacagatggaaggcctcctggcgccgcaccggcccaaggagcccgcgtggttcctggccaccgtcggcgtctcgcccgaccaccagggcaagggtctgggcagcgccgtcgtgctccccggagtggaggcggccgagcgcgccggggtgcccgccttcctggagacctccgcgccccgcaacctccccttctacgagcggctcggcttcaccgtcaccgccgacgtcgaggtgcccgaaggaccgcgcacctggtgcatgacccgcaagcccggtgcctga

SEQ ID NO: 36811 - DNA, 2916 bp, synthetic construct
  source 1..2916: mol_type = other DNA
atggccttaccagtgaccgccttgctcctgccgctggccttgctgctccacgccgccaggccgctcgaggaggaggacctgaagaacgtgttcccacctgaggtggccgtgttcgagcctagcgaggccgagatcagccacacccagaaagccaccctcgtgtgcctggctaccggcttctaccccgaccatgtggaactgtcttggtgggtcaacggcaaagaggtgcacagcggcgtgtctaccgacccccagccactgaaagaacagcccgccctgaacgacagccggtactgcctgagcagcagactgagagtgtccgccaccttctggcagaacccccggaaccacttcagatgccaggtgcagttctacggcctgagcgagaacgacgagtggacccaggacagagccaagcccgtgacccagatcgtgtctgccgaagcctggggcagagccgatgatgtgattaagatccactggcaggaaaagaagtccaacaccatcctgggcagccaggaaggcaacaccatgaagaccaacgacacctacatgaagttcagctggctgaccgtgcccgagaagtccctggacaaagaacacagatgcatcgtgcggcacgaaaacaacaagaacggcgtggaccaggaaatcatcttcccacccatcaagaccgatgtgattacaatggaccccaaggacaactgctccaaggacgccaacgataccctgctgctccagctgaccaacaccagcgcctactacatgtacttgttgctgctgctgaagtccgtggtgtacttcgccatcatcacatgctgcctgctgcggagaaccgccttctgctgcaacggcgagaagtctagggccaagcgatctggatctggagcaacaaacttctcactactcaaacaagcaggtgacgtggaggagaatcccgggcctactagcatggccttaccagtgaccgccttgctcctgccgctggccttgctgctccacgccgccaggccggacatccagatgacacagagccctagcagcctgtctgccagcgtgggagacagagtgaccatcacatgcaagagcagccagagcctgctggactccgatggcaagacctacctgaactggtatcagcagaagcccggcaaggcccctaagctgctgatctacctggtgtccaagctggatagcggcgtgcccagcagattttctggcagcggcagcggaaccgacttcaccctgacaatatccagcctccagcctgaggacttcgccacctactactgctggcaaggcacccactttccattcaccttcggccagggcaccaaggtggaaatcaaaagaggcggaggcggaagtggaggcggaggatctggcggcggaggctctgaagtgcagctggttgaatcaggcggaggactggttcagcctggcggatctctgagactgtcttgtgccgccagcggctacaccttcaccagctactggatgaactgggtccgacaggcccctggcaaaggactggaatgggtcggaatgatcgaccccagcgacagcgagacacactacaaccacatcttcaaggaccgcttcaccatcagcgccgacaccagcaagaataccgcctacctccagatgaactccctgagagccgaggacaccgccgtgtactactgcgccagaaacctgtatctgttcggccagggaaccctggtcacagtgtcatctacgcgtatccagaaccctgatcctgccgtgtaccagctgcgggatagcaagagcagcgacaagagcgtgtgtctgttcaccgacttcgacagccagaccaacgtgtcccagagcaaggactccgacgtgtacatcaccgataagaccgtgctggacatgcggagcatggacttcaagagcaactccgccgtggcctggtccaacaagtccgatttcgcctgcgccaacgccttcaacaacagcattatccccgaggacacattcttcccaagccccgagagcagcgactccaccgaccacgtgaagcccaaagagacagagaacaccaagcagcccagcaagagctgccacaagcccaaggccatcgtgcacaccgagaaagtgaacatgatgagcctgaccgtgctgggcctgcggatgctgttcgccaaaaccgtggccgtgaacttcctgctgaccgccaagctgttcttcctccgcgccaagagaagcggatctggcgtgaagcagaccctgaatttcgacctgctgaagctggctggcgacgtggaatccaacccaggcccttctagaggccatatgaccgagtacaagcccacggtgcgcctcgccacccgcgacgacgtccccagggccgtacgcaccctcgccgccgcgttcgccgactaccccgccacgcgccacaccgtcgatccggaccgccacatcgagcgggtcaccgagctgcaagaactcttcctcacgcgcgtcgggctcgacatcggcaaggtgtgggtcgcggacgacggcgccgcggtggcggtctggaccacgccggagagcgtcgaagcgggggcggtgttcgccgagatcggcccgcgcatggccgagttgagcggttcccggctggccgcgcagcaacagatggaaggcctcctggcgccgcaccggcccaaggagcccgcgtggttcctggccaccgtcggcgtctcgcccgaccaccagggcaagggtctgggcagcgccgtcgtgctccccggagtggaggcggccgagcgcgccggggtgcccgccttcctggagacctccgcgccccgcaacctccccttctacgagcggctcggcttcaccgtcaccgccgacgtcgaggtgcccgaaggaccgcgcacctggtgcatgacccgcaagcccggtgcctga

SEQ ID NO: 36812 - DNA, 2607 bp, synthetic construct
  source 1..2607: mol_type = other DNA
atggccttaccagtgaccgccttgctcctgccgctggccttgctgctccacgccgccaggccgctcgaggaggacctgaagaacgtgttcccacctgaggtggccgtgttcgagcctagcgaggccgagatcagccacacccagaaagccaccctcgtgtgcctggctaccggcttctaccccgaccatgtggaactgtcttggtgggtcaacggcaaagaggtgcacagcggcgtgtgtaccgacccccagccactgaaagaacagcccgccctgaacgacagccggtactgcctgagcagcagactgagagtgtccgccaccttctggcagaacccccggaaccacttcagatgccaggtgcagttctacggcctgagcgagaacgacgagtggacccaggacagagccaagcccgtgacccagatcgtgtctgccgaagcctggggcagagccgattgcggctttaccagcgagagctaccagcagggcgtgctgagcgccaccaacctgagcgtgatcggcttcagaatcctgctgctgaaagtggccggctttaacctgctgatgaccctgcggctgtggtccagcagggccaagcgatctggatctggagcaacaaacttctcactactcaaacaagcaggtgacgtggaggagaatcccgggcctactagcatggccttaccagtgaccgccttgctcctgccgctggccttgctgctccacgccgccaggccggacatccagatgacacagagccctagcagcctgtctgccagcgtgggagacagagtgaccatcacatgcaagagcagccagagcctgctggactccgatggcaagacctacctgaactggtatcagcagaagcccggcaaggcccctaagctgctgatctacctggtgtccaagctggatagcggcgtgcccagcagattttctggcagcggcagcggaaccgacttcaccctgacaatatccagcctccagcctgaggacttcgccacctactactgctggcaaggcacccactttccattcaccttcggccagggcaccaaggtggaaatcaaaagaggcggaggcggaagtggaggcggaggatctggcggcggaggctctgaagtgcagctggttgaatcaggcggaggactggttcagcctggcggatctctgagactgtcttgtgccgccagcggctacaccttcaccagctactggatgaactgggtccgacaggcccctggcaaaggactggaatgggtcggaatgatcgaccccagcgacagcgagacacactacaaccacatcttcaaggaccgcttcaccatcagcgccgacaccagcaagaataccgcctacctccagatgaactccctgagagccgaggacaccgccgtgtactactgcgccagaaacctgtatctgttcggccagggaaccctggtcacagtgtcatctacgcgtatccagaaccctgatcctgccgtgtaccagctgcgggatagcaagagcagcgacaagagcgtgtgtctgttcaccgacttcgacagccagaccaacgtgtcccagagcaaggactccgacgtgtacatcaccgataagtgcgtgctggacatgcggagcatggacttcaagagcaactccgccgtggcctggtccaacaagtccgatttcgcctgcgccaacgccttcaacaacagcattatccccgaggacacattcttcccaagccccgagagcagctgcgacgtgaagctggtggaaaagagcttcgagacagacaccaacctgaacttccagatcctgtacgagatcctgctgggcaaggccaccctgtacgccgtgctggtgtctgccctggtgctgatggctatggtcaagcggaaggacagccggggacgcgccaagagaagcggatctggcgtgaagcagaccctgaatttcgacctgctgaagctggctggcgacgtggaatccaacccaggcccttctagaggccatatgaccgagtacaagcccacggtgcgcctcgccacccgcgacgacgtccccagggccgtacgcaccctcgccgccgcgttcgccgactaccccgccacgcgccacaccgtcgatccggaccgccacatcgagcgggtcaccgagctgcaagaactcttcctcacgcgcgtcgggctcgacatcggcaaggtgtgggtcgcggacgacggcgccgcggtggcggtctggaccacgccggagagcgtcgaagcgggggcggtgttcgccgagatcggcccgcgcatggccgagttgagcggttcccggctggccgcgcagcaacagatggaaggcctcctggcgccgcaccggcccaaggagcccgcgtggttcctggccaccgtcggcgtctcgcccgaccaccagggcaagggtctgggcagcgccgtcgtgctccccggagtggaggcggccgagcgcgccggggtgcccgccttcctggagacctccgcgccccgcaacctccccttctacgagcggctcggcttcaccgtcaccgccgacgtcgaggtgcccgaaggaccgcgcacctggtgcatgacccgcaagcccggtgcctga

SEQ ID NO: 36813 - DNA, 2694 bp, synthetic construct
  source 1..2694: mol_type = other DNA
atggccttaccagtgaccgccttgctcctgccgctggccttgctgctccacgccgccaggccgctcgaggaggaggacctgaagaacgtgttcccacctgaggtggccgtgttcgagcctagcgaggccgagatcagccacacccagaaagccaccctcgtgtgcctggctaccggcttctaccccgaccatgtggaactgtcttggtgggtcaacggcaaagaggtgcacagcggcgtgtgtaccgacccccagccactgaaagaacagcccgccctgaacgacagccggtactgcctgagcagcagactgagagtgtccgccaccttctggcagaacccccggaaccacttcagatgccaggtgcagttctacggcctgagcgagaacgacgagtggacccaggacagagccaagcccgtgacccagatcgtgtctgccgaagcctggggcagagccgattgcggctttaccagcgagagctaccagcagggcgtgctgagcgccaccaacctgagcgtgatcggcttcagaatcctgctgctgaaagtggccggctttaacctgctgatgaccctgcggctgtggtccagcagggccaagcgatctggatctggagcaacaaacttctcactactcaaacaagcaggtgacgtggaggagaatcccgggcctactagcatggccttaccagtgaccgccttgctcctgccgctggccttgctgctccacgccgccaggccggacatccagatgacacagagccctagcagcctgtctgccagcgtgggagacagagtgaccatcacatgcaagagcagccagagcctgctggactccgatggcaagacctacctgaactggtatcagcagaagcccggcaaggcccctaagctgctgatctacctggtgtccaagctggatagcggcgtgcccagcagattttctggcagcggcagcggaaccgacttcaccctgacaatatccagcctccagcctgaggacttcgccacctactactgctggcaaggcacccactttccattcaccttcggccagggcaccaaggtggaaatcaaaagaggcggaggcggaagtggaggcggaggatctggcggcggaggctctgaagtgcagctggttgaatcaggcggaggactggttcagcctggcggatctctgagactgtcttgtgccgccagcggctacaccttcaccagctactggatgaactgggtccgacaggcccctggcaaaggactggaatgggtcggaatgatcgaccccagcgacagcgagacacactacaaccacatcttcaaggaccgcttcaccatcagcgccgacaccagcaagaataccgcctacctccagatgaactccctgagagccgaggacaccgccgtgtactactgcgccagaaacctgtatctgttcggccagggaaccctggtcacagtgtcatctacgcgtggacagcctaaggccaatcctaccgtgacactgttccctccaagcagcgaagaactccaggccaacaaggccacacttgtgtgcctgatctccgacttctaccctggggctgtgacagtggcttggaaggccgatggatctcctgtgaaagccggcgtggaaaccaccaagccatccaagcagagcaacaacaaatacgccgccagctcctacctgagcctgacacctgagcagtggaagtcccacagatcctacagctgccaagtgacccacgaaggcagcaccgtggaaaagacagtggcccctacagagtgcagccccatcaagaccgatgtgattacaatggaccccaaggacaactgctccaaggacgccaacgataccctgctgctccagctgaccaacaccagcgcctactacatgtacttgttgctgctgctgaagtccgtggtgtacttcgccatcatcacatgctgcctgctgcggagaaccgccttctgctgcaacggcgagaagtctcgcgccaagagaagcggatctggcgtgaagcagaccctgaatttcgacctgctgaagctggctggcgacgtggaatccaacccaggcccttctagaggccatatgaccgagtacaagcccacggtgcgcctcgccacccgcgacgacgtccccagggccgtacgcaccctcgccgccgcgttcgccgactaccccgccacgcgccacaccgtcgatccggaccgccacatcgagcgggtcaccgagctgcaagaactcttcctcacgcgcgtcgggctcgacatcggcaaggtgtgggtcgcggacgacggcgccgcggtggcggtctggaccacgccggagagcgtcgaagcgggggcggtgttcgccgagatcggcccgcgcatggccgagttgagcggttcccggctggccgcgcagcaacagatggaaggcctcctggcgccgcaccggcccaaggagcccgcgtggttcctggccaccgtcggcgtctcgcccgaccaccagggcaagggtctgggcagcgccgtcgtgctccccggagtggaggcggccgagcgcgccggggtgcccgccttcctggagacctccgcgccccgcaacctccccttctacgagcggctcggcttcaccgtcaccgccgacgtcgaggtgcccgaaggaccgcgcacctggtgcatgacccgcaagcccggtgcctga

SEQ ID NO: 36814 - DNA, 2694 bp, synthetic construct
  source 1..2694: mol_type = other DNA
atggccttaccagtgaccgccttgctcctgccgctggccttgctgctccacgccgccaggccgctcgagggacagcctaaggccaatcctaccgtgacactgttccctccaagcagcgaagaactccaggccaacaaggccacacttgtgtgcctgatctccgacttctaccctggggctgtgacagtggcttggaaggccgatggatctcctgtgaaagccggcgtggaaaccaccaagccatccaagcagagcaacaacaaatacgccgccagctcctacctgagcctgacacctgagcagtggaagtcccacagatcctacagctgccaagtgacccacgaaggcagcaccgtggaaaagacagtggcccctacagagtgcagccccatcaagaccgatgtgattacaatggaccccaaggacaactgctccaaggacgccaacgataccctgctgctccagctgaccaacaccagcgcctactacatgtacttgttgctgctgctgaagtccgtggtgtacttcgccatcatcacatgctgcctgctgcggagaaccgccttctgctgcaacggcgagaagtctagggccaagcgatctggatctggagcaacaaacttctcactactcaaacaagcaggtgacgtggaggagaatcccgggcctactagcatggccttaccagtgaccgccttgctcctgccgctggccttgctgctccacgccgccaggccggacatccagatgacacagagccctagcagcctgtctgccagcgtgggagacagagtgaccatcacatgcaagagcagccagagcctgctggactccgatggcaagacctacctgaactggtatcagcagaagcccggcaaggcccctaagctgctgatctacctggtgtccaagctggatagcggcgtgcccagcagattttctggcagcggcagcggaaccgacttcaccctgacaatatccagcctccagcctgaggacttcgccacctactactgctggcaaggcacccactttccattcaccttcggccagggcaccaaggtggaaatcaaaagaggcggaggcggaagtggaggcggaggatctggcggcggaggctctgaagtgcagctggttgaatcaggcggaggactggttcagcctggcggatctctgagactgtcttgtgccgccagcggctacaccttcaccagctactggatgaactgggtccgacaggcccctggcaaaggactggaatgggtcggaatgatcgaccccagcgacagcgagacacactacaaccacatcttcaaggaccgcttcaccatcagcgccgacaccagcaagaataccgcctacctccagatgaactccctgagagccgaggacaccgccgtgtactactgcgccagaaacctgtatctgttcggccagggaaccctggtcacagtgtcatctacgcgtgaggaggacctgaagaacgtgttcccacctgaggtggccgtgttcgagcctagcgaggccgagatcagccacacccagaaagccaccctcgtgtgcctggctaccggcttctaccccgaccatgtggaactgtcttggtgggtcaacggcaaagaggtgcacagcggcgtgtgtaccgacccccagccactgaaagaacagcccgccctgaacgacagccggtactgcctgagcagcagactgagagtgtccgccaccttctggcagaacccccggaaccacttcagatgccaggtgcagttctacggcctgagcgagaacgacgagtggacccaggacagagccaagcccgtgacccagatcgtgtctgccgaagcctggggcagagccgattgcggctttaccagcgagagctaccagcagggcgtgctgagcgccaccaacctgagcgtgatcggcttcagaatcctgctgctgaaagtggccggctttaacctgctgatgaccctgcggctgtggtccagccgcgccaagagaagcggatctggcgtgaagcagaccctgaatttcgacctgctgaagctggctggcgacgtggaatccaacccaggcccttctagaggccatatgaccgagtacaagcccacggtgcgcctcgccacccgcgacgacgtccccagggccgtacgcaccctcgccgccgcgttcgccgactaccccgccacgcgccacaccgtcgatccggaccgccacatcgagcgggtcaccgagctgcaagaactcttcctcacgcgcgtcgggctcgacatcggcaaggtgtgggtcgcggacgacggcgccgcggtggcggtctggaccacgccggagagcgtcgaagcgggggcggtgttcgccgagatcggcccgcgcatggccgagttgagcggttcccggctggccgcgcagcaacagatggaaggcctcctggcgccgcaccggcccaaggagcccgcgtggttcctggccaccgtcggcgtctcgcccgaccaccagggcaagggtctgggcagcgccgtcgtgctccccggagtggaggcggccgagcgcgccggggtgcccgccttcctggagacctccgcgccccgcaacctccccttctacgagcggctcggcttcaccgtcaccgccgacgtcgaggtgcccgaaggaccgcgcacctggtgcatgacccgcaagcccggtgcctga

SEQ ID NO: 36815 - DNA, 2685 bp, synthetic construct
  source 1..2685: mol_type = other DNA
atggccttaccagtgaccgccttgctcctgccgctggccttgctgctccacgccgccaggccgctcgaggaggcctctacaaagggaccctccgtgtttcctctggctcccagcagcaagtctacaagcggaggaacagccgctctgggctgcctggtcaaggattactttcccgagcctgtgaccgtgtcctggaatagcggagcactgacaagcggcgtgcacacctttccagccgtgctgcaaagcagcggcctgtactctctgagcagcgtggtcacagtgcctagctctagcctgggcacccagacctacatctgcaatgtgaaccacaagcctagcaacaccaaggtggacaagagagtggaacccaagagctgtcccatcaagaccgatgtgattacaatggaccccaaggacaactgctccaaggacgccaacgataccctgctgctccagctgaccaacaccagcgcctactacatgtacttgttgctgctgctgaagtccgtggtgtacttcgccatcatcacatgctgcctgctgcggagaaccgccttctgctgcaacggcgagaagtctagggccaagcgatctggatctggagcaacaaacttctcactactcaaacaagcaggtgacgtggaggagaatcccgggcctactagcatggccttaccagtgaccgccttgctcctgccgctggccttgctgctccacgccgccaggccggacatccagatgacacagagccctagcagcctgtctgccagcgtgggagacagagtgaccatcacatgcaagagcagccagagcctgctggactccgatggcaagacctacctgaactggtatcagcagaagcccggcaaggcccctaagctgctgatctacctggtgtccaagctggatagcggcgtgcccagcagattttctggcagcggcagcggaaccgacttcaccctgacaatatccagcctccagcctgaggacttcgccacctactactgctggcaaggcacccactttccattcaccttcggccagggcaccaaggtggaaatcaaaagaggcggaggcggaagtggaggcggaggatctggcggcggaggctctgaagtgcagctggttgaatcaggcggaggactggttcagcctggcggatctctgagactgtcttgtgccgccagcggctacaccttcaccagctactggatgaactgggtccgacaggcccctggcaaaggactggaatgggtcggaatgatcgaccccagcgacagcgagacacactacaaccacatcttcaaggaccgcttcaccatcagcgccgacaccagcaagaataccgcctacctccagatgaactccctgagagccgaggacaccgccgtgtactactgcgccagaaacctgtatctgttcggccagggaaccctggtcacagtgtcatctacgcgtggacagcctaaggccaatcctaccgtgacactgttccctccaagcagcgaagaactccaggccaacaaggccacacttgtgtgcctgatctccgacttctaccctggggctgtgacagtggcttggaaggccgatggatctcctgtgaaagccggcgtggaaaccaccaagccatccaagcagagcaacaacaaatacgccgccagctcctacctgagcctgacacctgagcagtggaagtcccacagatcctacagctgccaagtgacccacgaaggcagcaccgtggaaaagacagtggcccctacagagtgcagcgaagtgaaaaccgactccaccgaccacgtgaagcccaaagagacagagaacaccaagcagcccagcaagagctgccacaagcccaaggccatcgtgcacaccgagaaagtgaacatgatgagcctgaccgtgctgggcctgcggatgctgttcgccaaaaccgtggccgtgaacttcctgctgaccgccaagctgttcttcctccgcgccaagagaagcggatctggcgtgaagcagaccctgaatttcgacctgctgaagctggctggcgacgtggaatccaacccaggcccttctagaggccatatgaccgagtacaagcccacggtgcgcctcgccacccgcgacgacgtccccagggccgtacgcaccctcgccgccgcgttcgccgactaccccgccacgcgccacaccgtcgatccggaccgccacatcgagcgggtcaccgagctgcaagaactcttcctcacgcgcgtcgggctcgacatcggcaaggtgtgggtcgcggacgacggcgccgcggtggcggtctggaccacgccggagagcgtcgaagcgggggcggtgttcgccgagatcggcccgcgcatggccgagttgagcggttcccggctggccgcgcagcaacagatggaaggcctcctggcgccgcaccggcccaaggagcccgcgtggttcctggccaccgtcggcgtctcgcccgaccaccagggcaagggtctgggcagcgccgtcgtgctccccggagtggaggcggccgagcgcgccggggtgcccgccttcctggagacctccgcgccccgcaacctccccttctacgagcggctcggcttcaccgtcaccgccgacgtcgaggtgcccgaaggaccgcgcacctggtgcatgacccgcaagcccggtgcctga

SEQ ID NO: 36816 - DNA, 2619 bp, synthetic construct
  source 1..2619: mol_type = other DNA
atggccttaccagtgaccgccttgctcctgccgctggccttgctgctccacgccgccaggccgctcgaggaggcctctacaaagggaccctccgtgtttcctctggctcccagcagcaagtctacaagcggaggaacagccgctctgggctgcctggtcaaggattactttcccgagcctgtgaccgtgtcctggaatagcggagcactgacaagcggcgtgcacacctttccagccgtgctgcaaagcagcggcctgtactctctgagcagcgtggtcacagtgcctagctctagcctgggcacccagacctacatctgcaatgtgaaccacaagcctagcaacaccaaggtggacaagagagtggaacccaagagctgtggcagagccgattgcggctttaccagcgagagctaccagcagggcgtgctgagcgccaccatcctgtacgagatcctgctgggcaaggccaccctgtacgccgtgctggtgtctgccctggtgctgatggctatggtcaagcggaaggacagccggggaagggccaagcgatctggatctggagcaacaaacttctcactactcaaacaagcaggtgacgtggaggagaatcccgggcctactagcatggccttaccagtgaccgccttgctcctgccgctggccttgctgctccacgccgccaggccggacatccagatgacacagagccctagcagcctgtctgccagcgtgggagacagagtgaccatcacatgcaagagcagccagagcctgctggactccgatggcaagacctacctgaactggtatcagcagaagcccggcaaggcccctaagctgctgatctacctggtgtccaagctggatagcggcgtgcccagcagattttctggcagcggcagcggaaccgacttcaccctgacaatatccagcctccagcctgaggacttcgccacctactactgctggcaaggcacccactttccattcaccttcggccagggcaccaaggtggaaatcaaaagaggcggaggcggaagtggaggcggaggatctggcggcggaggctctgaagtgcagctggttgaatcaggcggaggactggttcagcctggcggatctctgagactgtcttgtgccgccagcggctacaccttcaccagctactggatgaactgggtccgacaggcccctggcaaaggactggaatgggtcggaatgatcgaccccagcgacagcgagacacactacaaccacatcttcaaggaccgcttcaccatcagcgccgacaccagcaagaataccgcctacctccagatgaactccctgagagccgaggacaccgccgtgtactactgcgccagaaacctgtatctgttcggccagggaaccctggtcacagtgtcatctacgcgtggacagcctaaggccaatcctaccgtgacactgttccctccaagcagcgaagaactccaggccaacaaggccacacttgtgtgcctgatctccgacttctaccctggggctgtgacagtggcttggaaggccgatggatctcctgtgaaagccggcgtggaaaccaccaagccatccaagcagagcaacaacaaatacgccgccagctcctacctgagcctgacacctgagcagtggaagtcccacagatcctacagctgccaagtgacccacgaaggcagcaccgtggaaaagacagtggcccctacagagtgcagcatccccgaggacacattcttcccaagccccgagagcagctgcgacgtgaagctggtggaaaagagcttcgagacagacaccaacctgaacttccagaacctgagcgtgatcggcttcagaatcctgctgctgaaagtggccggctttaacctgctgatgaccctgcggctgtggtccagccgcgccaagagaagcggatctggcgtgaagcagaccctgaatttcgacctgctgaagctggctggcgacgtggaatccaacccaggcccttctagaggccatatgaccgagtacaagcccacggtgcgcctcgccacccgcgacgacgtccccagggccgtacgcaccctcgccgccgcgttcgccgactaccccgccacgcgccacaccgtcgatccggaccgccacatcgagcgggtcaccgagctgcaagaactcttcctcacgcgcgtcgggctcgacatcggcaaggtgtgggtcgcggacgacggcgccgcggtggcggtctggaccacgccggagagcgtcgaagcgggggcggtgttcgccgagatcggcccgcgcatggccgagttgagcggttcccggctggccgcgcagcaacagatggaaggcctcctggcgccgcaccggcccaaggagcccgcgtggttcctggccaccgtcggcgtctcgcccgaccaccagggcaagggtctgggcagcgccgtcgtgctccccggagtggaggcggccgagcgcgccggggtgcccgccttcctggagacctccgcgccccgcaacctccccttctacgagcggctcggcttcaccgtcaccgccgacgtcgaggtgcccgaaggaccgcgcacctggtgcatgacccgcaagcccggtgcctga

SEQ ID NO: 36817 - DNA, 2619 bp, synthetic construct
  source 1..2619: mol_type = other DNA
atggccttaccagtgaccgccttgctcctgccgctggccttgctgctccacgccgccaggccgctcgaggaggcctctacaaagggaccctccgtgtttcctctggctcccagcagcaagtctacaagcggaggaacagccgctctgggctgcctggtcaaggattactttcccgagcctgtgaccgtgtcctggaatagcggagcactgacaagcggcgtgcacacctttccagccgtgctgcaaagcagcggcctgtactctctgagcagcgtggtcacagtgcctagctctagcctgggcacccagacctacatctgcaatgtgaaccacaagcctagcaacaccaaggtggacaagagagtggaacccaagagctgtatccccgaggacacattcttcccaagccccgagagcagctgcgacgtgaagctggtggaaaagagcttcgagacagacaccaacctgaacttccagaacctgagcgtgatcggcttcagaatcctgctgctgaaagtggccggctttaacctgctgatgaccctgcggctgtggtccagcagggccaagcgatctggatctggagcaacaaacttctcactactcaaacaagcaggtgacgtggaggagaatcccgggcctactagcatggccttaccagtgaccgccttgctcctgccgctggccttgctgctccacgccgccaggccggacatccagatgacacagagccctagcagcctgtctgccagcgtgggagacagagtgaccatcacatgcaagagcagccagagcctgctggactccgatggcaagacctacctgaactggtatcagcagaagcccggcaaggcccctaagctgctgatctacctggtgtccaagctggatagcggcgtgcccagcagattttctggcagcggcagcggaaccgacttcaccctgacaatatccagcctccagcctgaggacttcgccacctactactgctggcaaggcacccactttccattcaccttcggccagggcaccaaggtggaaatcaaaagaggcggaggcggaagtggaggcggaggatctggcggcggaggctctgaagtgcagctggttgaatcaggcggaggactggttcagcctggcggatctctgagactgtcttgtgccgccagcggctacaccttcaccagctactggatgaactgggtccgacaggcccctggcaaaggactggaatgggtcggaatgatcgaccccagcgacagcgagacacactacaaccacatcttcaaggaccgcttcaccatcagcgccgacaccagcaagaataccgcctacctccagatgaactccctgagagccgaggacaccgccgtgtactactgcgccagaaacctgtatctgttcggccagggaaccctggtcacagtgtcatctacgcgtggacagcctaaggccaatcctaccgtgacactgttccctccaagcagcgaagaactccaggccaacaaggccacacttgtgtgcctgatctccgacttctaccctggggctgtgacagtggcttggaaggccgatggatctcctgtgaaagccggcgtggaaaccaccaagccatccaagcagagcaacaacaaatacgccgccagctcctacctgagcctgacacctgagcagtggaagtcccacagatcctacagctgccaagtgacccacgaaggcagcaccgtggaaaagacagtggcccctacagagtgcagcggcagagccgattgcggctttaccagcgagagctaccagcagggcgtgctgagcgccaccatcctgtacgagatcctgctgggcaaggccaccctgtacgccgtgctggtgtctgccctggtgctgatggctatggtcaagcggaaggacagccggggacgcgccaagagaagcggatctggcgtgaagcagaccctgaatttcgacctgctgaagctggctggcgacgtggaatccaacccaggcccttctagaggccatatgaccgagtacaagcccacggtgcgcctcgccacccgcgacgacgtccccagggccgtacgcaccctcgccgccgcgttcgccgactaccccgccacgcgccacaccgtcgatccggaccgccacatcgagcgggtcaccgagctgcaagaactcttcctcacgcgcgtcgggctcgacatcggcaaggtgtgggtcgcggacgacggcgccgcggtggcggtctggaccacgccggagagcgtcgaagcgggggcggtgttcgccgagatcggcccgcgcatggccgagttgagcggttcccggctggccgcgcagcaacagatggaaggcctcctggcgccgcaccggcccaaggagcccgcgtggttcctggccaccgtcggcgtctcgcccgaccaccagggcaagggtctgggcagcgccgtcgtgctccccggagtggaggcggccgagcgcgccggggtgcccgccttcctggagacctccgcgccccgcaacctccccttctacgagcggctcggcttcaccgtcaccgccgacgtcgaggtgcccgaaggaccgcgcacctggtgcatgacccgcaagcccggtgcctga

SEQ ID NO: 36818 - DNA, 1857 bp, synthetic construct
  source 1..1857: mol_type = other DNA
atggccttaccagtgaccgccttgctcctgccgctggccttgctgctccacgccgccaggccggacatccagatgacacagagccctagcagcctgtctgccagcgtgggagacagagtgaccatcacatgcaagagcagccagagcctgctggactccgatggcaagacctacctgaactggtatcagcagaagcccggcaaggcccctaagctgctgatctacctggtgtccaagctggatagcggcgtgcccagcagattttctggcagcggcagcggaaccgacttcaccctgacaatatccagcctccagcctgaggacttcgccacctactactgctggcaaggcacccactttccattcaccttcggccagggcaccaaggtggaaatcaaaagactcgaggacctgaagaacgtgttcccacctgaggtggccgtgttcgagcctagcgaggccgagatcagccacacccagaaagccaccctcgtgtgcctggctaccggcttctaccccgaccatgtggaactgtcttggtgggtcaacggcaaagaggtgcacagcggcgtgtgtaccgacccccagccactgaaagaacagcccgccctgaacgacagccggtactgcctgagcagcagactgagagtgtccgccaccttctggcagaacccccggaaccacttcagatgccaggtgcagttctacggcctgagcgagaacgacgagtggacccaggacagagccaagcccgtgacccagatcgtgtctgccgaagcctggggcagagccgatagcggctttaccagcgagagctaccagcagggcgtgctgagcgccaccatcctgtacgagatcctgctgggcaaggccaccctgtacgccgtgctggtgtctgccctggtgctgatggctatggtcaagcggaaggacagccggggaagggccaagcgatctggatctggagcaacaaacttctcactactcaaacaagcaggtgacgtggaggagaatcccgggcctactagtatggactggatttggcgcatccttttccttgtcggcgctgctaccggcgcgcattccttcgaagaagtgcagctggttgaatcaggcggaggactggttcagcctggcggatctctgagactgtcttgtgccgccagcggctacaccttcaccagctactggatgaactgggtccgacaggcccctggcaaaggactggaatgggtcggaatgatcgaccccagcgacagcgagacacactacaaccacatcttcaaggaccgcttcaccatcagcgccgacaccagcaagaataccgcctacctccagatgaactccctgagagccgaggacaccgccgtgtactactgcgccagaaacctgtatctgttcggccagggaaccctggtcacagtgtcatctacgcgtatccagaaccctgatcctgccgtgtaccagctgcgggatagcaagagcagcgacaagagcgtgtgtctgttcaccgacttcgacagccagaccaacgtgtcccagagcaaggactccgacgtgtacatcaccgataagtgcgtgctggacatgcggagcatggacttcaagagcaactccgccgtggcctggtccaacaagtccgatttcgcctgcgccaacgccttcaacaacagcattatccccgaggacacattcttcccaagccccgagagcagcagcgacgtgaagctggtggaaaagagcttcgagacagacaccaacctgaacttccagaacctgagcgtgatcggcttcagaatcctgctgctgaaagtggccggctttaacctgctgatgaccctgcggctgtggtccagc

SEQ ID NO: 36819 - DNA, 2697 bp, synthetic construct
  source 1..2697: mol_type = other DNA
atggccttaccagtgaccgccttgctcctgccgctggccttgctgctccacgccgccaggccggaggttcagctgcttgagtctggcggaggactggttcaacctggcggaagcctgagactgtcttgtgccgcctctggcagaaccttcagcatgggctggtatagacaggcccctggcaagggcctcgaatttgtgtctgccatcacatacagcggcggcagcccttactacgccgattctgtgaagggcagattcaccatcagccgggacaacagcaagaacaccgtgtacctccagatgaacagcctgagagccgaggacaccgccgtgtactactgtgccgccaatccaacctacggcagcgactggaatgccgagaattggggccagggcacactggtcacagtgtctagtggtaccggcggaggcggatctggcggcggaggtagcggtggcggaggatctgaattcgacatccagatgacacagagccctagcagcctgtctgccagcgtgggagacagagtgaccatcacatgcaagagcagccagagcctgctggactccgatggcaagacctacctgaactggtatcagcagaagcccggcaaggcccctaagctgctgatctacctggtgtccaagctggatagcggcgtgcccagcagattttctggcagcggcagcggaaccgacttcaccctgacaatatccagcctccagcctgaggacttcgccacctactactgctggcaaggcacccactttccattcaccttcggccagggcaccaaggtggaaatcaaaagactcgagatccagaaccctgatcctgccgtgtaccagctgcgggatagcaagagcagcgacaagagcgtgtgtctgttcaccgacttcgacagccagaccaacgtgtcccagagcaaggactccgacgtgtacatcaccgataagtgcgtgctggacatgcggagcatggacttcaagagcaactccgccgtggcctggtccaacaagtccgatttcgcctgcgccaacgccttcaacaacagcattatccccgaggacacattcttcccaagcagcgacgtgccctgcgacgtgaagctggtggaaaagagcttcgagacagacaccaacctgaacttccagaacctgagcgtgatcggcttcagaatcctgctgctgaaagtggccggctttaacctgctgatgaccctgcggctgtggtccagccgcgccaagagaagcggatctggcgtgaagcagaccctgaatttcgacctgctgaagctggctggcgacgtggaatccaacccaggccctactagtaccatggactggatttggcgcatccttttccttgtcggcgctgctaccggcacccattccgggcccgaagtgcaactggttgaatccggtggcggcctggtgcaacccggcggatctctcagacttagctgtgccgcctccggcagaaccttcacaatgggatggtacaggcaggctccagggaaagagagagagttcgtcgccgccatctctctgtctcccacactggcctactacgccgactctgtgaaaggccggttcaccatctccagagataatagcaagaacaccgtggtgctgcaaatgaactctctgagagccgaggatacagccctgtactattgtgccgctgaccggaagtccgtgatgagcatcagacccgattactggggacagggcacactggtcacagtgtctagtggatccggcggcggaggatctggcggaggcggatctgggggcggaggctctttcgaagaagtgcagctggttgaatcaggcggaggactggttcagcctggcggatctctgagactgtcttgtgccgccagcggctacaccttcaccagctactggatgaactgggtccgacaggcccctggcaaaggactggaatgggtcggaatgatcgaccccagcgacagcgagacacactacaaccacatcttcaaggaccgcttcaccatcagcgccgacaccagcaagaataccgcctacctccagatgaactccctgagagccgaggacaccgccgtgtactactgcgccagaaacctgtatctgttcggccagggaaccctggtcacagtgtcatctacgcgtgaggacctgaagaacgtgttcccacctgaggtggccgtgttcgagcctagcaaggccgagatcgcccacacccagaaagccaccctcgtgtgcctggctaccggcttctaccccgaccatgtggaactgtcttggtgggtcaacggcaaagaggtgcacagcggcgtgtgtaccgacccccagccactgaaagaacagcccgccctgaacgacagccggtactgcctgagcagcagactgagagtgtccgccaccttctggcagaacccccggaaccacttcagatgccaggtgcagttctacggcctgagcgagaacgacgagtggacccaggacagagccaagcccgtgacccagatcgtgtctgccgaagcctggggcagagccgattgcggcatcaccagcgccagctaccaccagggcgtgctgagcgccaccatcctgtacgagatcctgctgggcaaggccaccctgtacgccgtgctggtgtctgccctggtgctgatggctatggtcaagcggaaggacagccggggataa

SEQ ID NO: 36820 - DNA, 2697 bp, synthetic construct
  source 1..2697: mol_type = other DNA
atggccttaccagtgaccgccttgctcctgccgctggccttgctgctccacgccgccaggccggaagtgcagctggttgaatctggcggaggactggttcaggctggcggatctctgagactgtcttgtgccgccagcggcagaacctttagcatgggctggtttagacaggcccctggcaaagagagagagttcgtcgccgccatcacatactctggcggcagcccttactacgccgactctgtgaagggcagattcaccatcagccgggacaacgccaagaacaccgtgtacctccagatgaacagcctgaagcctgaggacaccgccgtgtactactgcgccgccaatccaacatacggcagcgactggaacgccgagaattggggccagggaacccaagtgacagtgtctagcggtaccggcggaggcggatctggcggcggaggtagcggtggcggaggatctgaattcgacatccagatgacacagagccctagcagcctgtctgccagcgtgggagacagagtgaccatcacatgcaagagcagccagagcctgctggactccgatggcaagacctacctgaactggtatcagcagaagcccggcaaggcccctaagctgctgatctacctggtgtccaagctggatagcggcgtgcccagcagattttctggcagcggcagcggaaccgacttcaccctgacaatatccagcctccagcctgaggacttcgccacctactactgctggcaaggcacccactttccattcaccttcggccagggcaccaaggtggaaatcaaaagactcgagatccagaaccctgatcctgccgtgtaccagctgcgggatagcaagagcagcgacaagagcgtgtgtctgttcaccgacttcgacagccagaccaacgtgtcccagagcaaggactccgacgtgtacatcaccgataagtgcgtgctggacatgcggagcatggacttcaagagcaactccgccgtggcctggtccaacaagtccgatttcgcctgcgccaacgccttcaacaacagcattatccccgaggacacattcttcccaagcagcgacgtgccctgcgacgtgaagctggtggaaaagagcttcgagacagacaccaacctgaacttccagaacctgagcgtgatcggcttcagaatcctgctgctgaaagtggccggctttaacctgctgatgaccctgcggctgtggtccagccgcgccaagagaagcggatctggcgtgaagcagaccctgaatttcgacctgctgaagctggctggcgacgtggaatccaacccaggccctactagtaccatggactggatttggcgcatccttttccttgtcggcgctgctaccggcgcccattccgggcccgaagtgcaactggttgaatccggtggcggcctggtgcaacccggcggatctctcagacttagctgtgccgcctccggcagaaccttcacaatgggatggtacaggcaggctccagggaaagagagagagttcgtcgccgccatctctctgtctcccacactggcctactacgccgactctgtgaaaggccggttcaccatctccagagataatagcaagaacaccgtggtgctgcaaatgaactctctgagagccgaggatacagccctgtactattgtgccgctgaccggaagtccgtgatgagcatcagacccgattactggggacagggcacactggtcacagtgtctagtggatccggcggcggaggatctggcggaggcggatctgggggcggaggctctttcgaagaagtgcagctggttgaatcaggcggaggactggttcagcctggcggatctctgagactgtcttgtgccgccagcggctacaccttcaccagctactggatgaactgggtccgacaggcccctggcaaaggactggaatgggtcggaatgatcgaccccagcgacagcgagacacactacaaccacatcttcaaggaccgcttcaccatcagcgccgacaccagcaagaataccgcctacctccagatgaactccctgagagccgaggacaccgccgtgtactactgcgccagaaacctgtatctgttcggccagggaaccctggtcacagtgtcatctacgcgtgaggacctgaagaacgtgttcccacctgaggtggccgtgttcgagcctagcaaggccgagatcgcccacacccagaaagccaccctcgtgtgcctggctaccggcttctaccccgaccatgtggaactgtcttggtgggtcaacggcaaagaggtgcacagcggcgtgtgtaccgacccccagccactgaaagaacagcccgccctgaacgacagccggtactgcctgagcagcagactgagagtgtccgccaccttctggcagaacccccggaaccacttcagatgccaggtgcagttctacggcctgagcgagaacgacgagtggacccaggacagagccaagcccgtgacccagatcgtgtctgccgaagcctggggcagagccgattgcggcatcaccagcgccagctaccaccagggcgtgctgagcgccaccatcctgtacgagatcctgctgggcaaggccaccctgtacgccgtgctggtgtctgccctggtgctgatggctatggtcaagcggaaggacagccggggataa

SEQ ID NO: 36821 - DNA, 2688 bp, synthetic construct
  source 1..2688: mol_type = other DNA
atggccttaccagtgaccgccttgctcctgccgctggccttgctgctccacgccgccaggccggaagtgcagctggttgaatctggcggaggactggttcaggctggcggatctctgagactgtcttgtgccgccagcggcagaacctttagcatgggctggtttagacaggcccctggcaaagagagagagttcgtcgccgccatcacatactctggcggcagcccttactacgccgactctgtgaagggcagattcaccatcagccgggacaacgccaagaacaccgtgtacctccagatgaacagcctgaagcctgaggacaccgccgtgtactactgcgccgccaatccaacatacggcagcgactggaacgccgagaattggggccagggaacccaagtgacagtgtctagcggtaccggcggaggcggatctggcggcggaggtagcggtggcggaggatctgaattcgacatccagatgacacagagccctagcagcctgtctgccagcgtgggagacagagtgaccatcacatgcaagagcagccagagcctgctggactccgatggcaagacctacctgaactggtatcagcagaagcccggcaaggcccctaagctgctgatctacctggtgtccaagctggatagcggcgtgcccagcagattttctggcagcggcagcggaaccgacttcaccctgacaatatccagcctccagcctgaggacttcgccacctactactgctggcaaggcacccactttccattcaccttcggccagggcaccaaggtggaaatcaaaagactcgaggacctgaagaacgtgttcccacctgaggtggccgtgttcgagcctagcgaggccgagatcagccacacccagaaagccaccctcgtgtgcctggctaccggcttctaccccgaccatgtggaactgtcttggtgggtcaacggcaaagaggtgcacagcggcgtgtgtaccgacccccagccactgaaagaacagcccgccctgaacgacagccggtactgcctgagcagcagactgagagtgtccgccaccttctggcagaacccccggaaccacttcagatgccaggtgcagttctacggcctgagcgagaacgacgagtggacccaggacagagccaagcccgtgacccagatcgtgtctgccgaagcctggggcagagccgattgcggctttaccagcgagagctaccagcagggcgtgctgagcgccaccatcctgtacgagatcctgctgggcaaggccaccctgtacgccgtgctggtgtctgccctggtgctgatggctatggtcaagcggaaggacagccggggaagggccaagcgatctggatctggagcaacaaacttctcactactcaaacaagcaggtgacgtggaggagaatcccgggcctactagtgccaccatggactggatttggcgcatccttttccttgtcggcgctgctaccggcgcccattccgggcccgaagtgcaactggttgaatccggtggcggcctggtgcaagcaggcggatctctcagacttagctgtgccgcctccggcagaaccttcacaatgggatggtttaggcaggctccagggaaagagagagagttcgtcgccgccatctctctgtctcccacactggcctactacgccgactctgtgaaaggccggttcaccatctccagagataatgccaagaacaccgtggtgctgcaaatgaactctctgaaacccgaggatacagccctgtactattgtgccgctgaccggaagtccgtgatgagcatcagacccgattactggggacagggcacacaagtcacagtgtcctctggatccggcggcggaggatctggcggaggcggatctgggggcggaggctctttcgaagaagtgcagctggttgaatcaggcggaggactggttcagcctggcggatctctgagactgtcttgtgccgccagcggctacaccttcaccagctactggatgaactgggtccgacaggcccctggcaaaggactggaatgggtcggaatgatcgaccccagcgacagcgagacacactacaaccacatcttcaaggaccgcttcaccatcagcgccgacaccagcaagaataccgcctacctccagatgaactccctgagagccgaggacaccgccgtgtactactgcgccagaaacctgtatctgttcggccagggaaccctggtcacagtgtcatctacgcgtatccagaaccctgatcctgccgtgtaccagctgcgggatagcaagagcagcgacaagagcgtgtgtctgttcaccgacttcgacagccagaccaacgtgtcccagagcaaggactccgacgtgtacatcaccgataagtgcgtgctggacatgcggagcatggacttcaagagcaactccgccgtggcctggtccaacaagtccgatttcgcctgcgccaacgccttcaacaacagcattatccccgaggacacattcttcccaagccccgagagcagctgcgacgtgaagctggtggaaaagagcttcgagacagacaccaacctgaacttccagaacctgagcgtgatcggcttcagaatcctgctgctgaaagtggccggctttaacctgctgatgaccctgcggctgtggtccagctaa

SEQ ID NO: 36822 - DNA, 2301 bp, synthetic construct
  source 1..2301: mol_type = other DNA
atggccttaccagtgaccgccttgctcctgccgctggccttgctgctccacgccgccaggccggaagtgcagctggttgaatctggcggaggactggttcagcctggcggatctctgagactgagctgtgaagccagcggcttcgccagcgacgattacatcatcggctggttcagacaggcccctggcaaagagagagagggcgtcagctgcatcagctctaagtacgccaacaccgtgtacaccgacagcgtgaagggcagattcagactgagcagaggcaccgccaagaataccgtgtacctccagatgagcgccctgaagcctgaggataccgccgtgtactactgcgctatggacagccgcagagtgacatgccctgagatcagcaccatgcaccggaacttcgattcttggggccagggcacactggtcacagtgtcatctggtaccggcggaggcggatctggcggcggaggtagcggtggcggaggatctgaattcgacatccagatgacacagagccctagcagcctgtctgccagcgtgggagacagagtgaccatcacatgcaagagcagccagagcctgctggactccgatggcaagacctacctgaactggtatcagcagaagcccggcaaggcccctaagctgctgatctacctggtgtccaagctggatagcggcgtgcccagcagattttctggcagcggcagcggaaccgacttcaccctgacaatatccagcctccagcctgaggacttcgccacctactactgctggcaaggcacccactttccattcaccttcggccagggcaccaaggtggaaatcaaaagactcgaggacctgaagaacgtgttcccacctgaggtggccgtgttcgagcctagcaaggccgagatcgcccacacccagaaagccaccctcgtgtgcctggctaccggcttctaccccgaccatgtggaactgtcttggtgggtcaacggcaaagaggtgcacagcggcgtgtgtaccgacccccagccactgaaagaacagcccgccctgaacgacagccggtactgcctgagcagcagactgagagtgtccgccaccttctggcagaacccccggaaccacttcagatgccaggtgcagttctacggcctgagcgagaacgacgagtggacccaggacagagccaagcccgtgacccagatcgtgtctgccgaagcctggggcagagccgattgcggcatcaccagcgccagctaccaccagggcgtgctgagcgccaccatcctgtacgagatcctgctgggcaaggccaccctgtacgccgtgctggtgtctgccctggtgctgatggctatggtcaagcggaaggacagccggggaagggccaagcgatctggatctggagcaacaaacttctcactactcaaacaagcaggtgacgtggaggagaatcccgggcctactagtatggactggatttggcgcatccttttccttgtcggcgctgctaccggcgcgcattccttcgaagaagtgcagctggttgaatcaggcggaggactggttcagcctggcggatctctgagactgtcttgtgccgccagcggctacaccttcaccagctactggatgaactgggtccgacaggcccctggcaaaggactggaatgggtcggaatgatcgaccccagcgacagcgagacacactacaaccacatcttcaaggaccgcttcaccatcagcgccgacaccagcaagaataccgcctacctccagatgaactccctgagagccgaggacaccgccgtgtactactgcgccagaaacctgtatctgttcggccagggaaccctggtcacagtgtcatctacgcgtatccagaaccctgatcctgccgtgtaccagctgcgggatagcaagagcagcgacaagagcgtgtgtctgttcaccgacttcgacagccagaccaacgtgtcccagagcaaggactccgacgtgtacatcaccgataagtgcgtgctggacatgcggagcatggacttcaagagcaactccgccgtggcctggtccaacaagtccgatttcgcctgcgccaacgccttcaacaacagcattatccccgaggacacattcttcccaagcagcgacgtgccctgcgacgtgaagctggtggaaaagagcttcgagacagacaccaacctgaacttccagaacctgagcgtgatcggcttcagaatcctgctgctgaaagtggccggctttaacctgctgatgaccctgcggctgtggtccagctaa

SEQ ID NO: 36823 - DNA, 2274 bp, synthetic construct
  source 1..2274: mol_type = other DNA
atggccttaccagtgaccgccttgctcctgccgctggccttgctgctccacgccgccaggccggacatccagatgacacagagccctagcagcctgtctgccagcgtgggagacagagtgaccatcacatgcaagagcagccagagcctgctggactccgatggcaagacctacctgaactggtatcagcagaagcccggcaaggcccctaagctgctgatctacctggtgtccaagctggatagcggcgtgcccagcagattttctggcagcggcagcggaaccgacttcaccctgacaatatccagcctccagcctgaggacttcgccacctactactgctggcaaggcacccactttccattcaccttcggccagggcaccaaggtggaaatcaaaagactcgaggacctgaagaacgtgttcccacctgaggtggccgtgttcgagcctagcgaggccgagatcagccacacccagaaagccaccctcgtgtgcctggctaccggcttctaccccgaccatgtggaactgtcttggtgggtcaacggcaaagaggtgcacagcggcgtgtgtaccgacccccagccactgaaagaacagcccgccctgaacgacagccggtactgcctgagcagcagactgagagtgtccgccaccttctggcagaacccccggaaccacttcagatgccaggtgcagttctacggcctgagcgagaacgacgagtggacccaggacagagccaagcccgtgacccagatcgtgtctgccgaagcctggggcagagccgattgcggctttaccagcgagagctaccagcagggcgtgctgagcgccaccatcctgtacgagatcctgctgggcaaggccaccctgtacgccgtgctggtgtctgccctggtgctgatggctatggtcaagcggaaggacagccggggaagggccaagcgatctggatctggagcaacaaacttctcactactcaaacaagcaggtgacgtggaggagaatcccgggcctactagtaccatggactggatttggcgcatccttttccttgtcggcgctgctaccggcgcccattccgggcccgaagtgcaactggttgaatccggtggcggcctggtgcaacccggcggatctctcagacttagctgtgccgcctccggcagaaccttcacaatgggatggtacaggcaggctccagggaaagagagagagttcgtcgccgccatctctctgtctcccacactggcctactacgccgactctgtgaaaggccggttcaccatctccagagataatagcaagaacaccgtggtgctgcaaatgaactctctgagagccgaggatacagccctgtactattgtgccgctgaccggaagtccgtgatgagcatcagacccgattactggggacagggcacactggtcacagtgtctagtggatccggcggcggaggatctggcggaggcggatctgggggcggaggctctttcgaagaagtgcagctggttgaatcaggcggaggactggttcagcctggcggatctctgagactgtcttgtgccgccagcggctacaccttcaccagctactggatgaactgggtccgacaggcccctggcaaaggactggaatgggtcggaatgatcgaccccagcgacagcgagacacactacaaccacatcttcaaggaccgcttcaccatcagcgccgacaccagcaagaataccgcctacctccagatgaactccctgagagccgaggacaccgccgtgtactactgcgccagaaacctgtatctgttcggccagggaaccctggtcacagtgtcatctacgcgtatccagaaccctgatcctgccgtgtaccagctgcgggatagcaagagcagcgacaagagcgtgtgtctgttcaccgacttcgacagccagaccaacgtgtcccagagcaaggactccgacgtgtacatcaccgataagtgcgtgctggacatgcggagcatggacttcaagagcaactccgccgtggcctggtccaacaagtccgatttcgcctgcgccaacgccttcaacaacagcattatccccgaggacacattcttcccaagccccgagagcagctgcgacgtgaagctggtggaaaagagcttcgagacagacaccaacctgaacttccagaacctgagcgtgatcggcttcagaatcctgctgctgaaagtggccggctttaacctgctgatgaccctgcggctgtggtccagctaa

SEQ ID NO: 36824 - DNA, 2292 bp, synthetic construct
  source 1..2292: mol_type = other DNA
atggccttaccagtgaccgccttgctcctgccgctggccttgctgctccacgccgccaggccggacatccagatgacacagagccctagcagcctgtctgccagcgtgggagacagagtgaccatcacatgcaagagcagccagagcctgctggactccgatggcaagacctacctgaactggtatcagcagaagcccggcaaggcccctaagctgctgatctacctggtgtccaagctggatagcggcgtgcccagcagattttctggcagcggcagcggaaccgacttcaccctgacaatatccagcctccagcctgaggacttcgccacctactactgctggcaaggcacccactttccattcaccttcggccagggcaccaaggtggaaatcaaaagactcgaggacctgaagaacgtgttcccacctgaggtggccgtgttcgagcctagcgaggccgagatcagccacacccagaaagccaccctcgtgtgcctggctaccggcttctaccccgaccatgtggaactgtcttggtgggtcaacggcaaagaggtgcacagcggcgtgtgtaccgacccccagccactgaaagaacagcccgccctgaacgacagccggtactgcctgagcagcagactgagagtgtccgccaccttctggcagaacccccggaaccacttcagatgccaggtgcagttctacggcctgagcgagaacgacgagtggacccaggacagagccaagcccgtgacccagatcgtgtctgccgaagcctggggcagagccgattgcggctttaccagcgagagctaccagcagggcgtgctgagcgccaccatcctgtacgagatcctgctgggcaaggccaccctgtacgccgtgctggtgtctgccctggtgctgatggctatggtcaagcggaaggacagccggggaagggccaagcgatctggatctggagcaacaaacttctcactactcaaacaagcaggtgacgtggaggagaatcccgggcctactagtaccatggactggatttggcgcatccttttccttgtcggcgctgctaccggcgcccattccgggccccaggtgcagctggttgaatctggcggaggactggttcagcctggcggatctctgagactgtcttgtgccgccagcggcaacatcaacagcagaaactgcatgggctggttcagacaggcccctggcaagggaagagaaggcgtggcagctatcggccaagtgaccggcagaacctactacgtggacagcgtgaagggcagattcaccatcagcctggacaacagcaagaacaccctgtacctccagatgaacagcctgagagccgaggacaccgccgtgtactattgtgctgctgcccctggctgtctgctgtctgcacttagaagcgccgactacagaaactggggccagggcacactggtcaccgtttcttctggatccggcggcggaggatctggcggaggcggatctgggggcggaggctctttcgaagaagtgcagctggttgaatcaggcggaggactggttcagcctggcggatctctgagactgtcttgtgccgccagcggctacaccttcaccagctactggatgaactgggtccgacaggcccctggcaaaggactggaatgggtcggaatgatcgaccccagcgacagcgagacacactacaaccacatcttcaaggaccgcttcaccatcagcgccgacaccagcaagaataccgcctacctccagatgaactccctgagagccgaggacaccgccgtgtactactgcgccagaaacctgtatctgttcggccagggaaccctggtcacagtgtcatctacgcgtatccagaaccctgatcctgccgtgtaccagctgcgggatagcaagagcagcgacaagagcgtgtgtctgttcaccgacttcgacagccagaccaacgtgtcccagagcaaggactccgacgtgtacatcaccgataagtgcgtgctggacatgcggagcatggacttcaagagcaactccgccgtggcctggtccaacaagtccgatttcgcctgcgccaacgccttcaacaacagcattatccccgaggacacattcttcccaagccccgagagcagctgcgacgtgaagctggtggaaaagagcttcgagacagacaccaacctgaacttccagaacctgagcgtgatcggcttcagaatcctgctgctgaaagtggccggctttaacctgctgatgaccctgcggctgtggtccagc

SEQ ID NO: 36825 - DNA, 2295 bp, synthetic construct
  source 1..2295: mol_type = other DNA
atggccttaccagtgaccgccttgctcctgccgctggccttgctgctccacgccgccaggccggacatccagatgacacagagccctagcagcctgtctgccagcgtgggagacagagtgaccatcacatgcaagagcagccagagcctgctggactccgatggcaagacctacctgaactggtatcagcagaagcccggcaaggcccctaagctgctgatctacctggtgtccaagctggatagcggcgtgcccagcagattttctggcagcggcagcggaaccgacttcaccctgacaatatccagcctccagcctgaggacttcgccacctactactgctggcaaggcacccactttccattcaccttcggccagggcaccaaggtggaaatcaaaagactcgaggacctgaagaacgtgttcccacctgaggtggccgtgttcgagcctagcgaggccgagatcagccacacccagaaagccaccctcgtgtgcctggctaccggcttctaccccgaccatgtggaactgtcttggtgggtcaacggcaaagaggtgcacagcggcgtgtgtaccgacccccagccactgaaagaacagcccgccctgaacgacagccggtactgcctgagcagcagactgagagtgtccgccaccttctggcagaacccccggaaccacttcagatgccaggtgcagttctacggcctgagcgagaacgacgagtggacccaggacagagccaagcccgtgacccagatcgtgtctgccgaagcctggggcagagccgattgcggctttaccagcgagagctaccagcagggcgtgctgagcgccaccatcctgtacgagatcctgctgggcaaggccaccctgtacgccgtgctggtgtctgccctggtgctgatggctatggtcaagcggaaggacagccggggaagggccaagcgatctggatctggagcaacaaacttctcactactcaaacaagcaggtgacgtggaggagaatcccgggcctactagtaccatggactggatttggcgcatccttttccttgtcggcgctgctaccggcgcccattccgggccccaggtgcagctggttgaatctggcggaggatctgttcaggctggcggctctctgagactgtcttgtggcgcttccggcaacatcagcagcagaaactgcatgggctggttcagacaggcccctggcaaagagagagaaggcgttgccgccatcggacaagtgaccggcagatcctactacgtggacagcgtgaagggcagattcaccatcagcctggacaacgccaagaacaccctgtacctccagatgaacacactgaagcccgaggacaccgccatgtactactgtgctgctgcccctggctgtctgctgtctgcacttagaagcgccgactacagaaactggggccagggaacccaagtgacagtgtctagtggatccggcggcggaggatctggcggaggcggatctgggggcggaggctctttcgaagaagtgcagctggttgaatcaggcggaggactggttcagcctggcggatctctgagactgtcttgtgccgccagcggctacaccttcaccagctactggatgaactgggtccgacaggcccctggcaaaggactggaatgggtcggaatgatcgaccccagcgacagcgagacacactacaaccacatcttcaaggaccgcttcaccatcagcgccgacaccagcaagaataccgcctacctccagatgaactccctgagagccgaggacaccgccgtgtactactgcgccagaaacctgtatctgttcggccagggaaccctggtcacagtgtcatctacgcgtatccagaaccctgatcctgccgtgtaccagctgcgggatagcaagagcagcgacaagagcgtgtgtctgttcaccgacttcgacagccagaccaacgtgtcccagagcaaggactccgacgtgtacatcaccgataagtgcgtgctggacatgcggagcatggacttcaagagcaactccgccgtggcctggtccaacaagtccgatttcgcctgcgccaacgccttcaacaacagcattatccccgaggacacattcttcccaagccccgagagcagctgcgacgtgaagctggtggaaaagagcttcgagacagacaccaacctgaacttccagaacctgagcgtgatcggcttcagaatcctgctgctgaaagtggccggctttaacctgctgatgaccctgcggctgtggtccagctaa

SEQ ID NO: 36826 - DNA, 2718 bp, synthetic construct
  source 1..2718: mol_type = other DNA
atggccttaccagtgaccgccttgctcctgccgctggccttgctgctccacgccgccaggccggaagtgcagctggttgaatctggcggaggactggttcaggctggcggatctctgagactgtcttgtgccgccagcggcagaacctttagcatgggctggtttagacaggcccctggcaaagagagagagttcgtcgccgccatcacatactctggcggcagcccttactacgccgactctgtgaagggcagattcaccatcagccgggacaacgccaagaacaccgtgtacctccagatgaacagcctgaagcctgaggacaccgccgtgtactactgcgccgccaatccaacatacggcagcgactggaacgccgagaattggggccagggaacccaagtgacagtgtctagcggtaccggcggaggcggatctggcggcggaggtagcggtggcggaggatctgaattcgacatccagatgacacagagccctagcagcctgtctgccagcgtgggagacagagtgaccatcacatgcaagagcagccagagcctgctggactccgatggcaagacctacctgaactggtatcagcagaagcccggcaaggcccctaagctgctgatctacctggtgtccaagctggatagcggcgtgcccagcagattttctggcagcggcagcggaaccgacttcaccctgacaatatccagcctccagcctgaggacttcgccacctactactgctggcaaggcacccactttccattcaccttcggccagggcaccaaggtggaaatcaaaagactcgagatccagaaccctgatcctgccgtgtaccagctgcgggatagcaagagcagcgacaagagcgtgtgtctgttcaccgacttcgacagccagaccaacgtgtcccagagcaaggactccgacgtgtacatcaccgataagtgcgtgctggacatgcggagcatggacttcaagagcaactccgccgtggcctggtccaacaagtccgatttcgcctgcgccaacgccttcaacaacagcattatccccgaggacacattcttcccaagcagcgacgtgccctgcgacgtgaagctggtggaaaagagcttcgagacagacaccaacctgaacttccagaacctgagcgtgatcggcttcagaatcctgctgctgaaagtggccggctttaacctgctgatgaccctgcggctgtggtccagccgcgccaagagaagcggatctggcgtgaagcagaccctgaatttcgacctgctgaagctggctggcgacgtggaatccaacccaggccctactagtaccatggactggatttggcgcatccttttccttgtcggcgctgctaccggcgcccattccgggccccaggtgcagctggttgaatctggcggaggatctgttcaggctggcggctctctgagactgtcttgtggcgcttccggcaacatcagcagcagaaactgcatgggctggttcagacaggcccctggcaaagagagagaaggcgttgccgccatcggacaagtgaccggcagatcctactacgtggacagcgtgaagggcagattcaccatcagcctggacaacgccaagaacaccctgtacctccagatgaacacactgaagcccgaggacaccgccatgtactactgtgctgctgcccctggctgtctgctgtctgcacttagaagcgccgactacagaaactggggccagggaacccaagtgacagtgtctagtggatccggcggcggaggatctggcggaggcggatctgggggcggaggctctttcgaagaagtgcagctggttgaatcaggcggaggactggttcagcctggcggatctctgagactgtcttgtgccgccagcggctacaccttcaccagctactggatgaactgggtccgacaggcccctggcaaaggactggaatgggtcggaatgatcgaccccagcgacagcgagacacactacaaccacatcttcaaggaccgcttcaccatcagcgccgacaccagcaagaataccgcctacctccagatgaactccctgagagccgaggacaccgccgtgtactactgcgccagaaacctgtatctgttcggccagggaaccctggtcacagtgtcatctacgcgtgaggacctgaagaacgtgttcccacctgaggtggccgtgttcgagcctagcaaggccgagatcgcccacacccagaaagccaccctcgtgtgcctggctaccggcttctaccccgaccatgtggaactgtcttggtgggtcaacggcaaagaggtgcacagcggcgtgtgtaccgacccccagccactgaaagaacagcccgccctgaacgacagccggtactgcctgagcagcagactgagagtgtccgccaccttctggcagaacccccggaaccacttcagatgccaggtgcagttctacggcctgagcgagaacgacgagtggacccaggacagagccaagcccgtgacccagatcgtgtctgccgaagcctggggcagagccgattgcggcatcaccagcgccagctaccaccagggcgtgctgagcgccaccatcctgtacgagatcctgctgggcaaggccaccctgtacgccgtgctggtgtctgccctggtgctgatggctatggtcaagcggaaggacagccggggataa

SEQ ID NO: 36827 - DNA, 2709 bp, synthetic construct
  source 1..2709: mol_type = other DNA
atggccttaccagtgaccgccttgctcctgccgctggccttgctgctccacgccgccaggccgcaggtgcagctggttgaatctggcggaggatctgttcaggctggcggctctctgagactgtcttgtggcgcttccggcaacatcagcagcagaaactgcatgggctggttcagacaggcccctggcaaagagagagaaggcgttgccgccatcggacaagtgaccggcagatcctactacgtggacagcgtgaagggcagattcaccatcagcctggacaacgccaagaacaccctgtacctccagatgaacacactgaagcccgaggacaccgccatgtactactgtgctgctgcccctggctgtctgctgtctgcacttagaagcgccgactacagaaactggggccagggaacccaagtgacagtgtctagtggtaccggcggaggcggatctggcggcggaggtagcggtggcggaggatctgaattcgacatccagatgacacagagccctagcagcctgtctgccagcgtgggagacagagtgaccatcacatgcaagagcagccagagcctgctggactccgatggcaagacctacctgaactggtatcagcagaagcccggcaaggcccctaagctgctgatctacctggtgtccaagctggatagcggcgtgcccagcagattttctggcagcggcagcggaaccgacttcaccctgacaatatccagcctccagcctgaggacttcgccacctactactgctggcaaggcacccactttccattcaccttcggccagggcaccaaggtggaaatcaaaagactcgaggacctgaagaacgtgttcccacctgaggtggccgtgttcgagcctagcgaggccgagatcagccacacccagaaagccaccctcgtgtgcctggctaccggcttctaccccgaccatgtggaactgtcttggtgggtcaacggcaaagaggtgcacagcggcgtgtgtaccgacccccagccactgaaagaacagcccgccctgaacgacagccggtactgcctgagcagcagactgagagtgtccgccaccttctggcagaacccccggaaccacttcagatgccaggtgcagttctacggcctgagcgagaacgacgagtggacccaggacagagccaagcccgtgacccagatcgtgtctgccgaagcctggggcagagccgattgcggctttaccagcgagagctaccagcagggcgtgctgagcgccaccatcctgtacgagatcctgctgggcaaggccaccctgtacgccgtgctggtgtctgccctggtgctgatggctatggtcaagcggaaggacagccggggaagggccaagcgatctggatctggagcaacaaacttctcactactcaaacaagcaggtgacgtggaggagaatcccgggcctactagtgccaccatggactggatttggcgcatccttttccttgtcggcgctgctaccggcgcccattccgggcccgaagtgcaactggttgaatccggtggcggcctggtgcaagcaggcggatctctcagacttagctgtgccgcctccggcagaaccttcacaatgggatggtttaggcaggctccagggaaagagagagagttcgtcgccgccatctctctgtctcccacactggcctactacgccgactctgtgaaaggccggttcaccatctccagagataatgccaagaacaccgtggtgctgcaaatgaactctctgaaacccgaggatacagccctgtactattgtgccgctgaccggaagtccgtgatgagcatcagacccgattactggggacagggcacacaagtcacagtgtcctctggatccggcggcggaggatctggcggaggcggatctgggggcggaggctctttcgaagaagtgcagctggttgaatcaggcggaggactggttcagcctggcggatctctgagactgtcttgtgccgccagcggctacaccttcaccagctactggatgaactgggtccgacaggcccctggcaaaggactggaatgggtcggaatgatcgaccccagcgacagcgagacacactacaaccacatcttcaaggaccgcttcaccatcagcgccgacaccagcaagaataccgcctacctccagatgaactccctgagagccgaggacaccgccgtgtactactgcgccagaaacctgtatctgttcggccagggaaccctggtcacagtgtcatctacgcgtatccagaaccctgatcctgccgtgtaccagctgcgggatagcaagagcagcgacaagagcgtgtgtctgttcaccgacttcgacagccagaccaacgtgtcccagagcaaggactccgacgtgtacatcaccgataagtgcgtgctggacatgcggagcatggacttcaagagcaactccgccgtggcctggtccaacaagtccgatttcgcctgcgccaacgccttcaacaacagcattatccccgaggacacattcttcccaagccccgagagcagctgcgacgtgaagctggtggaaaagagcttcgagacagacaccaacctgaacttccagaacctgagcgtgatcggcttcagaatcctgctgctgaaagtggccggctttaacctgctgatgaccctgcggctgtggtccagctaa

SEQ ID NO: 36828 - DNA, 2298 bp, synthetic construct
  source 1..2298: mol_type = other DNA
atggccttaccagtgaccgccttgctcctgccgctggccttgctgctccacgccgccaggccgcaggtgcagctggttgaatctggcggaggatctgttcaggctggcggctctctgagactgtcttgtggcgcttccggcaacatcagcagcagaaactgcatgggctggttcagacaggcccctggcaaagagagagaaggcgttgccgccatcggacaagtgaccggcagatcctactacgtggacagcgtgaagggcagattcaccatcagcctggacaacgccaagaacaccctgtacctccagatgaacacactgaagcccgaggacaccgccatgtactactgtgctgctgcccctggctgtctgctgtctgcacttagaagcgccgactacagaaactggggccagggaacccaagtgacagtgtctagtggtaccggcggaggcggatctggcggcggaggtagcggtggcggaggatctgaattcgacatccagatgacacagagccctagcagcctgtctgccagcgtgggagacagagtgaccatcacatgcaagagcagccagagcctgctggactccgatggcaagacctacctgaactggtatcagcagaagcccggcaaggcccctaagctgctgatctacctggtgtccaagctggatagcggcgtgcccagcagattttctggcagcggcagcggaaccgacttcaccctgacaatatccagcctccagcctgaggacttcgccacctactactgctggcaaggcacccactttccattcaccttcggccagggcaccaaggtggaaatcaaaagactcgaggacctgaagaacgtgttcccacctgaggtggccgtgttcgagcctagcgaggccgagatcagccacacccagaaagccaccctcgtgtgcctggctaccggcttctaccccgaccatgtggaactgtcttggtgggtcaacggcaaagaggtgcacagcggcgtgtgtaccgacccccagccactgaaagaacagcccgccctgaacgacagccggtactgcctgagcagcagactgagagtgtccgccaccttctggcagaacccccggaaccacttcagatgccaggtgcagttctacggcctgagcgagaacgacgagtggacccaggacagagccaagcccgtgacccagatcgtgtctgccgaagcctggggcagagccgattgcggctttaccagcgagagctaccagcagggcgtgctgagcgccaccatcctgtacgagatcctgctgggcaaggccaccctgtacgccgtgctggtgtctgccctggtgctgatggctatggtcaagcggaaggacagccggggaagggccaagcgatctggatctggagcaacaaacttctcactactcaaacaagcaggtgacgtggaggagaatcccgggcctactagtgccaccatggactggatttggcgcatccttttccttgtcggcgctgctaccggcgcccattccttcgaagaagtgcagctggttgaatcaggcggaggactggttcagcctggcggatctctgagactgtcttgtgccgccagcggctacaccttcaccagctactggatgaactgggtccgacaggcccctggcaaaggactggaatgggtcggaatgatcgaccccagcgacagcgagacacactacaaccacatcttcaaggaccgcttcaccatcagcgccgacaccagcaagaataccgcctacctccagatgaactccctgagagccgaggacaccgccgtgtactactgcgccagaaacctgtatctgttcggccagggaaccctggtcacagtgtcatctacgcgtatccagaaccctgatcctgccgtgtaccagctgcgggatagcaagagcagcgacaagagcgtgtgtctgttcaccgacttcgacagccagaccaacgtgtcccagagcaaggactccgacgtgtacatcaccgataagtgcgtgctggacatgcggagcatggacttcaagagcaactccgccgtggcctggtccaacaagtccgatttcgcctgcgccaacgccttcaacaacagcattatccccgaggacacattcttcccaagccccgagagcagctgcgacgtgaagctggtggaaaagagcttcgagacagacaccaacctgaacttccagaacctgagcgtgatcggcttcagaatcctgctgctgaaagtggccggctttaacctgctgatgaccctgcggctgtggtccagctaa

SEQ ID NO: 36829 - DNA, 2298 bp, synthetic construct
  source 1..2298: mol_type = other DNA
atggccttaccagtgaccgccttgctcctgccgctggccttgctgctccacgccgccaggccgcaagttcagctggtggaaagcggtggtggcgttgtgcaacctggtggaagtctgaggctgagctgtgccgcttctggcctgagctttagcacctacactgtggcctggttcaggcaggctcccggaaagggtcttgaaggcgtggccgccattccttacaccagccagcacatggtgtacacagacagcgtcagaggccggttcaccatcagcagagacaactccaagaatacgctctatctccagatgaactctctgcgcgccgaagatacagccgtgtattactgcgccaccgacagacggcctggcacctctatgctggctatcaacggctacaacagatggggacagggaaccaccgtgaccgtgtcatctggtaccggcggaggcggatctggcggcggaggtagcggtggcggaggatctgaattcgacatccagatgacacagagccctagcagcctgtctgccagcgtgggagacagagtgaccatcacatgcaagagcagccagagcctgctggactccgatggcaagacctacctgaactggtatcagcagaagcccggcaaggcccctaagctgctgatctacctggtgtccaagctggatagcggcgtgcccagcagattttctggcagcggcagcggaaccgacttcaccctgacaatatccagcctccagcctgaggacttcgccacctactactgctggcaaggcacccactttccattcaccttcggccagggcaccaaggtggaaatcaaaagactcgaggacctgaagaacgtgttcccacctgaggtggccgtgttcgagcctagcgaggccgagatcagccacacccagaaagccaccctcgtgtgcctggctaccggcttctaccccgaccatgtggaactgtcttggtgggtcaacggcaaagaggtgcacagcggcgtgtgtaccgacccccagccactgaaagaacagcccgccctgaacgacagccggtactgcctgagcagcagactgagagtgtccgccaccttctggcagaacccccggaaccacttcagatgccaggtgcagttctacggcctgagcgagaacgacgagtggacccaggacagagccaagcccgtgacccagatcgtgtctgccgaagcctggggcagagccgattgcggctttaccagcgagagctaccagcagggcgtgctgagcgccaccatcctgtacgagatcctgctgggcaaggccaccctgtacgccgtgctggtgtctgccctggtgctgatggctatggtcaagcggaaggacagccggggaagggccaagcgatctggatctggagcaacaaacttctcactactcaaacaagcaggtgacgtggaggagaatcccgggcctactagtgccaccatggactggatttggcgcatccttttccttgtcggcgctgctaccggcgcccattccttcgaagaagtgcagctggttgaatcaggcggaggactggttcagcctggcggatctctgagactgtcttgtgccgccagcggctacaccttcaccagctactggatgaactgggtccgacaggcccctggcaaaggactggaatgggtcggaatgatcgaccccagcgacagcgagacacactacaaccacatcttcaaggaccgcttcaccatcagcgccgacaccagcaagaataccgcctacctccagatgaactccctgagagccgaggacaccgccgtgtactactgcgccagaaacctgtatctgttcggccagggaaccctggtcacagtgtcatctacgcgtatccagaaccctgatcctgccgtgtaccagctgcgggatagcaagagcagcgacaagagcgtgtgtctgttcaccgacttcgacagccagaccaacgtgtcccagagcaaggactccgacgtgtacatcaccgataagtgcgtgctggacatgcggagcatggacttcaagagcaactccgccgtggcctggtccaacaagtccgatttcgcctgcgccaacgccttcaacaacagcattatccccgaggacacattcttcccaagccccgagagcagctgcgacgtgaagctggtggaaaagagcttcgagacagacaccaacctgaacttccagaacctgagcgtgatcggcttcagaatcctgctgctgaaagtggccggctttaacctgctgatgaccctgcggctgtggtccagctaa

SEQ ID NO: 36830 - DNA, 2295 bp, synthetic construct
  source 1..2295: mol_type = other DNA
atggccttaccagtgaccgccttgctcctgccgctggccttgctgctccacgccgccaggccggacatccagatgacacagagccctagcagcctgtctgccagcgtgggagacagagtgaccatcacatgcaagagcagccagagcctgctggactccgatggcaagacctacctgaactggtatcagcagaagcccggcaaggcccctaagctgctgatctacctggtgtccaagctggatagcggcgtgcccagcagattttctggcagcggcagcggaaccgacttcaccctgacaatatccagcctccagcctgaggacttcgccacctactactgctggcaaggcacccactttccattcaccttcggccagggcaccaaggtggaaatcaaaagactcgaggacctgaagaacgtgttcccacctgaggtggccgtgttcgagcctagcgaggccgagatcagccacacccagaaagccaccctcgtgtgcctggctaccggcttctaccccgaccatgtggaactgtcttggtgggtcaacggcaaagaggtgcacagcggcgtgtgtaccgacccccagccactgaaagaacagcccgccctgaacgacagccggtactgcctgagcagcagactgagagtgtccgccaccttctggcagaacccccggaaccacttcagatgccaggtgcagttctacggcctgagcgagaacgacgagtggacccaggacagagccaagcccgtgacccagatcgtgtctgccgaagcctggggcagagccgattgcggctttaccagcgagagctaccagcagggcgtgctgagcgccaccatcctgtacgagatcctgctgggcaaggccaccctgtacgccgtgctggtgtctgccctggtgctgatggctatggtcaagcggaaggacagccggggaagggccaagcgatctggatctggagcaacaaacttctcactactcaaacaagcaggtgacgtggaggagaatcccgggcctactagtaccatggactggatttggcgcatccttttccttgtcggcgctgctaccggcgcccattccgggccccaagttcagctggtggaaagcggtggtggcgttgtgcaacctggtggaagtctgaggctgagctgtgccgcttctggcctgagctttagcacctacactgtggcctggttcaggcaggctcccggaaagggtcttgaaggcgtggccgccattccttacaccagccagcacatggtgtacacagacagcgtcagaggccggttcaccatcagcagagacaactccaagaatacgctctatctccagatgaactctctgcgcgccgaagatacagccgtgtattactgcgccaccgacagacggcctggcacctctatgctggctatcaacggctacaacagatggggacagggaaccaccgtgaccgtgtcatctggatccggcggcggaggatctggcggaggcggatctgggggcggaggctctttcgaagaagtgcagctggttgaatcaggcggaggactggttcagcctggcggatctctgagactgtcttgtgccgccagcggctacaccttcaccagctactggatgaactgggtccgacaggcccctggcaaaggactggaatgggtcggaatgatcgaccccagcgacagcgagacacactacaaccacatcttcaaggaccgcttcaccatcagcgccgacaccagcaagaataccgcctacctccagatgaactccctgagagccgaggacaccgccgtgtactactgcgccagaaacctgtatctgttcggccagggaaccctggtcacagtgtcatctacgcgtatccagaaccctgatcctgccgtgtaccagctgcgggatagcaagagcagcgacaagagcgtgtgtctgttcaccgacttcgacagccagaccaacgtgtcccagagcaaggactccgacgtgtacatcaccgataagtgcgtgctggacatgcggagcatggacttcaagagcaactccgccgtggcctggtccaacaagtccgatttcgcctgcgccaacgccttcaacaacagcattatccccgaggacacattcttcccaagccccgagagcagctgcgacgtgaagctggtggaaaagagcttcgagacagacaccaacctgaacttccagaacctgagcgtgatcggcttcagaatcctgctgctgaaagtggccggctttaacctgctgatgaccctgcggctgtggtccagctaa

SEQ ID NO: 36831 - DNA, 2301 bp, synthetic construct
  source 1..2301: mol_type = other DNA
atggccttaccagtgaccgccttgctcctgccgctggccttgctgctccacgccgccaggccggacatccagatgacacagagccctagcagcctgtctgccagcgtgggagacagagtgaccatcacatgcaagagcagccagagcctgctggactccgatggcaagacctacctgaactggtatcagcagaagcccggcaaggcccctaagctgctgatctacctggtgtccaagctggatagcggcgtgcccagcagattttctggcagcggcagcggaaccgacttcaccctgacaatatccagcctccagcctgaggacttcgccacctactactgctggcaaggcacccactttccattcaccttcggccagggcaccaaggtggaaatcaaaagactcgaggacctgaagaacgtgttcccacctgaggtggccgtgttcgagcctagcgaggccgagatcagccacacccagaaagccaccctcgtgtgcctggctaccggcttctaccccgaccatgtggaactgtcttggtgggtcaacggcaaagaggtgcacagcggcgtgtgtaccgacccccagccactgaaagaacagcccgccctgaacgacagccggtactgcctgagcagcagactgagagtgtccgccaccttctggcagaacccccggaaccacttcagatgccaggtgcagttctacggcctgagcgagaacgacgagtggacccaggacagagccaagcccgtgacccagatcgtgtctgccgaagcctggggcagagccgattgcggctttaccagcgagagctaccagcagggcgtgctgagcgccaccatcctgtacgagatcctgctgggcaaggccaccctgtacgccgtgctggtgtctgccctggtgctgatggctatggtcaagcggaaggacagccggggaagggccaagcgatctggatctggagcaacaaacttctcactactcaaacaagcaggtgacgtggaggagaatcccgggcctactagtaccatggactggatttggcgcatccttttccttgtcggcgctgctaccggcgcccattccgggcccgaggtgcagctggttgaatctggcggaggatctgttcaggctggcggctctctgagactgtcttgtgccgccagcggctacacctacagcatcaactgcatgggctggttcagacaggcccctggcaaagagagagaaggcgttgccgccatctctaccggcggaggcagaaccgattaccgggattctgtgaagggcagattcaccatcagccaggacaacgccaagaacaccgtgtacctccagatgaacagcctgaagcctgaggacaccgccatgtactactgtgccggcaagaccacctatcctggctacggatgtggcctgggcagaagcgcctacaattattggggccagggcacccaagtgaccgtgtcatctggatccggcggcggaggatctggcggaggcggatctgggggcggaggctctttcgaagaagtgcagctggttgaatcaggcggaggactggttcagcctggcggatctctgagactgtcttgtgccgccagcggctacaccttcaccagctactggatgaactgggtccgacaggcccctggcaaaggactggaatgggtcggaatgatcgaccccagcgacagcgagacacactacaaccacatcttcaaggaccgcttcaccatcagcgccgacaccagcaagaataccgcctacctccagatgaactccctgagagccgaggacaccgccgtgtactactgcgccagaaacctgtatctgttcggccagggaaccctggtcacagtgtcatctacgcgtatccagaaccctgatcctgccgtgtaccagctgcgggatagcaagagcagcgacaagagcgtgtgtctgttcaccgacttcgacagccagaccaacgtgtcccagagcaaggactccgacgtgtacatcaccgataagtgcgtgctggacatgcggagcatggacttcaagagcaactccgccgtggcctggtccaacaagtccgatttcgcctgcgccaacgccttcaacaacagcattatccccgaggacacattcttcccaagccccgagagcagctgcgacgtgaagctggtggaaaagagcttcgagacagacaccaacctgaacttccagaacctgagcgtgatcggcttcagaatcctgctgctgaaagtggccggctttaacctgctgatgaccctgcggctgtggtccagctaa

SEQ ID NO: 36832 - DNA, 1857 bp, synthetic construct
  source 1..1857: mol_type = other DNA
atggccttaccagtgaccgccttgctcctgccgctggccttgctgctccacgccgccaggccggacatccagatgacacagagccctagcagcctgtctgccagcgtgggagacagagtgaccatcacatgcaagagcagccagagcctgctggactccgatggcaagacctacctgaactggtatcagcagaagcccggcaaggcccctaagctgctgatctacctggtgtccaagctggatagcggcgtgcccagcagattttctggcagcggcagcggaaccgacttcaccctgacaatatccagcctccagcctgaggacttcgccacctactactgctggcaaggcacccactttccattcaccttcggccagggcaccaaggtggaaatcaaaagactcgaggacctgaagcacgtgttcccacctgaggtggccgtgttcgagcctagcgacgccgagatctggcacacccagaaagccaccctcgtgtgcctggctaccggcttctaccccgaccatgtggaactgtcttggtgggtcaacggcaaagaggtgcacagcggcgtgtctaccgacccccagccactgaaagaacagcccgccctgaacgacagccggtactgcctgagcagcagactgagagtgtccgccaccttctggcagaacccccggaaccacttcagatgccaggtgcagttctacggcctgagcgagaacgacgagtggacccaggacagagccaagcccgtgacccagatcgtgtctgccgaagcctggggcagagccgattgcggctttaccagcgagagctaccagcagggcgtgctgagcgccaccatcctgtacgagatcctgctgggcaaggccaccctgtacgccgtgctggtgtctgccctggtgctgatggctatggtcaagcggaaggacagccggggaagggccaagcgatctggatctggagcaacaaacttctcactactcaaacaagcaggtgacgtggaggagaatcccgggcctactagtatggactggatttggcgcatccttttccttgtcggcgctgctaccggcgcgcattccttcgaagaagtgcagctggttgaatcaggcggaggactggttcagcctggcggatctctgagactgtcttgtgccgccagcggctacaccttcaccagctactggatgaactgggtccgacaggcccctggcaaaggactggaatgggtcggaatgatcgaccccagcgacagcgagacacactacaaccacatcttcaaggaccgcttcaccatcagcgccgacaccagcaagaataccgcctacctccagatgaactccctgagagccgaggacaccgccgtgtactactgcgccagaaacctgtatctgttcggccagggaaccctggtcacagtgtcatctacgcgtatccagaaccctgatcctgccgtgtaccagctgcgggatagcaagagcagcgacaagagcgtgtgtctgttcaccgacttcgacagccagaccaacgtgtcccagagcaaggactccgacgtgtacatcaccgataagaccgtgctggacatgcggagcatggacttcaagagcaactccgccgtggcctggtccagcaagtccgatttcgcctgcgccaacgccttcaacaacagcattatccccgaggacacattcttcccaagccccgagatggcctgcgacgtgaagctggtggaaaagagcttcgagacagacaccaacctgaacttccagaacctgctcgtgatctggctgagaatcctgctgctgaaagtggccggctttaacctgctgatgaccctgcggctgtggtccagc

SEQ ID NO: 36833 - DNA, 1857 bp, synthetic construct
  source 1..1857: mol_type = other DNA
atggccttaccagtgaccgccttgctcctgccgctggccttgctgctccacgccgccaggccggacatccagatgacacagagccctagcagcctgtctgccagcgtgggagacagagtgaccatcacatgcaagagcagccagagcctgctggactccgatggcaagacctacctgaactggtatcagcagaagcccggcaaggcccctaagctgctgatctacctggtgtccaagctggatagcggcgtgcccagcagattttctggcagcggcagcggaaccgacttcaccctgacaatatccagcctccagcctgaggacttcgccacctactactgctggcaaggcacccactttccattcaccttcggccagggcaccaaggtggaaatcaaaagactcgaggacctgaagcacgtgttcccacctgaggtggccgtgttcgagcctagcgacgccgagatctggcacacccagaaagccaccctcgtgtgcctggctaccggcttctaccccgaccatgtggaactgtcttggtgggtcaacggcaaagaggtgcacagcggcgtgtctaccgacccccagccactgaaagaacagcccgccctgaacgacagccggtactgcctgagcagcagactgagagtgtccgccaccttctggcagaacccccggaaccacttcagatgccaggtgcagttctacggcctgagcgagaacgacgagtggacccaggacagagccaagcccgtgacccagatcgtgtctgccgaagcctggggcagagccgattgcggctttaccagcgagagctaccagcagggcgtgctgagcgccaccatcctgtacgagatcctgctgggcaaggccaccctgtacgccgtgctggtgtctgccctggtgctgatggctatggtcaagcggaaggacagccggggaagggccaagcgatctggatctggagcaacaaacttctcactactcaaacaagcaggtgacgtggaggagaatcccgggcctactagtatggactggatttggcgcatccttttccttgtcggcgctgctaccggcgcgcattccttcgaagaagtgcagctggttgaatcaggcggaggactggttcagcctggcggatctctgagactgtcttgtgccgccagcggctacaccttcaccagctactggatgaactgggtccgacaggcccctggcaaaggactggaatgggtcggaatgatcgaccccagcgacagcgagacacactacaaccacatcttcaaggaccgcttcaccatcagcgccgacaccagcaagaataccgcctacctccagatgaactccctgagagccgaggacaccgccgtgtactactgcgccagaaacctgtatctgttcggccagggaaccctggtcacagtgtcatctacgcgtatccagaaccctgatcctgccgtgtaccagctgcgggatagcaagagcagcgacaagagcgtgtgtctgttcaccgacttcgacagccagaccaacgtgtcccagagcaaggactccgacgtgtacatcaccgataagaccgtgctggacatgcggagcatggacttcaagagcaactccgccgtggcctggtccaccaagtccgatttcgcctgcgccaacgccttcaacaacagcattatccccgaggacacattcttcccaagccccgaggtggtgtgcgacgtgaagctggtggaaaagagcttcgagacagacaccaacctgaacttccagaacctggtggtgatcggcgccagaatcctgctgctgaaagtggccggctttaacctgctgatgaccctgcggctgtggtccagc

SEQ ID NO: 36834 - DNA, 1857 bp, synthetic construct
  source 1..1857: mol_type = other DNA
atggccttaccagtgaccgccttgctcctgccgctggccttgctgctccacgccgccaggccggacatccagatgacacagagccctagcagcctgtctgccagcgtgggagacagagtgaccatcacatgcaagagcagccagagcctgctggactccgatggcaagacctacctgaactggtatcagcagaagcccggcaaggcccctaagctgctgatctacctggtgtccaagctggatagcggcgtgcccagcagattttctggcagcggcagcggaaccgacttcaccctgacaatatccagcctccagcctgaggacttcgccacctactactgctggcaaggcacccactttccattcaccttcggccagggcaccaaggtggaaatcaaaagactcgaggacctgaagaacgtgttcccacctgaggtggccgtgttcgagcctagcaaggccgagatcagcagaacccagaaagccaccctcgtgtgcctggctaccggcttctaccctcctcatgtggaactgtcttggtgggtcaacggcaaagaggtgcacgacggcgtgtgtaccgacccccagccactgaaagaacagcccgccctgaacgacagccggtactgcctgagcagcagactgagagtgtccgccaccttctggcagaacccccggaaccacttcagatgccaggtgcagttctacggcctgagcgagaacgacgagtggacccaggacagagccaagcccgtgacccagatcgtgtctgccgaagcctggggcagagccgattgcggctttaccagcgagagctaccagcagggcgtgctgagcgccaccatcctgtacgagatcctgctgggcaaggccaccctgtacgccgtgctggtgtctgccctggtgctgatggctatggtcaagcggaaggacagccggggaagggccaagcgatctggatctggagcaacaaacttctcactactcaaacaagcaggtgacgtggaggagaatcccgggcctactagtatggactggatttggcgcatccttttccttgtcggcgctgctaccggcgcgcattccttcgaagaagtgcagctggttgaatcaggcggaggactggttcagcctggcggatctctgagactgtcttgtgccgccagcggctacaccttcaccagctactggatgaactgggtccgacaggcccctggcaaaggactggaatgggtcggaatgatcgaccccagcgacagcgagacacactacaaccacatcttcaaggaccgcttcaccatcagcgccgacaccagcaagaataccgcctacctccagatgaactccctgagagccgaggacaccgccgtgtactactgcgccagaaacctgtatctgttcggccagggaaccctggtcacagtgtcatctacgcgtatccagaaccctgatcctgccgtgtaccagctgcgggatagcaagagcagcgacaagttcgtgtgtctgttcaccgacttcgacagccagatcaacgtgtcccagagcaaggactccgacgtgtacatcaccgataagtgcgtgctggacatgcggagcatggacttcaagagcaactccgccgtggcctggtccaacaagtccgatttcacctgcgccaacgccttcaacaacagcattatccccgaggacacattcttcccaagccccgagagcagctgcgacgtgaagctggtggaaaagagcttcgagacagacaccaacctgaacttccagaacctgagcgtgatcggcttcagaatcctgctgctgaaagtggccggctttaacctgctgatgaccctgcggctgtggtccagc

SEQ ID NO: 36835 - DNA, 2283 bp, synthetic construct
  source 1..2283: mol_type = other DNA
atggccttaccagtgaccgccttgctcctgccgctggccttgctgctccacgccgccaggccggacatccagatgacacagagccctagcagcctgtctgccagcgtgggagacagagtgaccatcacatgcaagagcagccagagcctgctggactccgatggcaagacctacctgaactggtatcagcagaagcccggcaaggcccctaagctgctgatctacctggtgtccaagctggatagcggcgtgcccagcagattttctggcagcggcagcggaaccgacttcaccctgacaatatccagcctccagcctgaggacttcgccacctactactgctggcaaggcacccactttccattcaccttcggccagggcaccaaggtggaaatcaaaagactcgaggacctgaagaacgtgttcccacctgaggtggccgtgttcgagcctagcgaggccgagatcagccacacccagaaagccaccctcgtgtgcctggctaccggcttctaccccgaccatgtggaactgtcttggtgggtcaacggcaaagaggtgcacagcggcgtgtgtaccgacccccagccactgaaagaacagcccgccctgaacgacagccggtactgcctgagcagcagactgagagtgtccgccaccttctggcagaacccccggaaccacttcagatgccaggtgcagttctacggcctgagcgagaacgacgagtggacccaggacagagccaagcccgtgacccagatcgtgtctgccgaagcctggggcagagccgattgcggctttaccagcgagagctaccagcagggcgtgctgagcgccaccatcctgtacgagatcctgctgggcaaggccaccctgtacgccgtgctggtgtctgccctggtgctgatggctatggtcaagcggaaggacagccggggaagggccaagcgatctggatctggagcaacaaacttctcactactcaaacaagcaggtgacgtggaggagaatcccgggcctactagtaccatggactggatttggcgcatccttttccttgtcggcgctgctaccggcgcccattccgggccccaggtgcagctccaagaaagcggacccggactggttaagccctctcagaccctgtctctgacctgcacagttagcggagccagcattaccacaggcgagtattattggaattggtttcggcagccaccaggcaaggggcttgagtggatgggtgctattgctgcctctggcagcaccacctactctcccagctttgagagcagaacctccatcagccgggacacctccaaaaaccagttctctctgaagctgtcctccgtgaccgctgctgacaccgccgtctattattgtggccggtctttcggcgtggcagctgtgaccacaggacagaacagaggccagggaacacttgtgaccgtgtcctctggatccggcggcggaggatctggcggaggcggatctgggggcggaggctctttcgaagaagtgcagctggttgaatcaggcggaggactggttcagcctggcggatctctgagactgtcttgtgccgccagcggctacaccttcaccagctactggatgaactgggtccgacaggcccctggcaaaggactggaatgggtcggaatgatcgaccccagcgacagcgagacacactacaaccacatcttcaaggaccgcttcaccatcagcgccgacaccagcaagaataccgcctacctccagatgaactccctgagagccgaggacaccgccgtgtactactgcgccagaaacctgtatctgttcggccagggaaccctggtcacagtgtcatctacgcgtatccagaaccctgatcctgccgtgtaccagctgcgggatagcaagagcagcgacaagagcgtgtgtctgttcaccgacttcgacagccagaccaacgtgtcccagagcaaggactccgacgtgtacatcaccgataagtgcgtgctggacatgcggagcatggacttcaagagcaactccgccgtggcctggtccaacaagtccgatttcgcctgcgccaacgccttcaacaacagcattatccccgaggacacattcttcccaagccccgagagcagctgcgacgtgaagctggtggaaaagagcttcgagacagacaccaacctgaacttccagaacctgagcgtgatcggcttcagaatcctgctgctgaaagtggccggctttaacctgctgatgaccctgcggctgtggtccagc

SEQ ID NO: 36836 - DNA, 2706 bp, synthetic construct
  source 1..2706: mol_type = other DNA
atggccttaccagtgaccgccttgctcctgccgctggccttgctgctccacgccgccaggccgcaggttcagctgcaagagtctggccctggcctggtcaagcctagccaaacactgagcctgacctgtaccgtgtctggcggctctatcaccaccggcgagttctactggaactggttcagacagcctcctggcaaaggactggaatggatgggagccattgccgccagcggcagcacaacatacagccctagcttcgagagccggaccagcatcagcagagacaccagcaagaatcagttcagcctgaagctgagcagcgtgacagccgccgatacagccgtgtattactgcggcagatcctttggagtggccgccgtgacaaccggccagaatagaggacagggcaccctggtcacagtgtctagcggtaccggcggaggcggatctggcggcggaggtagcggtggcggaggatctgaattcgacatccagatgacacagagccctagcagcctgtctgccagcgtgggagacagagtgaccatcacatgcaagagcagccagagcctgctggactccgatggcaagacctacctgaactggtatcagcagaagcccggcaaggcccctaagctgctgatctacctggtgtccaagctggatagcggcgtgcccagcagattttctggcagcggcagcggaaccgacttcaccctgacaatatccagcctccagcctgaggacttcgccacctactactgctggcaaggcacccactttccattcaccttcggccagggcaccaaggtggaaatcaaaagactcgagatccagaaccctgatcctgccgtgtaccagctgcgggatagcaagagcagcgacaagagcgtgtgtctgttcaccgacttcgacagccagaccaacgtgtcccagagcaaggactccgacgtgtacatcaccgataagtgcgtgctggacatgcggagcatggacttcaagagcaactccgccgtggcctggtccaacaagtccgatttcgcctgcgccaacgccttcaacaacagcattatccccgaggacacattcttcccaagcagcgacgtgccctgcgacgtgaagctggtggaaaagagcttcgagacagacaccaacctgaacttccagaacctgagcgtgatcggcttcagaatcctgctgctgaaagtggccggctttaacctgctgatgaccctgcggctgtggtccagccgcgccaagagaagcggatctggcgtgaagcagaccctgaatttcgacctgctgaagctggctggcgacgtggaatccaacccaggccctactagtaccatggactggatttggcgcatccttttccttgtcggcgctgctaccggcgcccattccgggcccgaagtgcaactggttgaatccggtggcggcctggtgcaacccggcggatctctcagacttagctgtgccgcctccggcagaaccttcacaatgggatggtacaggcaggctccagggaaagagagagagttcgtcgccgccatctctctgtctcccacactggcctactacgccgactctgtgaaaggccggttcaccatctccagagataatagcaagaacaccgtggtgctgcaaatgaactctctgagagccgaggatacagccctgtactattgtgccgctgaccggaagtccgtgatgagcatcagacccgattactggggacagggcacactggtcacagtgtctagtggatccggcggcggaggatctggcggaggcggatctgggggcggaggctctttcgaagaagtgcagctggttgaatcaggcggaggactggttcagcctggcggatctctgagactgtcttgtgccgccagcggctacaccttcaccagctactggatgaactgggtccgacaggcccctggcaaaggactggaatgggtcggaatgatcgaccccagcgacagcgagacacactacaaccacatcttcaaggaccgcttcaccatcagcgccgacaccagcaagaataccgcctacctccagatgaactccctgagagccgaggacaccgccgtgtactactgcgccagaaacctgtatctgttcggccagggaaccctggtcacagtgtcatctacgcgtgaggacctgaagaacgtgttcccacctgaggtggccgtgttcgagcctagcaaggccgagatcgcccacacccagaaagccaccctcgtgtgcctggctaccggcttctaccccgaccatgtggaactgtcttggtgggtcaacggcaaagaggtgcacagcggcgtgtgtaccgacccccagccactgaaagaacagcccgccctgaacgacagccggtactgcctgagcagcagactgagagtgtccgccaccttctggcagaacccccggaaccacttcagatgccaggtgcagttctacggcctgagcgagaacgacgagtggacccaggacagagccaagcccgtgacccagatcgtgtctgccgaagcctggggcagagccgattgcggcatcaccagcgccagctaccaccagggcgtgctgagcgccaccatcctgtacgagatcctgctgggcaaggccaccctgtacgccgtgctggtgtctgccctggtgctgatggctatggtcaagcggaaggacagccgggga

SEQ ID NO: 36837 - DNA, 2295 bp, synthetic construct
  source 1..2295: mol_type = other DNA
atggccttaccagtgaccgccttgctcctgccgctggccttgctgctccacgccgccaggccgcaggttcagctgcaagagtctggccctggcctggtcaagcctagccaaacactgagcctgacctgtaccgtgtctggcggctctatcaccaccggcgagttctactggaactggttcagacagcctcctggcaaaggactggaatggatgggagccattgccgccagcggcagcacaacatacagccctagcttcgagagccggaccagcatcagcagagacaccagcaagaatcagttcagcctgaagctgagcagcgtgacagccgccgatacagccgtgtattactgcggcagatcctttggagtggccgccgtgacaaccggccagaatagaggacagggcaccctggtcacagtgtctagcggtaccggcggaggcggatctggcggcggaggtagcggtggcggaggatctgaattcgacatccagatgacacagagccctagcagcctgtctgccagcgtgggagacagagtgaccatcacatgcaagagcagccagagcctgctggactccgatggcaagacctacctgaactggtatcagcagaagcccggcaaggcccctaagctgctgatctacctggtgtccaagctggatagcggcgtgcccagcagattttctggcagcggcagcggaaccgacttcaccctgacaatatccagcctccagcctgaggacttcgccacctactactgctggcaaggcacccactttccattcaccttcggccagggcaccaaggtggaaatcaaaagactcgagatccagaaccctgatcctgccgtgtaccagctgcgggatagcaagagcagcgacaagagcgtgtgtctgttcaccgacttcgacagccagaccaacgtgtcccagagcaaggactccgacgtgtacatcaccgataagtgcgtgctggacatgcggagcatggacttcaagagcaactccgccgtggcctggtccaacaagtccgatttcgcctgcgccaacgccttcaacaacagcattatccccgaggacacattcttcccaagcagcgacgtgccctgcgacgtgaagctggtggaaaagagcttcgagacagacaccaacctgaacttccagaacctgagcgtgatcggcttcagaatcctgctgctgaaagtggccggctttaacctgctgatgaccctgcggctgtggtccagccgcgccaagagaagcggatctggcgtgaagcagaccctgaatttcgacctgctgaagctggctggcgacgtggaatccaacccaggccctactagtaccatggactggatttggcgcatccttttccttgtcggcgctgctaccggcgcccattccttcgaagaagtgcagctggttgaatcaggcggaggactggttcagcctggcggatctctgagactgtcttgtgccgccagcggctacaccttcaccagctactggatgaactgggtccgacaggcccctggcaaaggactggaatgggtcggaatgatcgaccccagcgacagcgagacacactacaaccacatcttcaaggaccgcttcaccatcagcgccgacaccagcaagaataccgcctacctccagatgaactccctgagagccgaggacaccgccgtgtactactgcgccagaaacctgtatctgttcggccagggaaccctggtcacagtgtcatctacgcgtgaggacctgaagaacgtgttcccacctgaggtggccgtgttcgagcctagcaaggccgagatcgcccacacccagaaagccaccctcgtgtgcctggctaccggcttctaccccgaccatgtggaactgtcttggtgggtcaacggcaaagaggtgcacagcggcgtgtgtaccgacccccagccactgaaagaacagcccgccctgaacgacagccggtactgcctgagcagcagactgagagtgtccgccaccttctggcagaacccccggaaccacttcagatgccaggtgcagttctacggcctgagcgagaacgacgagtggacccaggacagagccaagcccgtgacccagatcgtgtctgccgaagcctggggcagagccgattgcggcatcaccagcgccagctaccaccagggcgtgctgagcgccaccatcctgtacgagatcctgctgggcaaggccaccctgtacgccgtgctggtgtctgccctggtgctgatggctatggtcaagcggaaggacagccgggga

SEQ ID NO: 36838 - DNA, 2694 bp, synthetic construct
  source 1..2694: mol_type = other DNA
atggccttaccagtgaccgccttgctcctgccgctggccttgctgctccacgccgccaggccggaagtgcagctggttgaatctggcggaggactggttcaggctggcggatctctgagactgtcttgtgccgccagcggcagaacctttagcatgggctggtttagacaggcccctggcaaagagagagagttcgtcgccgccatcacatactctggcggcagcccttactacgccgactctgtgaagggcagattcaccatcagccgggacaacgccaagaacaccgtgtacctccagatgaacagcctgaagcctgaggacaccgccgtgtactactgcgccgccaatccaacatacggcagcgactggaacgccgagaattggggccagggaacccaagtgacagtgtctagcggtaccggcggaggcggatctggcggcggaggtagcggtggcggaggatctgaattcgacatccagatgacacagagccctagcagcctgtctgccagcgtgggagacagagtgaccatcacatgcaagagcagccagagcctgctggactccgatggcaagacctacctgaactggtatcagcagaagcccggcaaggcccctaagctgctgatctacctggtgtccaagctggatagcggcgtgcccagcagattttctggcagcggcagcggaaccgacttcaccctgacaatatccagcctccagcctgaggacttcgccacctactactgctggcaaggcacccactttccattcaccttcggccagggcaccaaggtggaaatcaaaagactcgaggacctgaagaacgtgttcccacctgaggtggccgtgttcgagcctagcgaggccgagatcagccacacccagaaagccaccctcgtgtgcctggctaccggcttctaccccgaccatgtggaactgtcttggtgggtcaacggcaaagaggtgcacagcggcgtgtgtaccgacccccagccactgaaagaacagcccgccctgaacgacagccggtactgcctgagcagcagactgagagtgtccgccaccttctggcagaacccccggaaccacttcagatgccaggtgcagttctacggcctgagcgagaacgacgagtggacccaggacagagccaagcccgtgacccagatcgtgtctgccgaagcctggggcagagccgattgcggctttaccagcgagagctaccagcagggcgtgctgagcgccaccatcctgtacgagatcctgctgggcaaggccaccctgtacgccgtgctggtgtctgccctggtgctgatggctatggtcaagcggaaggacagccggggaagggccaagcgatctggatctggagcaacaaacttctcactactcaaacaagcaggtgacgtggaggagaatcccgggcctactagtaccatggactggatttggcgcatccttttccttgtcggcgctgctaccggcgcccattccgggccccaggtgcagctccaagaaagcggacccggactggttaagccctctcagaccctgtctctgacctgcacagttagcggagccagcattaccacaggcgagtattattggaattggtttcggcagccaccaggcaaggggcttgagtggatgggtgctattgctgcctctggcagcaccacctactctcccagctttgagagcagaacctccatcagccgggacacctccaaaaaccagttctctctgaagctgtcctccgtgaccgctgctgacaccgccgtctattattgtggccggtctttcggcgtggcagctgtgaccacaggacagaacagaggccagggaacacttgtgaccgtgtcctctggatccggcggcggaggatctggcggaggcggatctgggggcggaggctctttcgaagaagtgcagctggttgaatcaggcggaggactggttcagcctggcggatctctgagactgtcttgtgccgccagcggctacaccttcaccagctactggatgaactgggtccgacaggcccctggcaaaggactggaatgggtcggaatgatcgaccccagcgacagcgagacacactacaaccacatcttcaaggaccgcttcaccatcagcgccgacaccagcaagaataccgcctacctccagatgaactccctgagagccgaggacaccgccgtgtactactgcgccagaaacctgtatctgttcggccagggaaccctggtcacagtgtcatctacgcgtatccagaaccctgatcctgccgtgtaccagctgcgggatagcaagagcagcgacaagagcgtgtgtctgttcaccgacttcgacagccagaccaacgtgtcccagagcaaggactccgacgtgtacatcaccgataagtgcgtgctggacatgcggagcatggacttcaagagcaactccgccgtggcctggtccaacaagtccgatttcgcctgcgccaacgccttcaacaacagcattatccccgaggacacattcttcccaagccccgagagcagctgcgacgtgaagctggtggaaaagagcttcgagacagacaccaacctgaacttccagaacctgagcgtgatcggcttcagaatcctgctgctgaaagtggccggctttaacctgctgatgaccctgcggctgtggtccagc

SEQ ID NO: 36839 - DNA, 2715 bp, synthetic construct
  source 1..2715: mol_type = other DNA
atggccttaccagtgaccgccttgctcctgccgctggccttgctgctccacgccgccaggccggaagtgcagctggttgaatctggcggaggactggttcaggctggcggatctctgagactgtcttgtgccgccagcggcagaacctttagcatgggctggtttagacaggcccctggcaaagagagagagttcgtcgccgccatcacatactctggcggcagcccttactacgccgactctgtgaagggcagattcaccatcagccgggacaacgccaagaacaccgtgtacctccagatgaacagcctgaagcctgaggacaccgccgtgtactactgcgccgccaatccaacatacggcagcgactggaacgccgagaattggggccagggaacccaagtgacagtgtctagcggtaccggcggaggcggatctggcggcggaggtagcggtggcggaggatctgaattcgacatccagatgacacagagccctagcagcctgtctgccagcgtgggagacagagtgaccatcacatgcaagagcagccagagcctgctggactccgatggcaagacctacctgaactggtatcagcagaagcccggcaaggcccctaagctgctgatctacctggtgtccaagctggatagcggcgtgcccagcagattttctggcagcggcagcggaaccgacttcaccctgacaatatccagcctccagcctgaggacttcgccacctactactgctggcaaggcacccactttccattcaccttcggccagggcaccaaggtggaaatcaaaagactcgagatccagaaccctgatcctgccgtgtaccagctgcgggatagcaagagcagcgacaagagcgtgtgtctgttcaccgacttcgacagccagaccaacgtgtcccagagcaaggactccgacgtgtacatcaccgataagtgcgtgctggacatgcggagcatggacttcaagagcaactccgccgtggcctggtccaacaagtccgatttcgcctgcgccaacgccttcaacaacagcattatccccgaggacacattcttcccaagcagcgacgtgccctgcgacgtgaagctggtggaaaagagcttcgagacagacaccaacctgaacttccagaacctgagcgtgatcggcttcagaatcctgctgctgaaagtggccggctttaacctgctgatgaccctgcggctgtggtccagccgcgccaagagaagcggatctggcgtgaagcagaccctgaatttcgacctgctgaagctggctggcgacgtggaatccaacccaggccctactagtaccatggactggatttggcgcatccttttccttgtcggcgctgctaccggcgcccattccgggccccaggtgcagctggttgaatctggcggaggactggttcagcctggcggatctctgagactgtcttgtgccgccagcggcaacatcaacagcagaaactgcatgggctggttcagacaggcccctggcaagggaagagaaggcgtggcagctatcggccaagtgaccggcagaacctactacgtggacagcgtgaagggcagattcaccatcagcctggacaacagcaagaacaccctgtacctccagatgaacagcctgagagccgaggacaccgccgtgtactattgtgctgctgcccctggctgtctgctgtctgcacttagaagcgccgactacagaaactggggccagggcacactggtcaccgtttcttctggatccggcggcggaggatctggcggaggcggatctgggggcggaggctctttcgaagaagtgcagctggttgaatcaggcggaggactggttcagcctggcggatctctgagactgtcttgtgccgccagcggctacaccttcaccagctactggatgaactgggtccgacaggcccctggcaaaggactggaatgggtcggaatgatcgaccccagcgacagcgagacacactacaaccacatcttcaaggaccgcttcaccatcagcgccgacaccagcaagaataccgcctacctccagatgaactccctgagagccgaggacaccgccgtgtactactgcgccagaaacctgtatctgttcggccagggaaccctggtcacagtgtcatctacgcgtgaggacctgaagaacgtgttcccacctgaggtggccgtgttcgagcctagcaaggccgagatcgcccacacccagaaagccaccctcgtgtgcctggctaccggcttctaccccgaccatgtggaactgtcttggtgggtcaacggcaaagaggtgcacagcggcgtgtgtaccgacccccagccactgaaagaacagcccgccctgaacgacagccggtactgcctgagcagcagactgagagtgtccgccaccttctggcagaacccccggaaccacttcagatgccaggtgcagttctacggcctgagcgagaacgacgagtggacccaggacagagccaagcccgtgacccagatcgtgtctgccgaagcctggggcagagccgattgcggcatcaccagcgccagctaccaccagggcgtgctgagcgccaccatcctgtacgagatcctgctgggcaaggccaccctgtacgccgtgctggtgtctgccctggtgctgatggctatggtcaagcggaaggacagccgggga

SEQ ID NO: 36840 - DNA, 2703 bp, synthetic construct
  source 1..2703: mol_type = other DNA
atggccttaccagtgaccgccttgctcctgccgctggccttgctgctccacgccgccaggccggaagtgcagctggttgaatctggcggaggactggttcaggctggcggatctctgagactgtcttgtgccgccagcggcagaacctttagcatgggctggtttagacaggcccctggcaaagagagagagttcgtcgccgccatcacatactctggcggcagcccttactacgccgactctgtgaagggcagattcaccatcagccgggacaacgccaagaacaccgtgtacctccagatgaacagcctgaagcctgaggacaccgccgtgtactactgcgccgccaatccaacatacggcagcgactggaacgccgagaattggggccagggaacccaagtgacagtgtctagcggtaccggcggaggcggatctggcggcggaggtagcggtggcggaggatctgaattcgacatccagatgacacagagccctagcagcctgtctgccagcgtgggagacagagtgaccatcacatgcaagagcagccagagcctgctggactccgatggcaagacctacctgaactggtatcagcagaagcccggcaaggcccctaagctgctgatctacctggtgtccaagctggatagcggcgtgcccagcagattttctggcagcggcagcggaaccgacttcaccctgacaatatccagcctccagcctgaggacttcgccacctactactgctggcaaggcacccactttccattcaccttcggccagggcaccaaggtggaaatcaaaagactcgaggacctgaagaacgtgttcccacctgaggtggccgtgttcgagcctagcgaggccgagatcagccacacccagaaagccaccctcgtgtgcctggctaccggcttctaccccgaccatgtggaactgtcttggtgggtcaacggcaaagaggtgcacagcggcgtgtgtaccgacccccagccactgaaagaacagcccgccctgaacgacagccggtactgcctgagcagcagactgagagtgtccgccaccttctggcagaacccccggaaccacttcagatgccaggtgcagttctacggcctgagcgagaacgacgagtggacccaggacagagccaagcccgtgacccagatcgtgtctgccgaagcctggggcagagccgattgcggctttaccagcgagagctaccagcagggcgtgctgagcgccaccatcctgtacgagatcctgctgggcaaggccaccctgtacgccgtgctggtgtctgccctggtgctgatggctatggtcaagcggaaggacagccggggaagggccaagcgatctggatctggagcaacaaacttctcactactcaaacaagcaggtgacgtggaggagaatcccgggcctactagtaccatggactggatttggcgcatccttttccttgtcggcgctgctaccggcgcccattccgggccccaggtgcagctggttgaatctggcggaggactggttcagcctggcggatctctgagactgtcttgtgccgccagcggcaacatcaacagcagaaactgcatgggctggttcagacaggcccctggcaagggaagagaaggcgtggcagctatcggccaagtgaccggcagaacctactacgtggacagcgtgaagggcagattcaccatcagcctggacaacagcaagaacaccctgtacctccagatgaacagcctgagagccgaggacaccgccgtgtactattgtgctgctgcccctggctgtctgctgtctgcacttagaagcgccgactacagaaactggggccagggcacactggtcaccgtttcttctggatccggcggcggaggatctggcggaggcggatctgggggcggaggctctttcgaagaagtgcagctggttgaatcaggcggaggactggttcagcctggcggatctctgagactgtcttgtgccgccagcggctacaccttcaccagctactggatgaactgggtccgacaggcccctggcaaaggactggaatgggtcggaatgatcgaccccagcgacagcgagacacactacaaccacatcttcaaggaccgcttcaccatcagcgccgacaccagcaagaataccgcctacctccagatgaactccctgagagccgaggacaccgccgtgtactactgcgccagaaacctgtatctgttcggccagggaaccctggtcacagtgtcatctacgcgtatccagaaccctgatcctgccgtgtaccagctgcgggatagcaagagcagcgacaagagcgtgtgtctgttcaccgacttcgacagccagaccaacgtgtcccagagcaaggactccgacgtgtacatcaccgataagtgcgtgctggacatgcggagcatggacttcaagagcaactccgccgtggcctggtccaacaagtccgatttcgcctgcgccaacgccttcaacaacagcattatccccgaggacacattcttcccaagccccgagagcagctgcgacgtgaagctggtggaaaagagcttcgagacagacaccaacctgaacttccagaacctgagcgtgatcggcttcagaatcctgctgctgaaagtggccggctttaacctgctgatgaccctgcggctgtggtccagc

SEQ ID NO: 36841 - DNA, 2703 bp, synthetic construct
  source 1..2703: mol_type = other DNA
atggccttaccagtgaccgccttgctcctgccgctggccttgctgctccacgccgccaggccggaagtgcaactggttgaatccggtggcggcctggtgcaagcaggcggatctctcagacttagctgtgccgcctccggcagaaccttcacaatgggatggtttaggcaggctccagggaaagagagagagttcgtcgccgccatctctctgtctcccacactggcctactacgccgactctgtgaaaggccggttcaccatctccagagataatgccaagaacaccgtggtgctgcaaatgaactctctgaaacccgaggatacagccctgtactattgtgccgctgaccggaagtccgtgatgagcatcagacccgattactggggacagggcacacaagtcacagtgtcctctggtaccggcggaggcggatctggcggcggaggtagcggtggcggaggatctgaattcgacatccagatgacacagagccctagcagcctgtctgccagcgtgggagacagagtgaccatcacatgcaagagcagccagagcctgctggactccgatggcaagacctacctgaactggtatcagcagaagcccggcaaggcccctaagctgctgatctacctggtgtccaagctggatagcggcgtgcccagcagattttctggcagcggcagcggaaccgacttcaccctgacaatatccagcctccagcctgaggacttcgccacctactactgctggcaaggcacccactttccattcaccttcggccagggcaccaaggtggaaatcaaaagactcgaggacctgaagaacgtgttcccacctgaggtggccgtgttcgagcctagcgaggccgagatcagccacacccagaaagccaccctcgtgtgcctggctaccggcttctaccccgaccatgtggaactgtcttggtgggtcaacggcaaagaggtgcacagcggcgtgtgtaccgacccccagccactgaaagaacagcccgccctgaacgacagccggtactgcctgagcagcagactgagagtgtccgccaccttctggcagaacccccggaaccacttcagatgccaggtgcagttctacggcctgagcgagaacgacgagtggacccaggacagagccaagcccgtgacccagatcgtgtctgccgaagcctggggcagagccgattgcggctttaccagcgagagctaccagcagggcgtgctgagcgccaccatcctgtacgagatcctgctgggcaaggccaccctgtacgccgtgctggtgtctgccctggtgctgatggctatggtcaagcggaaggacagccggggaagggccaagcgatctggatctggagcaacaaacttctcactactcaaacaagcaggtgacgtggaggagaatcccgggcctactagtaccatggactggatttggcgcatccttttccttgtcggcgctgctaccggcgcccattccgggccccaggtgcagctggttgaatctggcggaggactggttcagcctggcggatctctgagactgtcttgtgccgccagcggcaacatcaacagcagaaactgcatgggctggttcagacaggcccctggcaagggaagagaaggcgtggcagctatcggccaagtgaccggcagaacctactacgtggacagcgtgaagggcagattcaccatcagcctggacaacagcaagaacaccctgtacctccagatgaacagcctgagagccgaggacaccgccgtgtactattgtgctgctgcccctggctgtctgctgtctgcacttagaagcgccgactacagaaactggggccagggcacactggtcaccgtttcttctggatccggcggcggaggatctggcggaggcggatctgggggcggaggctctttcgaagaagtgcagctggttgaatcaggcggaggactggttcagcctggcggatctctgagactgtcttgtgccgccagcggctacaccttcaccagctactggatgaactgggtccgacaggcccctggcaaaggactggaatgggtcggaatgatcgaccccagcgacagcgagacacactacaaccacatcttcaaggaccgcttcaccatcagcgccgacaccagcaagaataccgcctacctccagatgaactccctgagagccgaggacaccgccgtgtactactgcgccagaaacctgtatctgttcggccagggaaccctggtcacagtgtcatctacgcgtatccagaaccctgatcctgccgtgtaccagctgcgggatagcaagagcagcgacaagagcgtgtgtctgttcaccgacttcgacagccagaccaacgtgtcccagagcaaggactccgacgtgtacatcaccgataagtgcgtgctggacatgcggagcatggacttcaagagcaactccgccgtggcctggtccaacaagtccgatttcgcctgcgccaacgccttcaacaacagcattatccccgaggacacattcttcccaagccccgagagcagctgcgacgtgaagctggtggaaaagagcttcgagacagacaccaacctgaacttccagaacctgagcgtgatcggcttcagaatcctgctgctgaaagtggccggctttaacctgctgatgaccctgcggctgtggtccagc

SEQ ID NO: 36842 - DNA, 2715 bp, synthetic construct
  source 1..2715: mol_type = other DNA
atggccttaccagtgaccgccttgctcctgccgctggccttgctgctccacgccgccaggccgcaggttcagctgcaagagtctggccctggcctggtcaagcctagccaaacactgagcctgacctgtaccgtgtctggcggctctatcaccaccggcgagttctactggaactggttcagacagcctcctggcaaaggactggaatggatgggagccattgccgccagcggcagcacaacatacagccctagcttcgagagccggaccagcatcagcagagacaccagcaagaatcagttcagcctgaagctgagcagcgtgacagccgccgatacagccgtgtattactgcggcagatcctttggagtggccgccgtgacaaccggccagaatagaggacagggcaccctggtcacagtgtctagcggtaccggcggaggcggatctggcggcggaggtagcggtggcggaggatctgaattcgacatccagatgacacagagccctagcagcctgtctgccagcgtgggagacagagtgaccatcacatgcaagagcagccagagcctgctggactccgatggcaagacctacctgaactggtatcagcagaagcccggcaaggcccctaagctgctgatctacctggtgtccaagctggatagcggcgtgcccagcagattttctggcagcggcagcggaaccgacttcaccctgacaatatccagcctccagcctgaggacttcgccacctactactgctggcaaggcacccactttccattcaccttcggccagggcaccaaggtggaaatcaaaagactcgaggacctgaagaacgtgttcccacctgaggtggccgtgttcgagcctagcgaggccgagatcagccacacccagaaagccaccctcgtgtgcctggctaccggcttctaccccgaccatgtggaactgtcttggtgggtcaacggcaaagaggtgcacagcggcgtgtgtaccgacccccagccactgaaagaacagcccgccctgaacgacagccggtactgcctgagcagcagactgagagtgtccgccaccttctggcagaacccccggaaccacttcagatgccaggtgcagttctacggcctgagcgagaacgacgagtggacccaggacagagccaagcccgtgacccagatcgtgtctgccgaagcctggggcagagccgattgcggctttaccagcgagagctaccagcagggcgtgctgagcgccaccatcctgtacgagatcctgctgggcaaggccaccctgtacgccgtgctggtgtctgccctggtgctgatggctatggtcaagcggaaggacagccggggaagggccaagcgatctggatctggagcaacaaacttctcactactcaaacaagcaggtgacgtggaggagaatcccgggcctactagtaccatggactggatttggcgcatccttttccttgtcggcgctgctaccggcgcccattccgggccccaggtgcagctggttgaatctggcggaggactggttcagcctggcggatctctgagactgtcttgtgccgccagcggcaacatcaacagcagaaactgcatgggctggttcagacaggcccctggcaagggaagagaaggcgtggcagctatcggccaagtgaccggcagaacctactacgtggacagcgtgaagggcagattcaccatcagcctggacaacagcaagaacaccctgtacctccagatgaacagcctgagagccgaggacaccgccgtgtactattgtgctgctgcccctggctgtctgctgtctgcacttagaagcgccgactacagaaactggggccagggcacactggtcaccgtttcttctggatccggcggcggaggatctggcggaggcggatctgggggcggaggctctttcgaagaagtgcagctggttgaatcaggcggaggactggttcagcctggcggatctctgagactgtcttgtgccgccagcggctacaccttcaccagctactggatgaactgggtccgacaggcccctggcaaaggactggaatgggtcggaatgatcgaccccagcgacagcgagacacactacaaccacatcttcaaggaccgcttcaccatcagcgccgacaccagcaagaataccgcctacctccagatgaactccctgagagccgaggacaccgccgtgtactactgcgccagaaacctgtatctgttcggccagggaaccctggtcacagtgtcatctacgcgtatccagaaccctgatcctgccgtgtaccagctgcgggatagcaagagcagcgacaagagcgtgtgtctgttcaccgacttcgacagccagaccaacgtgtcccagagcaaggactccgacgtgtacatcaccgataagtgcgtgctggacatgcggagcatggacttcaagagcaactccgccgtggcctggtccaacaagtccgatttcgcctgcgccaacgccttcaacaacagcattatccccgaggacacattcttcccaagccccgagagcagctgcgacgtgaagctggtggaaaagagcttcgagacagacaccaacctgaacttccagaacctgagcgtgatcggcttcagaatcctgctgctgaaagtggccggctttaacctgctgatgaccctgcggctgtggtccagc

SEQ ID NO: 36843 - DNA, 1452 bp, synthetic construct
  source 1..1452: mol_type = other DNA
atggccttaccagtgaccgccttgctcctgccgctggccttgctgctccacgccgccaggccggacatccagatgacacagagccctagcagcctgtctgccagcgtgggagacagagtgaccatcacatgcaagagcagccagagcctgctggactccgatggcaagacctacctgaactggtatcagcagaagcccggcaaggcccctaagctgctgatctacctggtgtccaagctggatagcggcgtgcccagcagattttctggcagcggcagcggaaccgacttcaccctgacaatatccagcctccagcctgaggacttcgccacctactactgctggcaaggcacccactttccattcaccttcggccagggcaccaaggtggaaatcaaaagaggcggaggcggaagtggaggcggaggatctggcggcggaggctctgaagtgcagctggttgaatcaggcggaggactggttcagcctggcggatctctgagactgtcttgtgccgccagcggctacaccttcagcagctactggatgaactgggtccgacaggcccctggcaaaggactggaatgggtcggaatgatcgaccccagcgacagcgagacacactacaaccacatcttcaaggaccgcttcaccatcagcgccgacaccagcaagaataccgcctacctccagatgaactccctgagagccgaggacaccgccgtgtactactgcgccagaaacctgtatctgtggggccagggaaccctggtcacagtgtcatctacgcgtaaaattgaagttatgtatcctcctccttacctagacaatgagaagagcaatggaaccattatccatgtgaaagggaaacacctttgtccaagtcccctatttcccggaccttctaagcccttttgggtgctggtggtggttgggggagtcctggcttgctatagcttgctagtaacagtggcctttattattttctgggtgaggagtaagaggagcaggctcctgcacagtgactacatgaacatgactccacgccgccccggacccacccgcaagcattaccagccctatgccccaccacgcgacttcgcagcctatcgctccagagtgaagttcagcaggagcgcagacgcccccgcgtaccagcagggccagaaccagctctataacgagctcaatctaggacgaagagaggagtacgatgttttggacaagagacgtggccgggaccctgagatggggggaaagccgagaaggaagaaccctcaggaaggcctgtacaatgaactgcagaaagataagatggcggaggcctacagtgagattgggatgaaaggcgagcgccggaggggcaaggggcacgatggcctttaccagggtctcagtacagccaccaaggacacctacgacgcccttcacatgcaggccctgccccctcgc

SEQ ID NO: 36844 - DNA, 1470 bp, synthetic construct
  source 1..1470: mol_type = other DNA
atggccttaccagtgaccgccttgctcctgccgctggccttgctgctccacgccgccaggccggacatccagatgacacagagccctagcagcctgtctgccagcgtgggagacagagtgaccatcacatgcaagagcagccagagcctgctggactccgatggcaagacctacctgaactggtatcagcagaagcccggcaaggcccctaagctgctgatctacctggtgtccaagctggatagcggcgtgcccagcagattttctggcagcggcagcggaaccgacttcaccctgacaatatccagcctccagcctgaggacttcgccacctactactgctggcaaggcacccactttccattcaccttcggccagggcaccaaggtggaaatcaaaagaggcggaggcggaagtggaggcggaggatctggcggcggaggctctgaagtgcagctggttgaatcaggcggaggactggttcagcctggcggatctctgagactgtcttgtgccgccagcggctacaccttcagcagctactggatgaactgggtccgacaggcccctggcaaaggactggaatgggtcggaatgatcgaccccagcgacagcgagacacactacaaccacatcttcaaggaccgcttcaccatcagcgccgacaccagcaagaataccgcctacctccagatgaactccctgagagccgaggacaccgccgtgtactactgcgccagaaacctgtatctgtggggccagggaaccctggtcacagtgtcatctacgcgtgcgaagcccaccacgacgccagcgccgcgaccaccaacaccggcgcccaccatcgcgtcgcagcccctgtccctgcgcccagaggcgtgccggccagcggcggggggcgcagtgcacacgagggggctggacttcgcctgtgacatctacatctgggcgcccttggccgggacttgtggggtccttctcctgtcactggttatcaccctttactgcaaacggggcagaaagaaactcctgtatatattcaaacaaccatttatgagaccagtacaaactactcaagaggaagatggctgtagctgccgatttccagaagaagaagaaggaggatgtgaactgagagtgaagttcagcaggagcgcagacgcccccgcgtaccagcagggccagaaccagctctataacgagctgaatctaggacgaagagaggagtacgatgttttggacaagagacgtggccgggaccctgagatggggggaaagccgagaaggaagaaccctcaggaaggcctgtacaatgaactgcagaaagataagatggcggaggcctacagtgagattgggatgaaaggcgagcgccggaggggcaaggggcacgatggcctttaccagggtctcagtacagccaccaaggacacctacgacgcccttcacatgcaggccctgccccctcgc

SEQ ID NO: 36845 - DNA, 1470 bp, synthetic construct
  source 1..1470: mol_type = other DNA
atggccttaccagtgaccgccttgctcctgccgctggccttgctgctccacgccgccaggccggaagtgcagctggttgaatcaggcggaggactggttcagcctggcggatctctgagactgtcttgtgccgccagcggctacaccttcagcagctactggatgaactgggtccgacaggcccctggcaaaggactggaatgggtcggaatgatcgaccccagcgacagcgagacacactacaaccacatcttcaaggaccgcttcaccatcagcgccgacaccagcaagaataccgcctacctccagatgaactccctgagagccgaggacaccgccgtgtactactgcgccagaaacctgtatctgtggggccagggaaccctggtcacagtgtcatctggcggaggcggaagtggaggcggaggatctggcggcggaggctctgacatccagatgacacagagccctagcagcctgtctgccagcgtgggagacagagtgaccatcacatgcaagagcagccagagcctgctggactccgatggcaagacctacctgaactggtatcagcagaagcccggcaaggcccctaagctgctgatctacctggtgtccaagctggatagcggcgtgcccagcagattttctggcagcggcagcggaaccgacttcaccctgacaatatccagcctccagcctgaggacttcgccacctactactgctggcaaggcacccactttccattcaccttcggccagggcaccaaggtggaaatcaaaagaacgcgtgcgaagcccaccacgacgccagcgccgcgaccaccaacaccggcgcccaccatcgcgtcgcagcccctgtccctgcgcccagaggcgtgccggccagcggcggggggcgcagtgcacacgagggggctggacttcgcctgtgacatctacatctgggcgcccttggccgggacttgtggggtccttctcctgtcactggttatcaccctttactgcaaacggggcagaaagaaactcctgtatatattcaaacaaccatttatgagaccagtacaaactactcaagaggaagatggctgtagctgccgatttccagaagaagaagaaggaggatgtgaactgagagtgaagttcagcaggagcgcagacgcccccgcgtaccagcagggccagaaccagctctataacgagctgaatctaggacgaagagaggagtacgatgttttggacaagagacgtggccgggaccctgagatggggggaaagccgagaaggaagaaccctcaggaaggcctgtacaatgaactgcagaaagataagatggcggaggcctacagtgagattgggatgaaaggcgagcgccggaggggcaaggggcacgatggcctttaccagggtctcagtacagccaccaaggacacctacgacgcccttcacatgcaggccctgccccctcgc

SEQ ID NO: 36846 - DNA, 1869 bp, synthetic construct
  source 1..1869: mol_type = other DNA
atggccttaccagtgaccgccttgctcctgccgctggccttgctgctccacgccgccaggccggacatccagatgacacagagccctagcagcctgtctgccagcgtgggagacagagtgaccatcacatgcaagagcagccagagcctgctggactccgatggcaagacctacctgaactggtatcagcagaagcccggcaaggcccctaagctgctgatctacctggtgtccaagctggatagcggcgtgcccagcagattttctggcagcggcagcggaaccgacttcaccctgacaatatccagcctccagcctgaggacttcgccacctactactgctggcaaggcacccactttccattcaccttcggccagggcaccaaggtggaaatcaaaagactcgagatccagaaccctgatcctgccgtgtaccagctgcgggatagcaagagcagcgacaagagcgtgtgtctgttcaccgacttcgacagccagaccaacgtgtcccagagcaaggactccgacgtgtacatcaccgataagtgcgtgctggacatgcggagcatggacttcaagagcaactccgccgtggcctggtccaacaagtccgatttcgcctgcgccaacgccttcaacaacagcattatccccgaggacacattcttcccaagcagcgacgtgccctgcgacgtgaagctggtggaaaagagcttcgagacagacaccaacctgaacttccagaacctgagcgtgatcggcttcagaatcctgctgctgaaagtggccggctttaacctgctgatgaccctgcggctgtggtccagccgcgccaagagaagcggatctggcgtgaagcagaccctgaatttcgacctgctgaagctggctggcgacgtggaatccaacccaggccctactagtatggactggatttggcgcatccttttccttgtcggcgctgctaccggcgcgcattccttcgaagaagtgcagctggttgaatcaggcggaggactggttcagcctggcggatctctgagactgtcttgtgccgccagcggctacaccttcagcagctactggatgaactgggtccgacaggcccctggcaaaggactggaatgggtcggaatgatcgaccccagcgacagcgagacacactacaaccacatcttcaaggaccgcttcaccatcagcgccgacaccagcaagaataccgcctacctccagatgaactccctgagagccgaggacaccgccgtgtactactgcgccagaaacctgtatctgtggggccagggaaccctggtcacagtgtcatctacgcgtgaggacctgaagaacgtgttcccacctgaggtggccgtgttcgagcctagcaaggccgagatcgcccacacccagaaagccaccctcgtgtgcctggctaccggcttctaccccgaccatgtggaactgtcttggtgggtcaacggcaaagaggtgcacagcggcgtgtgtaccgacccccagccactgaaagaacagcccgccctgaacgacagccggtactgcctgagcagcagactgagagtgtccgccaccttctggcagaacccccggaaccacttcagatgccaggtgcagttctacggcctgagcgagaacgacgagtggacccaggacagagccaagcccgtgacccagatcgtgtctgccgaagcctggggcagagccgattgcggcatcaccagcgccagctaccaccagggcgtgctgagcgccaccatcctgtacgagatcctgctgggcaaggccaccctgtacgccgtgctggtgtctgccctggtgctgatggctatggtcaagcggaaggacagccgggga

SEQ ID NO: 36847 - DNA, 1857 bp, synthetic construct
  source 1..1857: mol_type = other DNA
atggccttaccagtgaccgccttgctcctgccgctggccttgctgctccacgccgccaggccggacatccagatgacacagagccctagcagcctgtctgccagcgtgggagacagagtgaccatcacatgcaagagcagccagagcctgctggactccgatggcaagacctacctgaactggtatcagcagaagcccggcaaggcccctaagctgctgatctacctggtgtccaagctggatagcggcgtgcccagcagattttctggcagcggcagcggaaccgacttcaccctgacaatatccagcctccagcctgaggacttcgccacctactactgctggcaaggcacccactttccattcaccttcggccagggcaccaaggtggaaatcaaaagactcgaggacctgaagaacgtgttcccacctgaggtggccgtgttcgagcctagcaaggccgagatcgcccacacccagaaagccaccctcgtgtgcctggctaccggcttctaccccgaccatgtggaactgtcttggtgggtcaacggcaaagaggtgcacagcggcgtgtgtaccgacccccagccactgaaagaacagcccgccctgaacgacagccggtactgcctgagcagcagactgagagtgtccgccaccttctggcagaacccccggaaccacttcagatgccaggtgcagttctacggcctgagcgagaacgacgagtggacccaggacagagccaagcccgtgacccagatcgtgtctgccgaagcctggggcagagccgattgcggcatcaccagcgccagctaccaccagggcgtgctgagcgccaccatcctgtacgagatcctgctgggcaaggccaccctgtacgccgtgctggtgtctgccctggtgctgatggctatggtcaagcggaaggacagccggggaagggccaagcgatctggatctggagcaacaaacttctcactactcaaacaagcaggtgacgtggaggagaatcccgggcctactagtatggactggatttggcgcatccttttccttgtcggcgctgctaccggcgcgcattccttcgaagaagtgcagctggttgaatcaggcggaggactggttcagcctggcggatctctgagactgtcttgtgccgccagcggctacaccttcagcagctactggatgaactgggtccgacaggcccctggcaaaggactggaatgggtcggaatgatcgaccccagcgacagcgagacacactacaaccacatcttcaaggaccgcttcaccatcagcgccgacaccagcaagaataccgcctacctccagatgaactccctgagagccgaggacaccgccgtgtactactgcgccagaaacctgtatctgtggggccagggaaccctggtcacagtgtcatctacgcgtatccagaaccctgatcctgccgtgtaccagctgcgggatagcaagagcagcgacaagagcgtgtgtctgttcaccgacttcgacagccagaccaacgtgtcccagagcaaggactccgacgtgtacatcaccgataagtgcgtgctggacatgcggagcatggacttcaagagcaactccgccgtggcctggtccaacaagtccgatttcgcctgcgccaacgccttcaacaacagcattatccccgaggacacattcttcccaagcagcgacgtgccctgcgacgtgaagctggtggaaaagagcttcgagacagacaccaacctgaacttccagaacctgagcgtgatcggcttcagaatcctgctgctgaaagtggccggctttaacctgctgatgaccctgcggctgtggtccagc

SEQ ID NO: 36848 - DNA, 1857 bp, synthetic construct
  source 1..1857: mol_type = other DNA
atggccttaccagtgaccgccttgctcctgccgctggccttgctgctccacgccgccaggccggacatccagatgacacagagccctagcagcctgtctgccagcgtgggagacagagtgaccatcacatgcaagagcagccagagcctgctggactccgatggcaagacctacctgaactggtatcagcagaagcccggcaaggcccctaagctgctgatctacctggtgtccaagctggatagcggcgtgcccagcagattttctggcagcggcagcggaaccgacttcaccctgacaatatccagcctccagcctgaggacttcgccacctactactgctggcaaggcacccactttccattcaccttcggccagggcaccaaggtggaaatcaaaagactcgaggacctgaagaacgtgttcccacctgaggtggccgtgttcgagcctagcgaggccgagatcagccacacccagaaagccaccctcgtgtgcctggctaccggcttctaccccgaccatgtggaactgtcttggtgggtcaacggcaaagaggtgcacagcggcgtgtgtaccgacccccagccactgaaagaacagcccgccctgaacgacagccggtactgcctgagcagcagactgagagtgtccgccaccttctggcagaacccccggaaccacttcagatgccaggtgcagttctacggcctgagcgagaacgacgagtggacccaggacagagccaagcccgtgacccagatcgtgtctgccgaagcctggggcagagccgattgcggctttaccagcgagagctaccagcagggcgtgctgagcgccaccatcctgtacgagatcctgctgggcaaggccaccctgtacgccgtgctggtgtctgccctggtgctgatggctatggtcaagcggaaggacagccggggaagggccaagcgatctggatctggagcaacaaacttctcactactcaaacaagcaggtgacgtggaggagaatcccgggcctactagtatggactggatttggcgcatccttttccttgtcggcgctgctaccggcgcgcattccttcgaagaagtgcagctggttgaatcaggcggaggactggttcagcctggcggatctctgagactgtcttgtgccgccagcggctacaccttcagcagctactggatgaactgggtccgacaggcccctggcaaaggactggaatgggtcggaatgatcgaccccagcgacagcgagacacactacaaccacatcttcaaggaccgcttcaccatcagcgccgacaccagcaagaataccgcctacctccagatgaactccctgagagccgaggacaccgccgtgtactactgcgccagaaacctgtatctgtggggccagggaaccctggtcacagtgtcatctacgcgtatccagaaccctgatcctgccgtgtaccagctgcgggatagcaagagcagcgacaagagcgtgtgtctgttcaccgacttcgacagccagaccaacgtgtcccagagcaaggactccgacgtgtacatcaccgataagtgcgtgctggacatgcggagcatggacttcaagagcaactccgccgtggcctggtccaacaagtccgatttcgcctgcgccaacgccttcaacaacagcattatccccgaggacacattcttcccaagccccgagagcagctgcgacgtgaagctggtggaaaagagcttcgagacagacaccaacctgaacttccagaacctgagcgtgatcggcttcagaatcctgctgctgaaagtggccggctttaacctgctgatgaccctgcggctgtggtccagc

SEQ ID NO: 36849 - DNA, 1869 bp, synthetic construct
  source 1..1869: mol_type = other DNA
atggccttaccagtgaccgccttgctcctgccgctggccttgctgctccacgccgccaggccggacatccagatgacacagagccctagcagcctgtctgccagcgtgggagacagagtgaccatcacatgcaagagcagccagagcctgctggactccgatggcaagacctacctgaactggtatcagcagaagcccggcaaggcccctaagctgctgatctacctggtgtccaagctggatagcggcgtgcccagcagattttctggcagcggcagcggaaccgacttcaccctgacaatatccagcctccagcctgaggacttcgccacctactactgctggcaaggcacccactttccattcaccttcggccagggcaccaaggtggaaatcaaaagactcgagatccagaaccctgatcctgccgtgtaccagctgcgggatagcaagagcagcgacaagagcgtgtgtctgttcaccgacttcgacagccagaccaacgtgtcccagagcaaggactccgacgtgtacatcaccgataagtgcgtgctggacatgcggagcatggacttcaagagcaactccgccgtggcctggtccaacaagtccgatttcgcctgcgccaacgccttcaacaacagcattatccccgaggacacattcttcccaagccccgagagcagctgcgacgtgaagctggtggaaaagagcttcgagacagacaccaacctgaacttccagaacctgagcgtgatcggcttcagaatcctgctgctgaaagtggccggctttaacctgctgatgaccctgcggctgtggtccagccgcgccaagagaagcggatctggcgtgaagcagaccctgaatttcgacctgctgaagctggctggcgacgtggaatccaacccaggccctactagtatggactggatttggcgcatccttttccttgtcggcgctgctaccggcgcgcattccttcgaagaagtgcagctggttgaatcaggcggaggactggttcagcctggcggatctctgagactgtcttgtgccgccagcggctacaccttcagcagctactggatgaactgggtccgacaggcccctggcaaaggactggaatgggtcggaatgatcgaccccagcgacagcgagacacactacaaccacatcttcaaggaccgcttcaccatcagcgccgacaccagcaagaataccgcctacctccagatgaactccctgagagccgaggacaccgccgtgtactactgcgccagaaacctgtatctgtggggccagggaaccctggtcacagtgtcatctacgcgtgaggacctgaagaacgtgttcccacctgaggtggccgtgttcgagcctagcgaggccgagatcagccacacccagaaagccaccctcgtgtgcctggctaccggcttctaccccgaccatgtggaactgtcttggtgggtcaacggcaaagaggtgcacagcggcgtgtgtaccgacccccagccactgaaagaacagcccgccctgaacgacagccggtactgcctgagcagcagactgagagtgtccgccaccttctggcagaacccccggaaccacttcagatgccaggtgcagttctacggcctgagcgagaacgacgagtggacccaggacagagccaagcccgtgacccagatcgtgtctgccgaagcctggggcagagccgattgcggctttaccagcgagagctaccagcagggcgtgctgagcgccaccatcctgtacgagatcctgctgggcaaggccaccctgtacgccgtgctggtgtctgccctggtgctgatggctatggtcaagcggaaggacagccgggga

SEQ ID NO: 36850 - DNA, 1905 bp, synthetic construct
  source 1..1905: mol_type = other DNA
atggccttaccagtgaccgccttgctcctgccgctggccttgctgctccacgccgccaggccgctcgaggaggacctgaagaacgtgttcccacctgaggtggccgtgttcgagcctagcaaggccgagatcgcccacacccagaaagccaccctcgtgtgcctggctaccggcttctaccccgaccatgtggaactgtcttggtgggtcaacggcaaagaggtgcacagcggcgtgtgtaccgacccccagccactgaaagaacagcccgccctgaacgacagccggtactgcctgagcagcagactgagagtgtccgccaccttctggcagaacccccggaaccacttcagatgccaggtgcagttctacggcctgagcgagaacgacgagtggacccaggacagagccaagcccgtgacccagatcgtgtctgccgaagcctggggcagagccgattgcggcatcaccagcgccagctaccaccagggcgtgctgagcgccaccatcctgtacgagatcctgctgggcaaggccaccctgtacgccgtgctggtgtctgccctggtgctgatggctatggtcaagcggaaggacagccggggaagggccaagcgatctggatctggagcaacaaacttctcactactcaaacaagcaggtgacgtggaggagaatcccgggcctactagcatggccttaccagtgaccgccttgctcctgccgctggccttgctgctccacgccgccaggccggacatccagatgacacagagccctagcagcctgtctgccagcgtgggagacagagtgaccatcacatgcaagagcagccagagcctgctggactccgatggcaagacctacctgaactggtatcagcagaagcccggcaaggcccctaagctgctgatctacctggtgtccaagctggatagcggcgtgcccagcagattttctggcagcggcagcggaaccgacttcaccctgacaatatccagcctccagcctgaggacttcgccacctactactgctggcaaggcacccactttccattcaccttcggccagggcaccaaggtggaaatcaaaagaggcggaggcggaagtggaggcggaggatctggcggcggaggctctgaagtgcagctggttgaatcaggcggaggactggttcagcctggcggatctctgagactgtcttgtgccgccagcggctacaccttcagcagctactggatgaactgggtccgacaggcccctggcaaaggactggaatgggtcggaatgatcgaccccagcgacagcgagacacactacaaccacatcttcaaggaccgcttcaccatcagcgccgacaccagcaagaataccgcctacctccagatgaactccctgagagccgaggacaccgccgtgtactactgcgccagaaacctgtatctgtggggccagggaaccctggtcacagtgtcatctacgcgtatccagaaccctgatcctgccgtgtaccagctgcgggatagcaagagcagcgacaagagcgtgtgtctgttcaccgacttcgacagccagaccaacgtgtcccagagcaaggactccgacgtgtacatcaccgataagtgcgtgctggacatgcggagcatggacttcaagagcaactccgccgtggcctggtccaacaagtccgatttcgcctgcgccaacgccttcaacaacagcattatccccgaggacacattcttcccaagcagcgacgtgccctgcgacgtgaagctggtggaaaagagcttcgagacagacaccaacctgaacttccagaacctgagcgtgatcggcttcagaatcctgctgctgaaagtggccggctttaacctgctgatgaccctgcggctgtggtccagc

SEQ ID NO: 36851 - DNA, 1926 bp, synthetic construct
  source 1..1926: mol_type = other DNA
atggccttaccagtgaccgccttgctcctgccgctggccttgctgctccacgccgccaggccgctcgagggctccggcgatcgccctgatcctgccgtgtaccagctgcgggatagcaagagcagcgacaagagcgtgtgtctgttcaccgacttcgacagccagaccaacgtgtcccagagcaaggactccgacgtgtacatcaccgataagtgcgtgctggacatgcggagcatggacttcaagagcaactccgccgtggcctggtccaacaagtccgatttcgcctgcgccaacgccttcaacaacagcattatccccgaggacacattcttcccaagccccgagagcagctgcgacgtgaagctggtggaaaagagcttcgagacagacaccaacctgaacttccagaacctgagcgtgatcggcttcagaatcctgctgctgaaagtggccggctttaacctgctgatgaccctgcggctgtggtccagctctagtcgcgccaagagaagcggatctggcgtgaagcagaccctgaatttcgacctgctgaagctggctggcgacgtggaatccaacccaggccccactagcatggccttaccagtgaccgccttgctcctgccgctggccttgctgctccacgccgccaggccggacatccagatgacacagagccctagcagcctgtctgccagcgtgggagacagagtgaccatcacatgcaagagcagccagagcctgctggactccgatggcaagacctacctgaactggtatcagcagaagcccggcaaggcccctaagctgctgatctacctggtgtccaagctggatagcggcgtgcccagcagattttctggcagcggcagcggaaccgacttcaccctgacaatatccagcctccagcctgaggacttcgccacctactactgctggcaaggcacccactttccattcaccttcggccagggcaccaaggtggaaatcaaaagaggcggaggcggaagtggaggcggaggatctggcggcggaggctctgaagtgcagctggttgaatcaggcggaggactggttcagcctggcggatctctgagactgtcttgtgccgccagcggctacaccttcagcagctactggatgaactgggtccgacaggcccctggcaaaggactggaatgggtcggaatgatcgaccccagcgacagcgagacacactacaaccacatcttcaaggaccgcttcaccatcagcgccgacaccagcaagaataccgcctacctccagatgaactccctgagagccgaggacaccgccgtgtactactgcgccagaaacctgtatctgtggggccagggaaccctggtcacagtgtcatctacgcgtgaggacctgaagaacgtgttcccacctgaggtggccgtgttcgagcctagcgaggccgagatcagccacacccagaaagccaccctcgtgtgcctggctaccggcttctaccccgaccatgtggaactgtcttggtgggtcaacggcaaagaggtgcacagcggcgtgtgtaccgacccccagccactgaaagaacagcccgccctgaacgacagccggtactgcctgagcagcagactgagagtgtccgccaccttctggcagaacccccggaaccacttcagatgccaggtgcagttctacggcctgagcgagaacgacgagtggacccaggacagagccaagcccgtgacccagatcgtgtctgccgaagcctggggcagagccgattgcggctttaccagcgagagctaccagcagggcgtgctgagcgccaccatcctgtacgagatcctgctgggcaaggccaccctgtacgccgtgctggtgtctgccctggtgctgatggctatggtcaagcggaaggacagccgggga

SEQ ID NO: 36852 - DNA, 1857 bp, synthetic construct
  source 1..1857: mol_type = other DNA
atggccttaccagtgaccgccttgctcctgccgctggccttgctgctccacgccgccaggccggacatccagatgacacagagccctagcagcctgtctgccagcgtgggagacagagtgaccatcacatgcaagagcagccagagcctgctggactccgatggcaagacctacctgaactggtatcagcagaagcccggcaaggcccctaagctgctgatctacctggtgtccaagctggatagcggcgtgcccagcagattttctggcagcggcagcggaaccgacttcaccctgacaatatccagcctccagcctgaggacttcgccacctactactgctggcaaggcacccactttccattcaccttcggccagggcaccaaggtggaaatcaaaagactcgaggacctgaagaacgtgttcccacctgaggtggccgtgttcgagcctagcgaggccgagatcagccacacccagaaagccaccctcgtgtgcctggctaccggcttctaccccgaccatgtggaactgtcttggtgggtcaacggcaaagaggtgcacagcggcgtgtctaccgacccccagccactgaaagaacagcccgccctgaacgacagccggtactgcctgagcagcagactgagagtgtccgccaccttctggcagaacccccggaaccacttcagatgccaggtgcagttctacggcctgagcgagaacgacgagtggacccaggacagagccaagcccgtgacccagatcgtgtctgccgaagcctggggcagagccgattgcggctttaccagcgagagctaccagcagggcgtgctgagcgccaccatcctgtacgagatcctgctgggcaaggccaccctgtacgccgtgctggtgtctgccctggtgctgatggctatggtcaagcggaaggacagccggggaagggccaagcgatctggatctggagcaacaaacttctcactactcaaacaagcaggtgacgtggaggagaatcccgggcctactagtatggactggatttggcgcatccttttccttgtcggcgctgctaccggcgcgcattccttcgaagaagtgcagctggttgaatcaggcggaggactggttcagcctggcggatctctgagactgtcttgtgccgccagcggctacaccttcagcagctactggatgaactgggtccgacaggcccctggcaaaggactggaatgggtcggaatgatcgaccccagcgacagcgagacacactacaaccacatcttcaaggaccgcttcaccatcagcgccgacaccagcaagaataccgcctacctccagatgaactccctgagagccgaggacaccgccgtgtactactgcgccagaaacctgtatctgtggggccagggaaccctggtcacagtgtcatctacgcgtatccagaaccctgatcctgccgtgtaccagctgcgggatagcaagagcagcgacaagagcgtgtgtctgttcaccgacttcgacagccagaccaacgtgtcccagagcaaggactccgacgtgtacatcaccgataagaccgtgctggacatgcggagcatggacttcaagagcaactccgccgtggcctggtccaacaagtccgatttcgcctgcgccaacgccttcaacaacagcattatccccgaggacacattcttcccaagccccgagagcagctgcgacgtgaagctggtggaaaagagcttcgagacagacaccaacctgaacttccagaacctgagcgtgatcggcttcagaatcctgctgctgaaagtggccggctttaacctgctgatgaccctgcggctgtggtccagc

SEQ ID NO: 36853 - DNA, 1881 bp, synthetic construct
  source 1..1881: mol_type = other DNA
atggccttaccagtgaccgccttgctcctgccgctggccttgctgctccacgccgccaggccggacatccagatgacacagagccctagcagcctgtctgccagcgtgggagacagagtgaccatcacatgcaagagcagccagagcctgctggactccgatggcaagacctacctgaactggtatcagcagaagcccggcaaggcccctaagctgctgatctacctggtgtccaagctggatagcggcgtgcccagcagattttctggcagcggcagcggaaccgacttcaccctgacaatatccagcctccagcctgaggacttcgccacctactactgctggcaaggcacccactttccattcaccttcggccagggcaccaaggtggaaatcaaaagactcgaggacaagcagctggacgccgacgtgtcccccaagcctaccatcttcctgccctctatcgccgagacaaagctccagaaggccggcacctacctgtgcctgctggaaaagttcttcccagatgtgattaagatccactggcaggaaaagaagtccaacaccatcctgggcagccaggaaggcaacaccatgaagaccaacgacacctacatgaagttcagctggctgaccgtgcccgagaagtccctggacaaagaacacagatgcatcgtgcggcacgaaaacaacaagaacggcgtggaccaggaaatcatcttcccacccatcaagaccgatgtgattacaatggaccccaaggacaactgctccaaggacgccaacgataccctgctgctccagctgaccaacaccagcgcctactacatgtacttgttgctgctgctgaagtccgtggtgtacttcgccatcatcacatgctgcctgctgcggagaaccgccttctgctgcaacggcgagaagtctagggccaagcgatctggatctggagcaacaaacttctcactactcaaacaagcaggtgacgtggaggagaatcccgggcctactagtatggactggatttggcgcatccttttccttgtcggcgctgctaccggcgcgcattccttcgaagaagtgcagctggttgaatcaggcggaggactggttcagcctggcggatctctgagactgtcttgtgccgccagcggctacaccttcagcagctactggatgaactgggtccgacaggcccctggcaaaggactggaatgggtcggaatgatcgaccccagcgacagcgagacacactacaaccacatcttcaaggaccgcttcaccatcagcgccgacaccagcaagaataccgcctacctccagatgaactccctgagagccgaggacaccgccgtgtactactgcgccagaaacctgtatctgtggggccagggaaccctggtcacagtgtcatctacgcgtagccagcctcacaccaagcccagcgtgttcgtgatgaagaacggcaccaacgtggcctgcctcgtgaaagagttctaccccaaggacatcaggatcaacctggtgtccagcaagaagatcaccgagttcgaccccgccatcgtgatctcccccagcggcaagtacaacgccgtgaagctggggaagtacgaggacagcaacagcgtgacctgctccgtgcagcacgacaacaagaccgtgcacagcaccgactttgaagtgaaaaccgactccaccgaccacgtgaagcccaaagagacagagaacaccaagcagcccagcaagagctgccacaagcccaaggccatcgtgcacaccgagaaagtgaacatgatgagcctgaccgtgctgggcctgcggatgctgttcgccaaaaccgtggccgtgaacttcctgctgaccgccaagctgttcttcctc

SEQ ID NO: 36854 - DNA, 1881 bp, synthetic construct
  source 1..1881: mol_type = other DNA
atggccttaccagtgaccgccttgctcctgccgctggccttgctgctccacgccgccaggccggacatccagatgacacagagccctagcagcctgtctgccagcgtgggagacagagtgaccatcacatgcaagagcagccagagcctgctggactccgatggcaagacctacctgaactggtatcagcagaagcccggcaaggcccctaagctgctgatctacctggtgtccaagctggatagcggcgtgcccagcagattttctggcagcggcagcggaaccgacttcaccctgacaatatccagcctccagcctgaggacttcgccacctactactgctggcaaggcacccactttccattcaccttcggccagggcaccaaggtggaaatcaaaagactcgagagccagcctcacaccaagcccagcgtgttcgtgatgaagaacggcaccaacgtggcctgcctcgtgaaagagttctaccccaaggacatcaggatcaacctggtgtccagcaagaagatcaccgagttcgaccccgccatcgtgatctcccccagcggcaagtacaacgccgtgaagctggggaagtacgaggacagcaacagcgtgacctgctccgtgcagcacgacaacaagaccgtgcacagcaccgactttgaagtgaaaaccgactccaccgaccacgtgaagcccaaagagacagagaacaccaagcagcccagcaagagctgccacaagcccaaggccatcgtgcacaccgagaaagtgaacatgatgagcctgaccgtgctgggcctgcggatgctgttcgccaaaaccgtggccgtgaacttcctgctgaccgccaagctgttcttcctcagggccaagcgatctggatctggagcaacaaacttctcactactcaaacaagcaggtgacgtggaggagaatcccgggcctactagtatggactggatttggcgcatccttttccttgtcggcgctgctaccggcgcgcattccttcgaagaagtgcagctggttgaatcaggcggaggactggttcagcctggcggatctctgagactgtcttgtgccgccagcggctacaccttcagcagctactggatgaactgggtccgacaggcccctggcaaaggactggaatgggtcggaatgatcgaccccagcgacagcgagacacactacaaccacatcttcaaggaccgcttcaccatcagcgccgacaccagcaagaataccgcctacctccagatgaactccctgagagccgaggacaccgccgtgtactactgcgccagaaacctgtatctgtggggccagggaaccctggtcacagtgtcatctacgcgtgacaagcagctggacgccgacgtgtcccccaagcctaccatcttcctgccctctatcgccgagacaaagctccagaaggccggcacctacctgtgcctgctggaaaagttcttcccagatgtgattaagatccactggcaggaaaagaagtccaacaccatcctgggcagccaggaaggcaacaccatgaagaccaacgacacctacatgaagttcagctggctgaccgtgcccgagaagtccctggacaaagaacacagatgcatcgtgcggcacgaaaacaacaagaacggcgtggaccaggaaatcatcttcccacccatcaagaccgatgtgattacaatggaccccaaggacaactgctccaaggacgccaacgataccctgctgctccagctgaccaacaccagcgcctactacatgtacttgttgctgctgctgaagtccgtggtgtacttcgccatcatcacatgctgcctgctgcggagaaccgccttctgctgcaacggcgagaagtct

SEQ ID NO: 36855 - DNA, 1926 bp, synthetic construct
  source 1..1926: mol_type = other DNA
atggccttaccagtgaccgccttgctcctgccgctggccttgctgctccacgccgccaggccgctcgaggacaagcagctggacgccgacgtgtcccccaagcctaccatcttcctgccctctatcgccgagacaaagctccagaaggccggcacctacctgtgcctgctggaaaagttcttcccagatgtgattaagatccactggcaggaaaagaagtccaacaccatcctgggcagccaggaaggcaacaccatgaagaccaacgacacctacatgaagttcagctggctgaccgtgcccgagaagtccctggacaaagaacacagatgcatcgtgcggcacgaaaacaacaagaacggcgtggaccaggaaatcatcttcccacccatcaagaccgatgtgattacaatggaccccaaggacaactgctccaaggacgccaacgataccctgctgctccagctgaccaacaccagcgcctactacatgtacttgttgctgctgctgaagtccgtggtgtacttcgccatcatcacatgctgcctgctgcggagaaccgccttctgctgcaacggcgagaagtctagggccaagcgatctggatctggagcaacaaacttctcactactcaaacaagcaggtgacgtggaggagaatcccgggcctactagcatggccttaccagtgaccgccttgctcctgccgctggccttgctgctccacgccgccaggccggacatccagatgacacagagccctagcagcctgtctgccagcgtgggagacagagtgaccatcacatgcaagagcagccagagcctgctggactccgatggcaagacctacctgaactggtatcagcagaagcccggcaaggcccctaagctgctgatctacctggtgtccaagctggatagcggcgtgcccagcagattttctggcagcggcagcggaaccgacttcaccctgacaatatccagcctccagcctgaggacttcgccacctactactgctggcaaggcacccactttccattcaccttcggccagggcaccaaggtggaaatcaaaagaggcggaggcggaagtggaggcggaggatctggcggcggaggctctgaagtgcagctggttgaatcaggcggaggactggttcagcctggcggatctctgagactgtcttgtgccgccagcggctacaccttcagcagctactggatgaactgggtccgacaggcccctggcaaaggactggaatgggtcggaatgatcgaccccagcgacagcgagacacactacaaccacatcttcaaggaccgcttcaccatcagcgccgacaccagcaagaataccgcctacctccagatgaactccctgagagccgaggacaccgccgtgtactactgcgccagaaacctgtatctgtggggccagggaaccctggtcacagtgtcatctacgcgtagccagcctcacaccaagcccagcgtgttcgtgatgaagaacggcaccaacgtggcctgcctcgtgaaagagttctaccccaaggacatcaggatcaacctggtgtccagcaagaagatcaccgagttcgaccccgccatcgtgatctcccccagcggcaagtacaacgccgtgaagctggggaagtacgaggacagcaacagcgtgacctgctccgtgcagcacgacaacaagaccgtgcacagcaccgactttgaagtgaaaaccgactccaccgaccacgtgaagcccaaagagacagagaacaccaagcagcccagcaagagctgccacaagcccaaggccatcgtgcacaccgagaaagtgaacatgatgagcctgaccgtgctgggcctgcggatgctgttcgccaaaaccgtggccgtgaacttcctgctgaccgccaagctgttcttcctc

SEQ ID NO: 36856 - DNA, 2388 bp, synthetic construct
  source 1..2388: mol_type = other DNA
atggccttaccagtgaccgccttgctcctgccgctggccttgctgctccacgccgccaggccggacatccagatgacacagagccctagcagcctgtctgccagcgtgggagacagagtgaccatcacatgcaagagcagccagagcctgctggactccgatggcaagacctacctgaactggtatcagcagaagcccggcaaggcccctaagctgctgatctacctggtgtccaagctggatagcggcgtgcccagcagattttctggcagcggcagcggaaccgacttcaccctgacaatatccagcctccagcctgaggacttcgccacctactactgctggcaaggcacccactttccattcaccttcggccagggcaccaaggtggaaatcaaaagaggacagcctaaggccaatcctaccgtgacactgttccctccaagcagcgaagaactccaggccaacaaggccacacttgtgtgcctgatctccgacttctaccctggggctgtgacagtggcttggaaggccgatggatctcctgtgaaagccggcgtggaaaccaccaagccatccaagcagagcaacaacaaatacgccgccagctcctacctgagcctgacacctgagcagtggaagtcccacagatcctacagctgccaagtgacccacgaaggcagcaccgtggaaaagacagtggcccctacagagtgcagcggatcccagagcttcggcctgctggaccccaagctgtgctacctgctggatggcatcctgttcatctacggcgtgatcctgaccgccctgttcctgagagtgaagttcagcagaagcgccgacgcccctgcctaccagcagggacagaaccaactgtacaacgagctgaacctgggcagacgggaagagtacgacgtgctggacaagcggagaggcagggaccctgagatgggcggaaagccccagcggagaaagaacccccaggaaggactgtataacgaactccagaaagacaagatggccgaagcctacagcgagatcggcatgaagggcgagcggagaagaggcaagggccacgatggcctgtaccagggcctgagcaccgccaccaaggacacctatgacgccctgcacatgcaggccctgcctccaagaagggccaagcgatctggatctggagcaacaaacttctcactactcaaacaagcaggtgacgtggaggagaatcccgggcctactagtatggactggatttggcgcatccttttccttgtcggcgctgctaccggcgcgcattccttcgaagaagtgcagctggttgaatcaggcggaggactggttcagcctggcggatctctgagactgtcttgtgccgccagcggctacaccttcagcagctactggatgaactgggtccgacaggcccctggcaaaggactggaatgggtcggaatgatcgaccccagcgacagcgagacacactacaaccacatcttcaaggaccgcttcaccatcagcgccgacaccagcaagaataccgcctacctccagatgaactccctgagagccgaggacaccgccgtgtactactgcgccagaaacctgtatctgtggggccagggaaccctggtcacagtgtcatctgcctctacaaagggaccctccgtgtttcctctggctcccagcagcaagtctacaagcggaggaacagccgctctgggctgcctggtcaaggattactttcccgagcctgtgaccgtgtcctggaatagcggagcactgacaagcggcgtgcacacctttccagccgtgctgcaaagcagcggcctgtactctctgagcagcgtggtcacagtgcctagctctagcctgggcacccagacctacatctgcaatgtgaaccacaagcctagcaacaccaaggtggacaagagagtggaacccaagagctgtggtacccagagttttgggttgttggaccctaaattgtgctatctgttggacggaatcctgttcatttacggagtgatcctgaccgcattgttcctgcgggttaagttttccagatccgcagacgcacccgcttaccaacaagggcagaaccaactctacaatgaacttaatttggggcggagggaagagtacgacgttctggacaaaaggaggggacgagatcccgagatgggcggaaagcctcagcgaaggaagaatccgcaagaggggctttataacgaactccagaaagataaaatggcagaagcctatagtgagattgggatgaagggagaaaggaggaggggtaaaggtcacgatgggttgtaccaaggattgagcacagccactaaagatacctatgatgcgctccacatgcaggccctgccgccaaga

SEQ ID NO: 36857 - DNA, 2445 bp, synthetic construct
  source 1..2445: mol_type = other DNA
atggccttaccagtgaccgccttgctcctgccgctggccttgctgctccacgccgccaggccggacatccagatgacacagagccctagcagcctgtctgccagcgtgggagacagagtgaccatcacatgcaagagcagccagagcctgctggactccgatggcaagacctacctgaactggtatcagcagaagcccggcaaggcccctaagctgctgatctacctggtgtccaagctggatagcggcgtgcccagcagattttctggcagcggcagcggaaccgacttcaccctgacaatatccagcctccagcctgaggacttcgccacctactactgctggcaaggcacccactttccattcaccttcggccagggcaccaaggtggaaatcaaaagactcgaggacctgaagaacgtgttcccacctgaggtggccgtgttcgagcctagcgaggccgagatcagccacacccagaaagccaccctcgtgtgcctggctaccggcttctaccccgaccatgtggaactgtcttggtgggtcaacggcaaagaggtgcacagcggcgtgtctaccgacccccagccactgaaagaacagcccgccctgaacgacagccggtactgcctgagcagcagactgagagtgtccgccaccttctggcagaacccccggaaccacttcagatgccaggtgcagttctacggcctgagcgagaacgacgagtggacccaggacagagccaagcccgtgacccagatcgtgtctgccgaagcctggggcagagccgattgcggatcccagagcttcggcctgctggaccccaagctgtgctacctgctggatggcatcctgttcatctacggcgtgatcctgaccgccctgttcctgagagtgaagttcagcagaagcgccgacgcccctgcctaccagcagggacagaaccaactgtacaacgagctgaacctgggcagacgggaagagtacgacgtgctggacaagcggagaggcagggaccctgagatgggcggaaagccccagcggagaaagaacccccaggaaggactgtataacgaactccagaaagacaagatggccgaagcctacagcgagatcggcatgaagggcgagcggagaagaggcaagggccacgatggcctgtaccagggcctgagcaccgccaccaaggacacctatgacgccctgcacatgcaggccctgcctccaagaagggccaagcgatctggatctggagcaacaaacttctcactactcaaacaagcaggtgacgtggaggagaatcccgggcctactagtatggactggatttggcgcatccttttccttgtcggcgctgctaccggcgcgcattccttcgaagaagtgcagctggttgaatcaggcggaggactggttcagcctggcggatctctgagactgtcttgtgccgccagcggctacaccttcagcagctactggatgaactgggtccgacaggcccctggcaaaggactggaatgggtcggaatgatcgaccccagcgacagcgagacacactacaaccacatcttcaaggaccgcttcaccatcagcgccgacaccagcaagaataccgcctacctccagatgaactccctgagagccgaggacaccgccgtgtactactgcgccagaaacctgtatctgtggggccagggaaccctggtcacagtgtcatctacgcgtatccagaaccctgatcctgccgtgtaccagctgcgggatagcaagagcagcgacaagagcgtgtgtctgttcaccgacttcgacagccagaccaacgtgtcccagagcaaggactccgacgtgtacatcaccgataagaccgtgctggacatgcggagcatggacttcaagagcaactccgccgtggcctggtccaacaagtccgatttcgcctgcgccaacgccttcaacaacagcattatccccgaggacacattcttcccaagccccgagagcagctgcggtacccagagttttgggttgttggaccctaaattgtgctatctgttggacggaatcctgttcatttacggagtgatcctgaccgcattgttcctgcgggttaagttttccagatccgcagacgcacccgcttaccaacaagggcagaaccaactctacaatgaacttaatttggggcggagggaagagtacgacgttctggacaaaaggaggggacgagatcccgagatgggcggaaagcctcagcgaaggaagaatccgcaagaggggctttataacgaactccagaaagataaaatggcagaagcctatagtgagattgggatgaagggagaaaggaggaggggtaaaggtcacgatgggttgtaccaaggattgagcacagccactaaagatacctatgatgcgctccacatgcaggccctgccgccaaga

SEQ ID NO: 36858 - DNA, 2571 bp, synthetic construct
  source 1..2571: mol_type = other DNA
atggccttaccagtgaccgccttgctcctgccgctggccttgctgctccacgccgccaggccggacatccagatgacacagagccctagcagcctgtctgccagcgtgggagacagagtgaccatcacatgcaagagcagccagagcctgctggactccgatggcaagacctacctgaactggtatcagcagaagcccggcaaggcccctaagctgctgatctacctggtgtccaagctggatagcggcgtgcccagcagattttctggcagcggcagcggaaccgacttcaccctgacaatatccagcctccagcctgaggacttcgccacctactactgctggcaaggcacccactttccattcaccttcggccagggcaccaaggtggaaatcaaaagactcgaggaggacctgaagaacgtgttcccacctgaggtggccgtgttcgagcctagcgaggccgagatcagccacacccagaaagccaccctcgtgtgcctggctaccggcttctaccccgaccatgtggaactgtcttggtgggtcaacggcaaagaggtgcacagcggcgtgtctaccgacccccagccactgaaagaacagcccgccctgaacgacagccggtactgcctgagcagcagactgagagtgtccgccaccttctggcagaacccccggaaccacttcagatgccaggtgcagttctacggcctgagcgagaacgacgagtggacccaggacagagccaagcccgtgacccagatcgtgtctgccgaagcctggggcagagccgattgcggatcccagagcttcggcctgctggaccccaagctgtgctacctgctggatggcatcctgttcatctacggcgtgatcctgaccgccctgttcctgagagtgaagttcagcagaagcgccgacgcccctgcctaccagcagggacagaaccaactgtacaacgagctgaacctgggcagacgggaagagtacgacgtgctggacaagcggagaggcagggaccctgagatgggcggaaagccccagcggagaaagaacccccaggaaggactgtataacgaactccagaaagacaagatggccgaagcctacagcgagatcggcatgaagggcgagcggagaagaggcaagggccacgatggcctgtaccagggcctgagcaccgccaccaaggacacctatgacgccctgcacatgcaggccctgcctccaagaagggccaagcgatctggatctggagcaacaaacttctcactactcaaacaagcaggtgacgtggaggagaatcccgggcctactagtatggactggatttggcgcatccttttccttgtcggcgctgctaccggcgcgcattccttcgaagaagtgcagctggttgaatcaggcggaggactggttcagcctggcggatctctgagactgtcttgtgccgccagcggctacaccttcagcagctactggatgaactgggtccgacaggcccctggcaaaggactggaatgggtcggaatgatcgaccccagcgacagcgagacacactacaaccacatcttcaaggaccgcttcaccatcagcgccgacaccagcaagaataccgcctacctccagatgaactccctgagagccgaggacaccgccgtgtactactgcgccagaaacctgtatctgtggggccagggaaccctggtcacagtgtcatctacgcgtatccagaaccctgatcctgccgtgtaccagctgcgggatagcaagagcagcgacaagagcgtgtgtctgttcaccgacttcgacagccagaccaacgtgtcccagagcaaggactccgacgtgtacatcaccgataagaccgtgctggacatgcggagcatggacttcaagagcaactccgccgtggcctggtccaacaagtccgatttcgcctgcgccaacgccttcaacaacagcattatccccgaggacacattcttcccaagccccgagagcagctgcggtacccagagttttgggttgttggaccctaaattgtgctatctgttggacggaatcctgttcatttacggagtgatcctgaccgcattgttcctgaggagcaagcggtcacggctgctccacagcgattacatgaatatgacaccacgaagaccgggtcctactcgcaaacactaccaaccctacgcacctccccgcgactttgcagcgtaccgatctcgggttaagttttccagatccgcagacgcacccgcttaccaacaagggcagaaccaactctacaatgaacttaatttggggcggagggaagagtacgacgttctggacaaaaggaggggacgagatcccgagatgggcggaaagcctcagcgaaggaagaatccgcaagaggggctttataacgaactccagaaagataaaatggcagaagcctatagtgagattgggatgaagggagaaaggaggaggggtaaaggtcacgatgggttgtaccaaggattgagcacagccactaaagatacctatgatgcgctccacatgcaggccctgccgccaaga

SEQ ID NO: 36859 - DNA, 2700 bp, synthetic construct
  source 1..2700: mol_type = other DNA
atggccttaccagtgaccgccttgctcctgccgctggccttgctgctccacgccgccaggccggacatccagatgacacagagccctagcagcctgtctgccagcgtgggagacagagtgaccatcacatgcaagagcagccagagcctgctggactccgatggcaagacctacctgaactggtatcagcagaagcccggcaaggcccctaagctgctgatctacctggtgtccaagctggatagcggcgtgcccagcagattttctggcagcggcagcggaaccgacttcaccctgacaatatccagcctccagcctgaggacttcgccacctactactgctggcaaggcacccactttccattcaccttcggccagggcaccaaggtggaaatcaaaagactcgaggaggacctgaagaacgtgttcccacctgaggtggccgtgttcgagcctagcgaggccgagatcagccacacccagaaagccaccctcgtgtgcctggctaccggcttctaccccgaccatgtggaactgtcttggtgggtcaacggcaaagaggtgcacagcggcgtgtctaccgacccccagccactgaaagaacagcccgccctgaacgacagccggtactgcctgagcagcagactgagagtgtccgccaccttctggcagaacccccggaaccacttcagatgccaggtgcagttctacggcctgagcgagaacgacgagtggacccaggacagagccaagcccgtgacccagatcgtgtctgccgaagcctggggcagagccgattgcggatcccagagcttcggcctgctggaccccaagctgtgctacctgctggatggcatcctgttcatctacggcgtgatcctgaccgccctgttcctgaaacggggcagaaagaaactcctgtatatattcaaacaaccatttatgagaccagtacaaactactcaagaggaagatggctgtagctgccgatttccagaagaagaagaaggaggatgtgaactgagagtgaagttcagcagaagcgccgacgcccctgcctaccagcagggacagaaccaactgtacaacgagctgaacctgggcagacgggaagagtacgacgtgctggacaagcggagaggcagggaccctgagatgggcggaaagccccagcggagaaagaacccccaggaaggactgtataacgaactccagaaagacaagatggccgaagcctacagcgagatcggcatgaagggcgagcggagaagaggcaagggccacgatggcctgtaccagggcctgagcaccgccaccaaggacacctatgacgccctgcacatgcaggccctgcctccaagaagggccaagcgatctggatctggagcaacaaacttctcactactcaaacaagcaggtgacgtggaggagaatcccgggcctactagtatggactggatttggcgcatccttttccttgtcggcgctgctaccggcgcgcattccttcgaagaagtgcagctggttgaatcaggcggaggactggttcagcctggcggatctctgagactgtcttgtgccgccagcggctacaccttcagcagctactggatgaactgggtccgacaggcccctggcaaaggactggaatgggtcggaatgatcgaccccagcgacagcgagacacactacaaccacatcttcaaggaccgcttcaccatcagcgccgacaccagcaagaataccgcctacctccagatgaactccctgagagccgaggacaccgccgtgtactactgcgccagaaacctgtatctgtggggccagggaaccctggtcacagtgtcatctacgcgtatccagaaccctgatcctgccgtgtaccagctgcgggatagcaagagcagcgacaagagcgtgtgtctgttcaccgacttcgacagccagaccaacgtgtcccagagcaaggactccgacgtgtacatcaccgataagaccgtgctggacatgcggagcatggacttcaagagcaactccgccgtggcctggtccaacaagtccgatttcgcctgcgccaacgccttcaacaacagcattatccccgaggacacattcttcccaagccccgagagcagctgcggtacccagagttttgggttgttggaccctaaattgtgctatctgttggacggaatcctgttcatttacggagtgatcctgaccgcattgttcctgaagagaggccggaagaagctgctgtacatcttcaagcagcctttcatgcggcccgtgcagaccacccaggaagaggacggctgctcctgccggttccccgaggaagaagaaggcggctgcgagctgcgggttaagttttccagatccgcagacgcacccgcttaccaacaagggcagaaccaactctacaatgaacttaatttggggcggagggaagagtacgacgttctggacaaaaggaggggacgagatcccgagatgggcggaaagcctcagcgaaggaagaatccgcaagaggggctttataacgaactccagaaagataaaatggcagaagcctatagtgagattgggatgaagggagaaaggaggaggggtaaaggtcacgatgggttgtaccaaggattgagcacagccactaaagatacctatgatgcgctccacatgcaggccctgccgccaaga

SEQ ID NO: 36860 - DNA, 1761 bp, synthetic construct
  source 1..1761: mol_type = other DNA
atggccttaccagtgaccgccttgctcctgccgctggccttgctgctccacgccgccaggccggacatccagatgacacagagccctagcagcctgtctgccagcgtgggagacagagtgaccatcacatgcaagagcagccagagcctgctggactccgatggcaagacctacctgaactggtatcagcagaagcccggcaaggcccctaagctgctgatctacctggtgtccaagctggatagcggcgtgcccagcagattttctggcagcggcagcggaaccgacttcaccctgacaatatccagcctccagcctgaggacttcgccacctactactgctggcaaggcacccactttccattcaccttcggccagggcaccaaggtggaaatcaaaagactcgagcagagcttcggcctgctggaccccaagctgtgctacctgctggatggcatcctgttcatctacggcgtgatcctgaccgccctgttcctgagagtgaagttcagcagaagcgccgacgcccctgcctaccagcagggacagaaccaactgtacaacgagctgaacctgggcagacgggaagagtacgacgtgctggacaagcggagaggcagggaccctgagatgggcggaaagccccagcggagaaagaacccccaggaaggactgtataacgaactccagaaagacaagatggccgaagcctacagcgagatcggcatgaagggcgagcggagaagaggcaagggccacgatggcctgtaccagggcctgagcaccgccaccaaggacacctatgacgccctgcacatgcaggccctgcctccaagaagggccaagcgatctggatctggagcaacaaacttctcactactcaaacaagcaggtgacgtggaggagaatcccgggcctactagtatggactggatttggcgcatccttttccttgtcggcgctgctaccggcgcgcattccttcgaagaagtgcagctggttgaatcaggcggaggactggttcagcctggcggatctctgagactgtcttgtgccgccagcggctacaccttcagcagctactggatgaactgggtccgacaggcccctggcaaaggactggaatgggtcggaatgatcgaccccagcgacagcgagacacactacaaccacatcttcaaggaccgcttcaccatcagcgccgacaccagcaagaataccgcctacctccagatgaactccctgagagccgaggacaccgccgtgtactactgcgccagaaacctgtatctgtggggccagggaaccctggtcacagtgtcatctacgcgtcagagttttgggttgttggaccctaaattgtgctatctgttggacggaatcctgttcatttacggagtgatcctgaccgcattgttcctgcgggttaagttttccagatccgcagacgcacccgcttaccaacaagggcagaaccaactctacaatgaacttaatttggggcggagggaagagtacgacgttctggacaaaaggaggggacgagatcccgagatgggcggaaagcctcagcgaaggaagaatccgcaagaggggctttataacgaactccagaaagataaaatggcagaagcctatagtgagattgggatgaagggagaaaggaggaggggtaaaggtcacgatgggttgtaccaaggattgagcacagccactaaagatacctatgatgcgctccacatgcaggccctgccgccaaga

SEQ ID NO: 36861 - DNA, 1935 bp, synthetic construct
  source 1..1935: mol_type = other DNA
atggccttaccagtgaccgccttgctcctgccgctggccttgctgctccacgccgccaggccggacatccagatgacacagagccctagcagcctgtctgccagcgtgggagacagagtgaccatcacatgcaagagcagccagagcctgctggactccgatggcaagacctacctgaactggtatcagcagaagcccggcaaggcccctaagctgctgatctacctggtgtccaagctggatagcggcgtgcccagcagattttctggcagcggcagcggaaccgacttcaccctgacaatatccagcctccagcctgaggacttcgccacctactactgctggcaaggcacccactttccattcaccttcggccagggcaccaaggtggaaatcaaaagactcgagggacagcctaaggccaatcctaccgtgacactgttccctccaagcagcgaagaactccaggccaacaaggccacacttgtgtgcctgatctccgacttctaccctggggctgtgacagtggcttggaaggccgatggatctcctgtgaaagccggcgtggaaaccaccaagccatccaagcagagcaacaacaaatacgccgccagctcctacctgagcctgacacctgagcagtggaagtcccacagatcctacagctgccaagtgacccacgaaggcagcaccgtggaaaagacagtggcccctacagagtgcagccccatcaagaccgatgtgattacaatggaccccaaggacaactgctccaaggacgccaacgataccctgctgctccagctgaccaacaccagcgcctactacatgtacttgttgctgctgctgaagtccgtggtgtacttcgccatcatcacatgctgcctgctgcggagaaccgccttctgctgcaacggcgagaagtctagggccaagcgatctggatctggagcaacaaacttctcactactcaaacaagcaggtgacgtggaggagaatcccgggcctactagtatggactggatttggcgcatccttttccttgtcggcgctgctaccggcgcgcattccttcgaagaagtgcagctggttgaatcaggcggaggactggttcagcctggcggatctctgagactgtcttgtgccgccagcggctacaccttcagcagctactggatgaactgggtccgacaggcccctggcaaaggactggaatgggtcggaatgatcgaccccagcgacagcgagacacactacaaccacatcttcaaggaccgcttcaccatcagcgccgacaccagcaagaataccgcctacctccagatgaactccctgagagccgaggacaccgccgtgtactactgcgccagaaacctgtatctgtggggccagggaaccctggtcacagtgtcatctacgcgtgcctctacaaagggaccctccgtgtttcctctggctcccagcagcaagtctacaagcggaggaacagccgctctgggctgcctggtcaaggattactttcccgagcctgtgaccgtgtcctggaatagcggagcactgacaagcggcgtgcacacctttccagccgtgctgcaaagcagcggcctgtactctctgagcagcgtggtcacagtgcctagctctagcctgggcacccagacctacatctgcaatgtgaaccacaagcctagcaacaccaaggtggacaagagagtggaacccaagagctgtgaagtgaaaaccgactccaccgaccacgtgaagcccaaagagacagagaacaccaagcagcccagcaagagctgccacaagcccaaggccatcgtgcacaccgagaaagtgaacatgatgagcctgaccgtgctgggcctgcggatgctgttcgccaaaaccgtggccgtgaacttcctgctgaccgccaagctgttcttcctc

SEQ ID NO: 36862 - DNA, 1869 bp, synthetic construct
  source 1..1869: mol_type = other DNA
atggccttaccagtgaccgccttgctcctgccgctggccttgctgctccacgccgccaggccggacatccagatgacacagagccctagcagcctgtctgccagcgtgggagacagagtgaccatcacatgcaagagcagccagagcctgctggactccgatggcaagacctacctgaactggtatcagcagaagcccggcaaggcccctaagctgctgatctacctggtgtccaagctggatagcggcgtgcccagcagattttctggcagcggcagcggaaccgacttcaccctgacaatatccagcctccagcctgaggacttcgccacctactactgctggcaaggcacccactttccattcaccttcggccagggcaccaaggtggaaatcaaaagactcgagggacagcctaaggccaatcctaccgtgacactgttccctccaagcagcgaagaactccaggccaacaaggccacacttgtgtgcctgatctccgacttctaccctggggctgtgacagtggcttggaaggccgatggatctcctgtgaaagccggcgtggaaaccaccaagccatccaagcagagcaacaacaaatacgccgccagctcctacctgagcctgacacctgagcagtggaagtcccacagatcctacagctgccaagtgacccacgaaggcagcaccgtggaaaagacagtggcccctacagagtgcagcggcagagccgattgcggcatcaccagcgccagctaccaccagggcgtgctgagcgccaccatcctgtacgagatcctgctgggcaaggccaccctgtacgccgtgctggtgtctgccctggtgctgatggctatggtcaagcggaaggacagccggggaagggccaagcgatctggatctggagcaacaaacttctcactactcaaacaagcaggtgacgtggaggagaatcccgggcctactagtatggactggatttggcgcatccttttccttgtcggcgctgctaccggcgcgcattccttcgaagaagtgcagctggttgaatcaggcggaggactggttcagcctggcggatctctgagactgtcttgtgccgccagcggctacaccttcagcagctactggatgaactgggtccgacaggcccctggcaaaggactggaatgggtcggaatgatcgaccccagcgacagcgagacacactacaaccacatcttcaaggaccgcttcaccatcagcgccgacaccagcaagaataccgcctacctccagatgaactccctgagagccgaggacaccgccgtgtactactgcgccagaaacctgtatctgtggggccagggaaccctggtcacagtgtcatctacgcgtgcctctacaaagggaccctccgtgtttcctctggctcccagcagcaagtctacaagcggaggaacagccgctctgggctgcctggtcaaggattactttcccgagcctgtgaccgtgtcctggaatagcggagcactgacaagcggcgtgcacacctttccagccgtgctgcaaagcagcggcctgtactctctgagcagcgtggtcacagtgcctagctctagcctgggcacccagacctacatctgcaatgtgaaccacaagcctagcaacaccaaggtggacaagagagtggaacccaagagctgtatccccgaggacacattcttcccaagcagcgacgtgccctgcgacgtgaagctggtggaaaagagcttcgagacagacaccaacctgaacttccagaacctgagcgtgatcggcttcagaatcctgctgctgaaagtggccggctttaacctgctgatgaccctgcggctgtggtccagc

SEQ ID NO: 36863 - DNA, 1869 bp, synthetic construct
  source 1..1869: mol_type = other DNA
atggccttaccagtgaccgccttgctcctgccgctggccttgctgctccacgccgccaggccggacatccagatgacacagagccctagcagcctgtctgccagcgtgggagacagagtgaccatcacatgcaagagcagccagagcctgctggactccgatggcaagacctacctgaactggtatcagcagaagcccggcaaggcccctaagctgctgatctacctggtgtccaagctggatagcggcgtgcccagcagattttctggcagcggcagcggaaccgacttcaccctgacaatatccagcctccagcctgaggacttcgccacctactactgctggcaaggcacccactttccattcaccttcggccagggcaccaaggtggaaatcaaaagactcgagggacagcctaaggccaatcctaccgtgacactgttccctccaagcagcgaagaactccaggccaacaaggccacacttgtgtgcctgatctccgacttctaccctggggctgtgacagtggcttggaaggccgatggatctcctgtgaaagccggcgtggaaaccaccaagccatccaagcagagcaacaacaaatacgccgccagctcctacctgagcctgacacctgagcagtggaagtcccacagatcctacagctgccaagtgacccacgaaggcagcaccgtggaaaagacagtggcccctacagagtgcagcggcagagccgattgcggctttaccagcgagagctaccagcagggcgtgctgagcgccaccatcctgtacgagatcctgctgggcaaggccaccctgtacgccgtgctggtgtctgccctggtgctgatggctatggtcaagcggaaggacagccggggaagggccaagcgatctggatctggagcaacaaacttctcactactcaaacaagcaggtgacgtggaggagaatcccgggcctactagtatggactggatttggcgcatccttttccttgtcggcgctgctaccggcgcgcattccttcgaagaagtgcagctggttgaatcaggcggaggactggttcagcctggcggatctctgagactgtcttgtgccgccagcggctacaccttcagcagctactggatgaactgggtccgacaggcccctggcaaaggactggaatgggtcggaatgatcgaccccagcgacagcgagacacactacaaccacatcttcaaggaccgcttcaccatcagcgccgacaccagcaagaataccgcctacctccagatgaactccctgagagccgaggacaccgccgtgtactactgcgccagaaacctgtatctgtggggccagggaaccctggtcacagtgtcatctacgcgtgcctctacaaagggaccctccgtgtttcctctggctcccagcagcaagtctacaagcggaggaacagccgctctgggctgcctggtcaaggattactttcccgagcctgtgaccgtgtcctggaatagcggagcactgacaagcggcgtgcacacctttccagccgtgctgcaaagcagcggcctgtactctctgagcagcgtggtcacagtgcctagctctagcctgggcacccagacctacatctgcaatgtgaaccacaagcctagcaacaccaaggtggacaagagagtggaacccaagagctgtatccccgaggacacattcttcccaagccccgagagcagctgcgacgtgaagctggtggaaaagagcttcgagacagacaccaacctgaacttccagaacctgagcgtgatcggcttcagaatcctgctgctgaaagtggccggctttaacctgctgatgaccctgcggctgtggtccagc

SEQ ID NO: 36864 - DNA, 1347 bp, synthetic construct
  source 1..1347: mol_type = other DNA
atggccttaccagtgaccgccttgctcctgccgctggccttgctgctccacgccgccaggccggacatccagatgacacagagccctagcagcctgtctgccagcgtgggagacagagtgaccatcacatgcaagagcagccagagcctgctggactccgatggcaagacctacctgaactggtatcagcagaagcccggcaaggcccctaagctgctgatctacctggtgtccaagctggatagcggcgtgcccagcagattttctggcagcggcagcggaaccgacttcaccctgacaatatccagcctccagcctgaggacttcgccacctactactgctggcaaggcacccactttccattcaccttcggccagggcaccaaggtggaaatcaaaagaggcggaggcggaagtggaggcggaggatctggcggcggaggctctgaagtgcagctggttgaatcaggcggaggactggttcagcctggcggatctctgagactgtcttgtgccgccagcggctacaccttcagcagctactggatgaactgggtccgacaggcccctggcaaaggactggaatgggtcggaatgatcgaccccagcgacagcgagacacactacaaccacatcttcaaggaccgcttcaccatcagcgccgacaccagcaagaataccgcctacctccagatgaactccctgagagccgaggacaccgccgtgtactactgcgccagaaacctgtatctgtggggccagggaaccctggtcacagtgtcatctacgcgtgacggtaacgaggagatgggaggaatcactcaaaccccttacaaagtctcaatttcaggaacaactgttatccttacatgtccccagtatcctggcagcgagatcctttggcagcataacgacaagaatatagggggagatgaagacgataagaatatcggatctgacgaggatcacttgagcctgaaagagttctccgagcttgaacaaagcggatattatgtgtgctatccgcgcgggtcaaagccggaagacgctaacttttacctttatctccgagccagagtgtgcgaaaattgcatggaaatggacgttatgtccgttgctacaatagttatcgtagatatatgcatcacgggtggactgcttctgctggtttattattggtccaagaatagaaaggccaaagctaaacccgtgaccagaggcgctggcgcaggcggaaggcaaaggggacaaaacaaagaacggccaccaccagtgccaaatccagattatgagcctattcggaaaggacagagggacctgtactctggcctgaatcagagaagaatc

SEQ ID NO: 36865 - DNA, 1242 bp, synthetic construct
  source 1..1242: mol_type = other DNA
atggccttaccagtgaccgccttgctcctgccgctggccttgctgctccacgccgccaggccggacatccagatgacacagagccctagcagcctgtctgccagcgtgggagacagagtgaccatcacatgcaagagcagccagagcctgctggactccgatggcaagacctacctgaactggtatcagcagaagcccggcaaggcccctaagctgctgatctacctggtgtccaagctggatagcggcgtgcccagcagattttctggcagcggcagcggaaccgacttcaccctgacaatatccagcctccagcctgaggacttcgccacctactactgctggcaaggcacccactttccattcaccttcggccagggcaccaaggtggaaatcaaaagaggcggaggcggaagtggaggcggaggatctggcggcggaggctctgaagtgcagctggttgaatcaggcggaggactggttcagcctggcggatctctgagactgtcttgtgccgccagcggctacaccttcagcagctactggatgaactgggtccgacaggcccctggcaaaggactggaatgggtcggaatgatcgaccccagcgacagcgagacacactacaaccacatcttcaaggaccgcttcaccatcagcgccgacaccagcaagaataccgcctacctccagatgaactccctgagagccgaggacaccgccgtgtactactgcgccagaaacctgtatctgtggggccagggaaccctggtcacagtgtcatctacgcgtttcaagatccccatcgaggaactggaagatcgggtgttcgtgaactgcaacacctctatcacctgggtggaaggcaccgtgggaacactgctgagcgacatcaccagactggacctcggcaagcggattctggaccctcggggcatctacagatgcaacggcaccgacatctacaaggacaaagaaagcaccgtgcaggtccactacagaatgtgccagtcctgcgtggaactggaccctgctacagtggccggcatcatcgtgaccgatgtgatcgctactctgctgctggctctgggagtgttctgcttcgccggacacgaaacaggcagactgtctggcgctgccgatacacaggccctgctgagaaacgaccaagtgtatcagcccctgcgcgacagagatgatgcccagtattctcacctcggcggcaactgggctagaaacaag

SEQ ID NO: 36866 - DNA, 1272 bp, synthetic construct
  source 1..1272: mol_type = other DNA
atggccttaccagtgaccgccttgctcctgccgctggccttgctgctccacgccgccaggccggacatccagatgacacagagccctagcagcctgtctgccagcgtgggagacagagtgaccatcacatgcaagagcagccagagcctgctggactccgatggcaagacctacctgaactggtatcagcagaagcccggcaaggcccctaagctgctgatctacctggtgtccaagctggatagcggcgtgcccagcagattttctggcagcggcagcggaaccgacttcaccctgacaatatccagcctccagcctgaggacttcgccacctactactgctggcaaggcacccactttccattcaccttcggccagggcaccaaggtggaaatcaaaagaggcggaggcggaagtggaggcggaggatctggcggcggaggctctgaagtgcagctggttgaatcaggcggaggactggttcagcctggcggatctctgagactgtcttgtgccgccagcggctacaccttcagcagctactggatgaactgggtccgacaggcccctggcaaaggactggaatgggtcggaatgatcgaccccagcgacagcgagacacactacaaccacatcttcaaggaccgcttcaccatcagcgccgacaccagcaagaataccgcctacctccagatgaactccctgagagccgaggacaccgccgtgtactactgcgccagaaacctgtatctgtggggccagggaaccctggtcacagtgtcatctacgcgtcagagcatcaagggcaaccacctggtcaaggtgtacgactaccaagaggacggcagcgtgctgctgacatgtgatgccgaggccaagaacatcacctggtttaaggacggcaagatgatcggcttcctgaccgaggacaagaagaagtggaacctgggcagcaacgctaaggaccccagaggcatgtatcagtgcaagggcagccagaacaagagcaagcccctccaggtgtactaccggatgtgccagaactgcatcgagctgaacgccgctaccatcagcggctttctgttcgccgagatcgtgtccatcttcgtgctggccgtgggcgtgtactttatcgctggacaggatggcgtgcggcagagcagagcttccgataagcaaaccctgctgcctaacgaccagctgtaccagcctctgaaggacagagaggacgaccagtacagccacctccagggcaatcagctgagaagaaac

SEQ ID NO: 36867 - DNA, 1221 bp, synthetic construct
  source 1..1221: mol_type = other DNA
atggccttaccagtgaccgccttgctcctgccgctggccttgctgctccacgccgccaggccggacatccagatgacacagagccctagcagcctgtctgccagcgtgggagacagagtgaccatcacatgcaagagcagccagagcctgctggactccgatggcaagacctacctgaactggtatcagcagaagcccggcaaggcccctaagctgctgatctacctggtgtccaagctggatagcggcgtgcccagcagattttctggcagcggcagcggaaccgacttcaccctgacaatatccagcctccagcctgaggacttcgccacctactactgctggcaaggcacccactttccattcaccttcggccagggcaccaaggtggaaatcaaaagaggcggaggcggaagtggaggcggaggatctggcggcggaggctctgaagtgcagctggttgaatcaggcggaggactggttcagcctggcggatctctgagactgtcttgtgccgccagcggctacaccttcagcagctactggatgaactgggtccgacaggcccctggcaaaggactggaatgggtcggaatgatcgaccccagcgacagcgagacacactacaaccacatcttcaaggaccgcttcaccatcagcgccgacaccagcaagaataccgcctacctccagatgaactccctgagagccgaggacaccgccgtgtactactgcgccagaaacctgtatctgtggggccagggaaccctggtcacagtgtcatctacgcgtcagagttttgggttgttggaccctaaattgtgctatctgttggacggaatcctgttcatttacggagtgatcctgaccgcattgttcctgcgggttaagttttccagatccgcagacgcacccgcttaccaacaagggcagaaccaactctacaatgaacttaatttggggcggagggaagagtacgacgttctggacaaaaggaggggacgagatcccgagatgggcggaaagcctcagcgaaggaagaatccgcaagaggggctttataacgaactccagaaagataaaatggcagaagcctatagtgagattgggatgaagggagaaaggaggaggggtaaaggtcacgatgggttgtaccaaggattgagcacagccactaaagatacctatgatgcgctccacatgcaggccctgccgccaaga

SEQ ID NO: 36868 - DNA, 1506 bp, synthetic construct
  source 1..1506: mol_type = other DNA
atggccttaccagtgaccgccttgctcctgccgctggccttgctgctccacgccgccaggccggacatccagatgacacagagccctagcagcctgtctgccagcgtgggagacagagtgaccatcacatgcaagagcagccagagcctgctggactccgatggcaagacctacctgaactggtatcagcagaagcccggcaaggcccctaagctgctgatctacctggtgtccaagctggatagcggcgtgcccagcagattttctggcagcggcagcggaaccgacttcaccctgacaatatccagcctccagcctgaggacttcgccacctactactgctggcaaggcacccactttccattcaccttcggccagggcaccaaggtggaaatcaaaagaggcggaggcggaagtggaggcggaggatctggcggcggaggctctgaagtgcagctggttgaatcaggcggaggactggttcagcctggcggatctctgagactgtcttgtgccgccagcggctacaccttcagcagctactggatgaactgggtccgacaggcccctggcaaaggactggaatgggtcggaatgatcgaccccagcgacagcgagacacactacaaccacatcttcaaggaccgcttcaccatcagcgccgacaccagcaagaataccgcctacctccagatgaactccctgagagccgaggacaccgccgtgtactactgcgccagaaacctgtatctgtggggccagggaaccctggtcacagtgtcatctacgcgtggaatgaggactgaggatcttcccaaagctgtcgtctttctcgaaccccaatggtatcgggtgctcgaaaaagactctgtgacactgaaatgccaaggggcctactctcccgaggacaactccacacagtggtttcataatgagtccctcatcagctctcaggccagctcttatttcattgatgccgctacagtggacgactccggcgagtatcggtgtcagaccaatctgtctacactgtctgaccccgtgcagcttgaggtccacattggatggttgctcttgcaagccccacgctgggttttcaaagaggaagatccaatccatctgcggtgccacagctggaaaaacaccgctctccacaaagtcacatacctgcaaaatggcaaaggacgcaaatacttccatcacaattccgatttttacattccgaaggctaccctgaaagacagcggcagctatttctgccggggactcgtcggctccaagaatgtgtcctccgaaaccgtgaatatcacgattacccaaggactggctgtgcctacaatctctagcttctttccgcctggataccaagtctccttctgtcttgtgatggtcctcctgtttgctgtggacacaggactgtacttttccgtgaaaacgaacatccgcagctccacacgcgattggaaagatcacaagtttaaatggcgcaaagatccccaggacaag

SEQ ID NO: 36869 - DNA, 1431 bp, synthetic construct
  source 1..1431: mol_type = other DNA
atggccttaccagtgaccgccttgctcctgccgctggccttgctgctccacgccgccaggccggacatccagatgacacagagccctagcagcctgtctgccagcgtgggagacagagtgaccatcacatgcaagagcagccagagcctgctggactccgatggcaagacctacctgaactggtatcagcagaagcccggcaaggcccctaagctgctgatctacctggtgtccaagctggatagcggcgtgcccagcagattttctggcagcggcagcggaaccgacttcaccctgacaatatccagcctccagcctgaggacttcgccacctactactgctggcaaggcacccactttccattcaccttcggccagggcaccaaggtggaaatcaaaagaggcggaggcggaagtggaggcggaggatctggcggcggaggctctgaagtgcagctggttgaatcaggcggaggactggttcagcctggcggatctctgagactgtcttgtgccgccagcggctacaccttcagcagctactggatgaactgggtccgacaggcccctggcaaaggactggaatgggtcggaatgatcgaccccagcgacagcgagacacactacaaccacatcttcaaggaccgcttcaccatcagcgccgacaccagcaagaataccgcctacctccagatgaactccctgagagccgaggacaccgccgtgtactactgcgccagaaacctgtatctgtggggccagggaaccctggtcacagtgtcatctacgcgtggaatgaggactgaggatcttcccaaagctgtcgtctttctcgaaccccaatggtatcgggtgctcgaaaaagactctgtgacactgaaatgccaaggggcctactctcccgaggacaactccacacagtggtttcataatgagtccctcatcagctctcaggccagctcttatttcattgatgccgctacagtggacgactccggcgagtatcggtgtcagaccaatctgtctacactgtctgaccccgtgcagcttgaggtccacattggatggttgctcttgcaagccccacgctgggttttcaaagaggaagatccaatccatctgcggtgccacagctggaaaaacaccgctctccacaaagtcacatacctgcaaaatggcaaaggacgcaaatacttccatcacaattccgatttttacattccgaaggctaccctgaaagacagcggcagctatttctgccggggactcgtcggctccaagaatgtgtcctccgaaaccgtgaatatcacgattacccaaggactggctgtgcctacaatctctagcttctttccgcctggataccaagtctccttctgtcttgtgatggtcctcctgtttgctgtggacacaggactgtacttttccgtg

SEQ ID NO: 36870 - DNA, 1434 bp, synthetic construct
  source 1..1434: mol_type = other DNA
atggccttaccagtgaccgccttgctcctgccgctggccttgctgctccacgccgccaggccggacatccagatgacacagagccctagcagcctgtctgccagcgtgggagacagagtgaccatcacatgcaagagcagccagagcctgctggactccgatggcaagacctacctgaactggtatcagcagaagcccggcaaggcccctaagctgctgatctacctggtgtccaagctggatagcggcgtgcccagcagattttctggcagcggcagcggaaccgacttcaccctgacaatatccagcctccagcctgaggacttcgccacctactactgctggcaaggcacccactttccattcaccttcggccagggcaccaaggtggaaatcaaaagaggcggaggcggaagtggaggcggaggatctggcggcggaggctctgaagtgcagctggttgaatcaggcggaggactggttcagcctggcggatctctgagactgtcttgtgccgccagcggctacaccttcagcagctactggatgaactgggtccgacaggcccctggcaaaggactggaatgggtcggaatgatcgaccccagcgacagcgagacacactacaaccacatcttcaaggaccgcttcaccatcagcgccgacaccagcaagaataccgcctacctccagatgaactccctgagagccgaggacaccgccgtgtactactgcgccagaaacctgtatctgtggggccagggaaccctggtcacagtgtcatctacgcgtggaatgaggactgaggatcttcccaaagctgtcgtctttctcgaaccccaatggtatcgggtgctcgaaaaagactctgtgacactgaaatgccaaggggcctactctcccgaggacaactccacacagtggtttcataatgagtccctcatcagctctcaggccagctcttatttcattgatgccgctacagtggacgactccggcgagtatcggtgtcagaccaatctgtctacactgtctgaccccgtgcagcttgaggtccacattggatggttgctcttgcaagccccacgctgggttttcaaagaggaagatccaatccatctgcggtgccacagctggaaaaacaccgctctccacaaagtcacatacctgcaaaatggcaaaggacgcaaatacttccatcacaattccgatttttacattccgaaggctaccctgaaagacagcggcagctatttctgccggggactcgtcggctccaagaatgtgtcctccgaaaccgtgaatatcacgattacccaaggactggctgtgcctacaatctctagcttctttccgcctggataccaagtctccttctgtcttgtgatggtcctcctgtttgctgtggacacaggactgtacttttccgtgaaa

SEQ ID NO: 36871 - DNA, 2166 bp, synthetic construct
  source 1..2166: mol_type = other DNA
atggccttaccagtgaccgccttgctcctgccgctggccttgctgctccacgccgccaggccggacatccagatgacacagagccctagcagcctgtctgccagcgtgggagacagagtgaccatcacatgcaagagcagccagagcctgctggactccgatggcaagacctacctgaactggtatcagcagaagcccggcaaggcccctaagctgctgatctacctggtgtccaagctggatagcggcgtgcccagcagattttctggcagcggcagcggaaccgacttcaccctgacaatatccagcctccagcctgaggacttcgccacctactactgctggcaaggcacccactttccattcaccttcggccagggcaccaaggtggaaatcaaaagactcgagggacagcctaaggccaatcctaccgtgacactgttccctccaagcagcgaagaactccaggccaacaaggccacacttgtgtgcctgatctccgacttctaccctggggctgtgacagtggcttggaaggccgatggatctcctgtgaaagccggcgtggaaaccaccaagccatccaagcagagcaacaacaaatacgccgccagctcctacctgagcctgacacctgagcagtggaagtcccacagatcctacagctgccaagtgacccacgaaggcagcaccgtggaaaagacagtggcccctacagagtgcagcggatcccagagcttcggcctgctggaccccaagctgtgctacctgctggatggcatcctgttcatctacggcgtgatcctgaccgccctgttcctgagagtgaagttcagcagaagcgccgacgcccctgcctaccagcagggacagaaccaactgtacaacgagctgaacctgggcagacgggaagagtacgacgtgctggacaagcggagaggcagggaccctgagatgggcggaaagccccagcggagaaagaacccccaggaaggactgtataacgaactccagaaagacaagatggccgaagcctacagcgagatcggcatgaagggcgagcggagaagaggcaagggccacgatggcctgtaccagggcctgagcaccgccaccaaggacacctatgacgccctgcacatgcaggccctgcctccaagaagggccaagcgatctggatctggagcaacaaacttctcactactcaaacaagcaggtgacgtggaggagaatcccgggcctactagtatggactggatttggcgcatccttttccttgtcggcgctgctaccggcgcgcattccttcgaagaagtgcagctggttgaatcaggcggaggactggttcagcctggcggatctctgagactgtcttgtgccgccagcggctacaccttcagcagctactggatgaactgggtccgacaggcccctggcaaaggactggaatgggtcggaatgatcgaccccagcgacagcgagacacactacaaccacatcttcaaggaccgcttcaccatcagcgccgacaccagcaagaataccgcctacctccagatgaactccctgagagccgaggacaccgccgtgtactactgcgccagaaacctgtatctgtggggccagggaaccctggtcacagtgtcatctacgcgtgcctctacaaagggaccctccgtgtttcctctggctcccagcagcaagtctacaagcggaggaacagccgctctgggctgcctggtcaaggattactttcccgagcctgtgaccgtgtcctggaatagcggagcactgacaagcggcgtgcacacctttccagccgtgctgcaaagcagcggcctgtactctctgagcagcgtggtcacagtgcctagctctagcctgggcacccagacctacatctgcaatgtgaaccacaagcctagcaacaccaaggtggacaagagagtggaacccaagagctgtggtaccatcactcaaggtttggcagtgtcaaccatctcatcattctttccacctggctaccaagtgtccttctgcctggtcatggtgctgctgttcgccgtggataccggcctgtacttcagcgtcaagaccaacatccggtccagcaccagagactggaaggaccacaagttcaagtggcggaaggaccctcaggacaag

SEQ ID NO: 36872 - DNA, 2211 bp, synthetic construct
  source 1..2211: mol_type = other DNA
atggccttaccagtgaccgccttgctcctgccgctggccttgctgctccacgccgccaggccggacatccagatgacacagagccctagcagcctgtctgccagcgtgggagacagagtgaccatcacatgcaagagcagccagagcctgctggactccgatggcaagacctacctgaactggtatcagcagaagcccggcaaggcccctaagctgctgatctacctggtgtccaagctggatagcggcgtgcccagcagattttctggcagcggcagcggaaccgacttcaccctgacaatatccagcctccagcctgaggacttcgccacctactactgctggcaaggcacccactttccattcaccttcggccagggcaccaaggtggaaatcaaaagactcgaggacctgaagaacgtgttcccacctgaggtggccgtgttcgagcctagcgaggccgagatcagccacacccagaaagccaccctcgtgtgcctggctaccggcttctaccccgaccatgtggaactgtcttggtgggtcaacggcaaagaggtgcacagcggcgtgtctaccgacccccagccactgaaagaacagcccgccctgaacgacagccggtactgcctgagcagcagactgagagtgtccgccaccttctggcagaacccccggaaccacttcagatgccaggtgcagttctacggcctgagcgagaacgacgagtggacccaggacagagccaagcccgtgacccagatcgtgtctgccgaagcctggggcagagccgattgcggatcccagagcttcggcctgctggaccccaagctgtgctacctgctggatggcatcctgttcatctacggcgtgatcctgaccgccctgttcctgagagtgaagttcagcagaagcgccgacgcccctgcctaccagcagggacagaaccaactgtacaacgagctgaacctgggcagacgggaagagtacgacgtgctggacaagcggagaggcagggaccctgagatgggcggaaagccccagcggagaaagaacccccaggaaggactgtataacgaactccagaaagacaagatggccgaagcctacagcgagatcggcatgaagggcgagcggagaagaggcaagggccacgatggcctgtaccagggcctgagcaccgccaccaaggacacctatgacgccctgcacatgcaggccctgcctccaagaagggccaagcgatctggatctggagcaacaaacttctcactactcaaacaagcaggtgacgtggaggagaatcccgggcctactagtatggactggatttggcgcatccttttccttgtcggcgctgctaccggcgcgcattccttcgaagaagtgcagctggttgaatcaggcggaggactggttcagcctggcggatctctgagactgtcttgtgccgccagcggctacaccttcagcagctactggatgaactgggtccgacaggcccctggcaaaggactggaatgggtcggaatgatcgaccccagcgacagcgagacacactacaaccacatcttcaaggaccgcttcaccatcagcgccgacaccagcaagaataccgcctacctccagatgaactccctgagagccgaggacaccgccgtgtactactgcgccagaaacctgtatctgtggggccagggaaccctggtcacagtgtcatctacgcgtatccagaaccctgatcctgccgtgtaccagctgcgggatagcaagagcagcgacaagagcgtgtgtctgttcaccgacttcgacagccagaccaacgtgtcccagagcaaggactccgacgtgtacatcaccgataagaccgtgctggacatgcggagcatggacttcaagagcaactccgccgtggcctggtccaacaagtccgatttcgcctgcgccaacgccttcaacaacagcattatccccgaggacacattcttcccaagccccgagagcagctgcggtaccatcactcaaggtttggcagtgtcaaccatctcatcattctttccacctggctaccaagtgtccttctgcctggtcatggtgctgctgttcgccgtggataccggcctgtacttcagcgtcaagaccaacatccggtccagcaccagagactggaaggaccacaagttcaagtggcggaaggaccctcaggacaag

SEQ ID NO: 36873 - DNA, 2136 bp, synthetic construct
  source 1..2136: mol_type = other DNA
atggccttaccagtgaccgccttgctcctgccgctggccttgctgctccacgccgccaggccggacatccagatgacacagagccctagcagcctgtctgccagcgtgggagacagagtgaccatcacatgcaagagcagccagagcctgctggactccgatggcaagacctacctgaactggtatcagcagaagcccggcaaggcccctaagctgctgatctacctggtgtccaagctggatagcggcgtgcccagcagattttctggcagcggcagcggaaccgacttcaccctgacaatatccagcctccagcctgaggacttcgccacctactactgctggcaaggcacccactttccattcaccttcggccagggcaccaaggtggaaatcaaaagactcgaggacctgaagaacgtgttcccacctgaggtggccgtgttcgagcctagcgaggccgagatcagccacacccagaaagccaccctcgtgtgcctggctaccggcttctaccccgaccatgtggaactgtcttggtgggtcaacggcaaagaggtgcacagcggcgtgtctaccgacccccagccactgaaagaacagcccgccctgaacgacagccggtactgcctgagcagcagactgagagtgtccgccaccttctggcagaacccccggaaccacttcagatgccaggtgcagttctacggcctgagcgagaacgacgagtggacccaggacagagccaagcccgtgacccagatcgtgtctgccgaagcctggggcagagccgattgcggatcccagagcttcggcctgctggaccccaagctgtgctacctgctggatggcatcctgttcatctacggcgtgatcctgaccgccctgttcctgagagtgaagttcagcagaagcgccgacgcccctgcctaccagcagggacagaaccaactgtacaacgagctgaacctgggcagacgggaagagtacgacgtgctggacaagcggagaggcagggaccctgagatgggcggaaagccccagcggagaaagaacccccaggaaggactgtataacgaactccagaaagacaagatggccgaagcctacagcgagatcggcatgaagggcgagcggagaagaggcaagggccacgatggcctgtaccagggcctgagcaccgccaccaaggacacctatgacgccctgcacatgcaggccctgcctccaagaagggccaagcgatctggatctggagcaacaaacttctcactactcaaacaagcaggtgacgtggaggagaatcccgggcctactagtatggactggatttggcgcatccttttccttgtcggcgctgctaccggcgcgcattccttcgaagaagtgcagctggttgaatcaggcggaggactggttcagcctggcggatctctgagactgtcttgtgccgccagcggctacaccttcagcagctactggatgaactgggtccgacaggcccctggcaaaggactggaatgggtcggaatgatcgaccccagcgacagcgagacacactacaaccacatcttcaaggaccgcttcaccatcagcgccgacaccagcaagaataccgcctacctccagatgaactccctgagagccgaggacaccgccgtgtactactgcgccagaaacctgtatctgtggggccagggaaccctggtcacagtgtcatctacgcgtatccagaaccctgatcctgccgtgtaccagctgcgggatagcaagagcagcgacaagagcgtgtgtctgttcaccgacttcgacagccagaccaacgtgtcccagagcaaggactccgacgtgtacatcaccgataagaccgtgctggacatgcggagcatggacttcaagagcaactccgccgtggcctggtccaacaagtccgatttcgcctgcgccaacgccttcaacaacagcattatccccgaggacacattcttcccaagccccgagagcagctgcggtaccatcactcaaggtttggcagtgtcaaccatctcatcattctttccacctggctaccaagtgtccttctgcctggtcatggtgctgctgttcgccgtggataccggcctgtacttcagcgtc

SEQ ID NO: 36874 - DNA, 2139 bp, synthetic construct
  source 1..2139: mol_type = other DNA
atggccttaccagtgaccgccttgctcctgccgctggccttgctgctccacgccgccaggccggacatccagatgacacagagccctagcagcctgtctgccagcgtgggagacagagtgaccatcacatgcaagagcagccagagcctgctggactccgatggcaagacctacctgaactggtatcagcagaagcccggcaaggcccctaagctgctgatctacctggtgtccaagctggatagcggcgtgcccagcagattttctggcagcggcagcggaaccgacttcaccctgacaatatccagcctccagcctgaggacttcgccacctactactgctggcaaggcacccactttccattcaccttcggccagggcaccaaggtggaaatcaaaagactcgaggacctgaagaacgtgttcccacctgaggtggccgtgttcgagcctagcgaggccgagatcagccacacccagaaagccaccctcgtgtgcctggctaccggcttctaccccgaccatgtggaactgtcttggtgggtcaacggcaaagaggtgcacagcggcgtgtctaccgacccccagccactgaaagaacagcccgccctgaacgacagccggtactgcctgagcagcagactgagagtgtccgccaccttctggcagaacccccggaaccacttcagatgccaggtgcagttctacggcctgagcgagaacgacgagtggacccaggacagagccaagcccgtgacccagatcgtgtctgccgaagcctggggcagagccgattgcggatcccagagcttcggcctgctggaccccaagctgtgctacctgctggatggcatcctgttcatctacggcgtgatcctgaccgccctgttcctgagagtgaagttcagcagaagcgccgacgcccctgcctaccagcagggacagaaccaactgtacaacgagctgaacctgggcagacgggaagagtacgacgtgctggacaagcggagaggcagggaccctgagatgggcggaaagccccagcggagaaagaacccccaggaaggactgtataacgaactccagaaagacaagatggccgaagcctacagcgagatcggcatgaagggcgagcggagaagaggcaagggccacgatggcctgtaccagggcctgagcaccgccaccaaggacacctatgacgccctgcacatgcaggccctgcctccaagaagggccaagcgatctggatctggagcaacaaacttctcactactcaaacaagcaggtgacgtggaggagaatcccgggcctactagtatggactggatttggcgcatccttttccttgtcggcgctgctaccggcgcgcattccttcgaagaagtgcagctggttgaatcaggcggaggactggttcagcctggcggatctctgagactgtcttgtgccgccagcggctacaccttcagcagctactggatgaactgggtccgacaggcccctggcaaaggactggaatgggtcggaatgatcgaccccagcgacagcgagacacactacaaccacatcttcaaggaccgcttcaccatcagcgccgacaccagcaagaataccgcctacctccagatgaactccctgagagccgaggacaccgccgtgtactactgcgccagaaacctgtatctgtggggccagggaaccctggtcacagtgtcatctacgcgtatccagaaccctgatcctgccgtgtaccagctgcgggatagcaagagcagcgacaagagcgtgtgtctgttcaccgacttcgacagccagaccaacgtgtcccagagcaaggactccgacgtgtacatcaccgataagaccgtgctggacatgcggagcatggacttcaagagcaactccgccgtggcctggtccaacaagtccgatttcgcctgcgccaacgccttcaacaacagcattatccccgaggacacattcttcccaagccccgagagcagctgcggtaccatcactcaaggtttggcagtgtcaaccatctcatcattctttccacctggctaccaagtgtccttctgcctggtcatggtgctgctgttcgccgtggataccggcctgtacttcagcgtcaag

SEQ ID NO: 36875 - DNA, 2142 bp, synthetic construct
  source 1..2142: mol_type = other DNA
atggccttaccagtgaccgccttgctcctgccgctggccttgctgctccacgccgccaggccggacatccagatgacacagagccctagcagcctgtctgccagcgtgggagacagagtgaccatcacatgcaagagcagccagagcctgctggactccgatggcaagacctacctgaactggtatcagcagaagcccggcaaggcccctaagctgctgatctacctggtgtccaagctggatagcggcgtgcccagcagattttctggcagcggcagcggaaccgacttcaccctgacaatatccagcctccagcctgaggacttcgccacctactactgctggcaaggcacccactttccattcaccttcggccagggcaccaaggtggaaatcaaaagactcgaggacctgaagaacgtgttcccacctgaggtggccgtgttcgagcctagcgaggccgagatcagccacacccagaaagccaccctcgtgtgcctggctaccggcttctaccccgaccatgtggaactgtcttggtgggtcaacggcaaagaggtgcacagcggcgtgtctaccgacccccagccactgaaagaacagcccgccctgaacgacagccggtactgcctgagcagcagactgagagtgtccgccaccttctggcagaacccccggaaccacttcagatgccaggtgcagttctacggcctgagcgagaacgacgagtggacccaggacagagccaagcccgtgacccagatcgtgtctgccgaagcctggggcagagccgattgcggatcccagagcttcggcctgctggaccccaagctgtgctacctgctggatggcatcctgttcatctacggcgtgatcctgaccgccctgttcctgagagtgaagttcagcagaagcgccgacgcccctgcctaccagcagggacagaaccaactgtacaacgagctgaacctgggcagacgggaagagtacgacgtgctggacaagcggagaggcagggaccctgagatgggcggaaagccccagcggagaaagaacccccaggaaggactgtataacgaactccagaaagacaagatggccgaagcctacagcgagatcggcatgaagggcgagcggagaagaggcaagggccacgatggcctgtaccagggcctgagcaccgccaccaaggacacctatgacgccctgcacatgcaggccctgcctccaagaagggccaagcgatctggatctggagcaacaaacttctcactactcaaacaagcaggtgacgtggaggagaatcccgggcctactagtatggactggatttggcgcatccttttccttgtcggcgctgctaccggcgcgcattccttcgaagaagtgcagctggttgaatcaggcggaggactggttcagcctggcggatctctgagactgtcttgtgccgccagcggctacaccttcagcagctactggatgaactgggtccgacaggcccctggcaaaggactggaatgggtcggaatgatcgaccccagcgacagcgagacacactacaaccacatcttcaaggaccgcttcaccatcagcgccgacaccagcaagaataccgcctacctccagatgaactccctgagagccgaggacaccgccgtgtactactgcgccagaaacctgtatctgtggggccagggaaccctggtcacagtgtcatctacgcgtatccagaaccctgatcctgccgtgtaccagctgcgggatagcaagagcagcgacaagagcgtgtgtctgttcaccgacttcgacagccagaccaacgtgtcccagagcaaggactccgacgtgtacatcaccgataagaccgtgctggacatgcggagcatggacttcaagagcaactccgccgtggcctggtccaacaagtccgatttcgcctgcgccaacgccttcaacaacagcattatccccgaggacacattcttcccaagccccgagagcagctgcggtaccatcactcaaggtttggcagtgtcaaccatctcatcattctttccacctggctaccaagtgtccttctgcctggtcatggtgctgctgttcgccgtggataccggcctgtacttcagcgtcaagacc

SEQ ID NO: 36876 - DNA, 1953 bp, synthetic construct
  source 1..1953: mol_type = other DNA
atggccttaccagtgaccgccttgctcctgccgctggccttgctgctccacgccgccaggccggacatccagatgacacagagccctagcagcctgtctgccagcgtgggagacagagtgaccatcacatgcaagagcagccagagcctgctggactccgatggcaagacctacctgaactggtatcagcagaagcccggcaaggcccctaagctgctgatctacctggtgtccaagctggatagcggcgtgcccagcagattttctggcagcggcagcggaaccgacttcaccctgacaatatccagcctccagcctgaggacttcgccacctactactgctggcaaggcacccactttccattcaccttcggccagggcaccaaggtggaaatcaaaagactcgagggacagcctaaggccaatcctaccgtgacactgttccctccaagcagcgaagaactccaggccaacaaggccacacttgtgtgcctgatctccgacttctaccctggggctgtgacagtggcttggaaggccgatggatctcctgtgaaagccggcgtggaaaccaccaagccatccaagcagagcaacaacaaatacgccgccagctcctacctgagcctgacacctgagcagtggaagtcccacagatcctacagctgccaagtgacccacgaaggcagcaccgtggaaaagacagtggcccctacagagtgcagcggatccctgggagagcctcagctgtgctatatcctggacgccatcctgtttctgtacggcatcgtgctgaccctgctgtactgccggctgaagatccaagtgcggaaggccgccatcaccagctacgagaaatccgacggcgtgtacaccggcctgagcaccagaaatcaagagacatacgagacactgaagcacgaaaagcctccacaaagggccaagcgatctggatctggagcaacaaacttctcactactcaaacaagcaggtgacgtggaggagaatcccgggcctactagtatggactggatttggcgcatccttttccttgtcggcgctgctaccggcgcgcattccttcgaagaagtgcagctggttgaatcaggcggaggactggttcagcctggcggatctctgagactgtcttgtgccgccagcggctacaccttcagcagctactggatgaactgggtccgacaggcccctggcaaaggactggaatgggtcggaatgatcgaccccagcgacagcgagacacactacaaccacatcttcaaggaccgcttcaccatcagcgccgacaccagcaagaataccgcctacctccagatgaactccctgagagccgaggacaccgccgtgtactactgcgccagaaacctgtatctgtggggccagggaaccctggtcacagtgtcatctacgcgtgcctctacaaagggaccctccgtgtttcctctggctcccagcagcaagtctacaagcggaggaacagccgctctgggctgcctggtcaaggattactttcccgagcctgtgaccgtgtcctggaatagcggagcactgacaagcggcgtgcacacctttccagccgtgctgcaaagcagcggcctgtactctctgagcagcgtggtcacagtgcctagctctagcctgggcacccagacctacatctgcaatgtgaaccacaagcctagcaacaccaaggtggacaagagagtggaacccaagagctgtggtaccctcggagaaccacagctctgttacattctggatgctatcctgttcctctatgggatcgtcctgacactcctgtattgcagactcaaaattcaagttcgcaaagccgccattacctcttacgagaagagtgatggggtgtacacaggactgtctacccggaatcaagaaacctacgaaaccctcaaacatgagaagccacctcagtaa

SEQ ID NO: 36877 - DNA, 1860 bp, synthetic construct
  source 1..1860: mol_type = other DNA
atggccttaccagtgaccgccttgctcctgccgctggccttgctgctccacgccgccaggccggacatccagatgacacagagccctagcagcctgtctgccagcgtgggagacagagtgaccatcacatgcaagagcagccagagcctgctggactccgatggcaagacctacctgaactggtatcagcagaagcccggcaaggcccctaagctgctgatctacctggtgtccaagctggatagcggcgtgcccagcagattttctggcagcggcagcggaaccgacttcaccctgacaatatccagcctccagcctgaggacttcgccacctactactgctggcaaggcacccactttccattcaccttcggccagggcaccaaggtggaaatcaaaagactcgaggacctgaagaacgtgttcccacctgaggtggccgtgttcgagcctagcgaggccgagatcagccacacccagaaagccaccctcgtgtgcctggctaccggcttctaccccgaccatgtggaactgtcttggtgggtcaacggcaaagaggtgcacagcggcgtgtgtaccgacccccagccactgaaagaacagcccgccctgaacgacagccggtactgcctgagcagcagactgagagtgtccgccaccttctggcagaacccccggaaccacttcagatgccaggtgcagttctacggcctgagcgagaacgacgagtggacccaggacagagccaagcccgtgacccagatcgtgtctgccgaagcctggggcagagccgattgcggctttaccagcgagagctaccagcagggcgtgctgagcgcctactacatgtacttgttgctgctgctgaagtccgtggtgtacttcgccatcatcacatgctgcctgctgcggagaaccgccttctgctgcaacggcgagaagtctagggccaagcgatctggatctggagcaacaaacttctcactactcaaacaagcaggtgacgtggaggagaatcccgggcctactagtatggactggatttggcgcatccttttccttgtcggcgctgctaccggcgcgcattccttcgaagaagtgcagctggttgaatcaggcggaggactggttcagcctggcggatctctgagactgtcttgtgccgccagcggctacaccttcagcagctactggatgaactgggtccgacaggcccctggcaaaggactggaatgggtcggaatgatcgaccccagcgacagcgagacacactacaaccacatcttcaaggaccgcttcaccatcagcgccgacaccagcaagaataccgcctacctccagatgaactccctgagagccgaggacaccgccgtgtactactgcgccagaaacctgtatctgtggggccagggaaccctggtcacagtgtcatctacgcgtatccagaaccctgatcctgccgtgtaccagctgcgggatagcaagagcagcgacaagagcgtgtgtctgttcaccgacttcgacagccagaccaacgtgtcccagagcaaggactccgacgtgtacatcaccgataagtgcgtgctggacatgcggagcatggacttcaagagcaactccgccgtggcctggtccaacaagtccgatttcgcctgcgccaacgccttcaacaacagcattatccccgaggacacattcttcccaagccccgagagcagctgcgacgtgaagctggtggaaaagagcttcgagacagacaccaacctgaacttccagaacctgagcgtgatcggcttcagaatcctgctgctgaaagtggccggctttaacctgctgatgaccctgcggctgtggtccagc

SEQ ID NO: 36878 - DNA, 1881 bp, synthetic construct
  source 1..1881: mol_type = other DNA
atggccttaccagtgaccgccttgctcctgccgctggccttgctgctccacgccgccaggccggacatccagatgacacagagccctagcagcctgtctgccagcgtgggagacagagtgaccatcacatgcaagagcagccagagcctgctggactccgatggcaagacctacctgaactggtatcagcagaagcccggcaaggcccctaagctgctgatctacctggtgtccaagctggatagcggcgtgcccagcagattttctggcagcggcagcggaaccgacttcaccctgacaatatccagcctccagcctgaggacttcgccacctactactgctggcaaggcacccactttccattcaccttcggccagggcaccaaggtggaaatcaaaagactcgaggacaagcagctggacgccgacgtgtcccccaagcctaccatcttcctgccctctatcgccgagacaaagctccagaaggccggcacctacctgtgcctgctggaaaagttcttcccagatgtgattaagatccactggcaggaaaagaagtccaacaccatcctgggcagccaggaaggcaacaccatgaagaccaacgacacctacatgaagttcagctggctgaccgtgcccgagaagtccctggacaaagaacacagatgcatcgtgcggcacgaaaacaacaagaacggcgtggaccaggaaatcatcttcccacccatcaagaccgatgtgattacaatggaccccaaggacaactgctccaaggacgccaacgataccctgctgctccagctgaccaacaccagcgcctactacatgtacgagatcctgctgggcaaggccaccctgtacgccgtgctggtgtctgccctggtgctgatggctatggtcaagcggaaggacagccggggaagggccaagcgatctggatctggagcaacaaacttctcactactcaaacaagcaggtgacgtggaggagaatcccgggcctactagtatggactggatttggcgcatccttttccttgtcggcgctgctaccggcgcgcattccttcgaagaagtgcagctggttgaatcaggcggaggactggttcagcctggcggatctctgagactgtcttgtgccgccagcggctacaccttcagcagctactggatgaactgggtccgacaggcccctggcaaaggactggaatgggtcggaatgatcgaccccagcgacagcgagacacactacaaccacatcttcaaggaccgcttcaccatcagcgccgacaccagcaagaataccgcctacctccagatgaactccctgagagccgaggacaccgccgtgtactactgcgccagaaacctgtatctgtggggccagggaaccctggtcacagtgtcatctacgcgtagccagcctcacaccaagcccagcgtgttcgtgatgaagaacggcaccaacgtggcctgcctcgtgaaagagttctaccccaaggacatcaggatcaacctggtgtccagcaagaagatcaccgagttcgaccccgccatcgtgatctcccccagcggcaagtacaacgccgtgaagctggggaagtatgaggacagcaacagcgtgacctgctccgtgcagcacgacaacaagaccgtgcacagcaccgactttgaagtgaaaaccgactccaccgaccacgtgaagcccaaagagacagagaacaccaagcagcccagcaagagctgccacaagcccaaggccatcgtgcacaccgagaaagtgaacatgatgagcctgaccgtgatcggcttcagaatcctgctgctgaaagtggccggctttaacctgctgatgaccctgcggctgtggtccagctaa

SEQ ID NO: 36879 - DNA, 1881 bp, synthetic construct
  source 1..1881: mol_type = other DNA
atggccttaccagtgaccgccttgctcctgccgctggccttgctgctccacgccgccaggccggacatccagatgacacagagccctagcagcctgtctgccagcgtgggagacagagtgaccatcacatgcaagagcagccagagcctgctggactccgatggcaagacctacctgaactggtatcagcagaagcccggcaaggcccctaagctgctgatctacctggtgtccaagctggatagcggcgtgcccagcagattttctggcagcggcagcggaaccgacttcaccctgacaatatccagcctccagcctgaggacttcgccacctactactgctggcaaggcacccactttccattcaccttcggccagggcaccaaggtggaaatcaaaagactcgaggacaagcagctggacgccgacgtgtcccccaagcctaccatcttcctgccctctatcgccgagacaaagctccagaaggccggcacctacctgtgcctgctggaaaagttcttcccagatgtgattaagatccactggcaggaaaagaagtccaacaccatcctgggcagccaggaaggcaacaccatgaagaccaacgacacctacatgaagttcagctggctgaccgtgcccgagaagtccctggacaaagaacacagatgcatcgtgcggcacgaaaacaacaagaacggcgtggaccaggaaatcatcttcccacccatcaagaccgatgtgattacaatggaccccaaggacaactgctccaaggacgccaacgataccctgctgctccagctgaccaacaccagcgccaccatcctgtacgagatcctgctgggcaaggccaccctgtacgccgtgctggtgtctgccctggtgctgatggctatggtcaagcggaaggacagccggggaagggccaagcgatctggatctggagcaacaaacttctcactactcaaacaagcaggtgacgtggaggagaatcccgggcctactagtatggactggatttggcgcatccttttccttgtcggcgctgctaccggcgcgcattccttcgaagaagtgcagctggttgaatcaggcggaggactggttcagcctggcggatctctgagactgtcttgtgccgccagcggctacaccttcagcagctactggatgaactgggtccgacaggcccctggcaaaggactggaatgggtcggaatgatcgaccccagcgacagcgagacacactacaaccacatcttcaaggaccgcttcaccatcagcgccgacaccagcaagaataccgcctacctccagatgaactccctgagagccgaggacaccgccgtgtactactgcgccagaaacctgtatctgtggggccagggaaccctggtcacagtgtcatctacgcgtagccagcctcacaccaagcccagcgtgttcgtgatgaagaacggcaccaacgtggcctgcctcgtgaaagagttctaccccaaggacatcaggatcaacctggtgtccagcaagaagatcaccgagttcgaccccgccatcgtgatctcccccagcggcaagtacaacgccgtgaagctggggaagtatgaggacagcaacagcgtgacctgctccgtgcagcacgacaacaagaccgtgcacagcaccgactttgaagtgaaaaccgactccaccgaccacgtgaagcccaaagagacagagaacaccaagcagcccagcaagagctgccacaagcccaaggccatcgtgcacaccgagaaagtgaacatgatgagcctgaccgtgatcggcttcagaatcctgctgctgaaagtggccggctttaacctgctgatgaccctgcggctgtggtccagctaa

SEQ ID NO: 36880 - DNA, 1881 bp, synthetic construct
  source 1..1881: mol_type = other DNA
atggccttaccagtgaccgccttgctcctgccgctggccttgctgctccacgccgccaggccggacatccagatgacacagagccctagcagcctgtctgccagcgtgggagacagagtgaccatcacatgcaagagcagccagagcctgctggactccgatggcaagacctacctgaactggtatcagcagaagcccggcaaggcccctaagctgctgatctacctggtgtccaagctggatagcggcgtgcccagcagattttctggcagcggcagcggaaccgacttcaccctgacaatatccagcctccagcctgaggacttcgccacctactactgctggcaaggcacccactttccattcaccttcggccagggcaccaaggtggaaatcaaaagactcgaggacaagcagctggacgccgacgtgtcccccaagcctaccatcttcctgccctctatcgccgagacaaagctccagaaggccggcacctacctgtgcctgctggaaaagttcttcccagatgtgattaagatccactggcaggaaaagaagtccaacaccatcctgggcagccaggaaggcaacaccatgaagaccaacgacacctacatgaagttcagctggctgaccgtgcccgagaagtccctggacaaagaacacagatgcatcgtgcggcacgaaaacaacaagaacggcgtggaccaggaaatcatcttcccacccatcaagaccgatgtgattacaatggaccccaaggacaactgctccaaggacgccaacgataccctgctgctccagctgaccaacaccagcgcctactacatgtacgagatcctgctgggcaaggccaccctgtacgccgtgctggtgtctgccctggtgctgatggctatggtcaagcggaaggacagccggggaagggccaagcgatctggatctggagcaacaaacttctcactactcaaacaagcaggtgacgtggaggagaatcccgggcctactagtatggactggatttggcgcatccttttccttgtcggcgctgctaccggcgcgcattccttcgaagaagtgcagctggttgaatcaggcggaggactggttcagcctggcggatctctgagactgtcttgtgccgccagcggctacaccttcagcagctactggatgaactgggtccgacaggcccctggcaaaggactggaatgggtcggaatgatcgaccccagcgacagcgagacacactacaaccacatcttcaaggaccgcttcaccatcagcgccgacaccagcaagaataccgcctacctccagatgaactccctgagagccgaggacaccgccgtgtactactgcgccagaaacctgtatctgtggggccagggaaccctggtcacagtgtcatctacgcgtagccagcctcacaccaagcccagcgtgttcgtgatgaagaacggcaccaacgtggcctgcctcgtgaaagagttctaccccaaggacatcaggatcaacctggtgtccagcaagaagatcaccgagttcgaccccgccatcgtgatctcccccagcggcaagtacaacgccgtgaagctggggaagtacgaggacagcaacagcgtgacctgctccgtgcagcacgacaacaagaccgtgcacagcaccgactttgaagtgaaaaccgactccaccgaccacgtgaagcccaaagagacagagaacaccaagcagcccagcaagagctgccacaagcccaaggccatcgtgcacaccgagaaagtgaacatgatgagcctgaccgtgctgggcttcagaatcctgctgctgaaagtggccggctttaacctgctgatgaccctgcggctgtggtccagctaa

SEQ ID NO: 36881 - DNA, 1881 bp, synthetic construct
  source 1..1881: mol_type = other DNA
atggccttaccagtgaccgccttgctcctgccgctggccttgctgctccacgccgccaggccggacatccagatgacacagagccctagcagcctgtctgccagcgtgggagacagagtgaccatcacatgcaagagcagccagagcctgctggactccgatggcaagacctacctgaactggtatcagcagaagcccggcaaggcccctaagctgctgatctacctggtgtccaagctggatagcggcgtgcccagcagattttctggcagcggcagcggaaccgacttcaccctgacaatatccagcctccagcctgaggacttcgccacctactactgctggcaaggcacccactttccattcaccttcggccagggcaccaaggtggaaatcaaaagactcgaggacaagcagctggacgccgacgtgtcccccaagcctaccatcttcctgccctctatcgccgagacaaagctccagaaggccggcacctacctgtgcctgctggaaaagttcttcccagatgtgattaagatccactggcaggaaaagaagtccaacaccatcctgggcagccaggaaggcaacaccatgaagaccaacgacacctacatgaagttcagctggctgaccgtgcccgagaagtccctggacaaagaacacagatgcatcgtgcggcacgaaaacaacaagaacggcgtggaccaggaaatcatcttcccacccatcaagaccgatgtgattacaatggaccccaaggacaactgctccaaggacgccaacgataccctgctgctccagctgaccaacaccagcgccaccatcctgtacgagatcctgctgggcaaggccaccctgtacgccgtgctggtgtctgccctggtgctgatggctatggtcaagcggaaggacagccggggaagggccaagcgatctggatctggagcaacaaacttctcactactcaaacaagcaggtgacgtggaggagaatcccgggcctactagtatggactggatttggcgcatccttttccttgtcggcgctgctaccggcgcgcattccttcgaagaagtgcagctggttgaatcaggcggaggactggttcagcctggcggatctctgagactgtcttgtgccgccagcggctacaccttcagcagctactggatgaactgggtccgacaggcccctggcaaaggactggaatgggtcggaatgatcgaccccagcgacagcgagacacactacaaccacatcttcaaggaccgcttcaccatcagcgccgacaccagcaagaataccgcctacctccagatgaactccctgagagccgaggacaccgccgtgtactactgcgccagaaacctgtatctgtggggccagggaaccctggtcacagtgtcatctacgcgtagccagcctcacaccaagcccagcgtgttcgtgatgaagaacggcaccaacgtggcctgcctcgtgaaagagttctaccccaaggacatcaggatcaacctggtgtccagcaagaagatcaccgagttcgaccccgccatcgtgatctcccccagcggcaagtacaacgccgtgaagctggggaagtacgaggacagcaacagcgtgacctgctccgtgcagcacgacaacaagaccgtgcacagcaccgactttgaagtgaaaaccgactccaccgaccacgtgaagcccaaagagacagagaacaccaagcagcccagcaagagctgccacaagcccaaggccatcgtgcacaccgagaaagtgaacatgatgagcctgaccgtgctgggcttcagaatcctgctgctgaaagtggccggctttaacctgctgatgaccctgcggctgtggtccagctaa

SEQ ID NO: 36882 - DNA, 1863 bp, synthetic construct
  source 1..1863: mol_type = other DNA
atggccttaccagtgaccgccttgctcctgccgctggccttgctgctccacgccgccaggccggacatccagatgacacagagccctagcagcctgtctgccagcgtgggagacagagtgaccatcacatgcaagagcagccagagcctgctggactccgatggcaagacctacctgaactggtatcagcagaagcccggcaaggcccctaagctgctgatctacctggtgtccaagctggatagcggcgtgcccagcagattttctggcagcggcagcggaaccgacttcaccctgacaatatccagcctccagcctgaggacttcgccacctactactgctggcaaggcacccactttccattcaccttcggccagggcaccaaggtggaaatcaaaagactcgaggacctgaagaacgtgttcccacctgaggtggccgtgttcgagcctagcgaggccgagatcagccacacccagaaagccaccctcgtgtgcctggctaccggcttctaccccgaccatgtggaactgtcttggtgggtcaacggcaaagaggtgcacagcggcgtgtgtaccgacccccagccactgaaagaacagcccgccctgaacgacagccggtactgcctgagcagcagactgagagtgtccgccaccttctggcagaacccccggaaccacttcagatgccaggtgcagttctacggcctgagcgagaacgacgagtggacccaggacagagccaagcccgtgacccagatcgtgtctgccgaagcctggggcagagccgattgcggctttaccagcgagagctaccagcagggcgtgctgagcgccaccatcctgtacttgttgctgctgctgaagtccgtggtgtacttcgccatcatcacatgctgcctgctgcggagaaccgccttctgctgcaacggcgagaagtctagggccaagcgatctggatctggagcaacaaacttctcactactcaaacaagcaggtgacgtggaggagaatcccgggcctactagtatggactggatttggcgcatccttttccttgtcggcgctgctaccggcgcgcattccttcgaagaagtgcagctggttgaatcaggcggaggactggttcagcctggcggatctctgagactgtcttgtgccgccagcggctacaccttcagcagctactggatgaactgggtccgacaggcccctggcaaaggactggaatgggtcggaatgatcgaccccagcgacagcgagacacactacaaccacatcttcaaggaccgcttcaccatcagcgccgacaccagcaagaataccgcctacctccagatgaactccctgagagccgaggacaccgccgtgtactactgcgccagaaacctgtatctgtggggccagggaaccctggtcacagtgtcatctacgcgtatccagaaccctgatcctgccgtgtaccagctgcgggatagcaagagcagcgacaagagcgtgtgtctgttcaccgacttcgacagccagaccaacgtgtcccagagcaaggactccgacgtgtacatcaccgataagtgcgtgctggacatgcggagcatggacttcaagagcaactccgccgtggcctggtccaacaagtccgatttcgcctgcgccaacgccttcaacaacagcattatccccgaggacacattcttcccaagccccgagagcagctgcgacgtgaagctggtggaaaagagcttcgagacagacaccaacctgaacttccagaacctgagcgtgatcggcctgcggatgctgttcgccaaaaccgtggccgtgaacttcctgctgaccgccaagctgttcttcctctaa

SEQ ID NO: 36883 - DNA, 1950 bp, synthetic construct
  source 1..1950: mol_type = other DNA
atggccttaccagtgaccgccttgctcctgccgctggccttgctgctccacgccgccaggccggacatccagatgacacagagccctagcagcctgtctgccagcgtgggagacagagtgaccatcacatgcaagagcagccagagcctgctggactccgatggcaagacctacctgaactggtatcagcagaagcccggcaaggcccctaagctgctgatctacctggtgtccaagctggatagcggcgtgcccagcagattttctggcagcggcagcggaaccgacttcaccctgacaatatccagcctccagcctgaggacttcgccacctactactgctggcaaggcacccactttccattcaccttcggccagggcaccaaggtggaaatcaaaagactcgaggacctgaagaacgtgttcccacctgaggtggccgtgttcgagcctagcgaggccgagatcagccacacccagaaagccaccctcgtgtgcctggctaccggcttctaccccgaccatgtggaactgtcttggtgggtcaacggcaaagaggtgcacagcggcgtgtctaccgacccccagccactgaaagaacagcccgccctgaacgacagccggtactgcctgagcagcagactgagagtgtccgccaccttctggcagaacccccggaaccacttcagatgccaggtgcagttctacggcctgagcgagaacgacgagtggacccaggacagagccaagcccgtgacccagatcgtgtctgccgaagcctggggcagagccgattgcggatcctccaaggacgccaacgataccctgctgctccagctgaccaacaccagcgcctactacatgtacttgttgctgctgctgaagtccgtggtgtacttcgccatcatcacatgctgcctgctgcggagaaccgccttctgctgcaacggcgagaagtctagggccaagcgatctggatctggagcaacaaacttctcactactcaaacaagcaggtgacgtggaggagaatcccgggcctactagtatggactggatttggcgcatccttttccttgtcggcgctgctaccggcgcgcattccttcgaagaagtgcagctggttgaatcaggcggaggactggttcagcctggcggatctctgagactgtcttgtgccgccagcggctacaccttcagcagctactggatgaactgggtccgacaggcccctggcaaaggactggaatgggtcggaatgatcgaccccagcgacagcgagacacactacaaccacatcttcaaggaccgcttcaccatcagcgccgacaccagcaagaataccgcctacctccagatgaactccctgagagccgaggacaccgccgtgtactactgcgccagaaacctgtatctgtggggccagggaaccctggtcacagtgtcatctacgcgtatccagaaccctgatcctgccgtgtaccagctgcgggatagcaagagcagcgacaagagcgtgtgtctgttcaccgacttcgacagccagaccaacgtgtcccagagcaaggactccgacgtgtacatcaccgataagaccgtgctggacatgcggagcatggacttcaagagcaactccgccgtggcctggtccaacaagtccgatttcgcctgcgccaacgccttcaacaacagcattatccccgaggacacattcttcccaagccccgagagcagctgcggtaccgaagtgaaaaccgactccaccgaccacgtgaagcccaaagagacagagaacaccaagcagcccagcaagagctgccacaagcccaaggccatcgtgcacaccgagaaagtgaacatgatgagcctgaccgtgctgggcctgcggatgctgttcgccaaaaccgtggccgtgaacttcctgctgaccgccaagctgttcttcctctaa

SEQ ID NO: 36884 - DNA, 1860 bp, synthetic construct
  source 1..1860: mol_type = other DNA
atggccttaccagtgaccgccttgctcctgccgctggccttgctgctccacgccgccaggccggacatccagatgacacagagccctagcagcctgtctgccagcgtgggagacagagtgaccatcacatgcaagagcagccagagcctgctggactccgatggcaagacctacctgaactggtatcagcagaagcccggcaaggcccctaagctgctgatctacctggtgtccaagctggatagcggcgtgcccagcagattttctggcagcggcagcggaaccgacttcaccctgacaatatccagcctccagcctgaggacttcgccacctactactgctggcaaggcacccactttccattcaccttcggccagggcaccaaggtggaaatcaaaagactcgaggacctgaagaacgtgttcccacctgaggtggccgtgttcgagcctagcgaggccgagatcagccacacccagaaagccaccctcgtgtgcctggctaccggcttctaccccgaccatgtggaactgtcttggtgggtcaacggcaaagaggtgcacagcggcgtgtgtaccgacccccagccactgaaagaacagcccgccctgaacgacagccggtactgcctgagcagcagactgagagtgtccgccaccttctggcagaacccccggaaccacttcagatgccaggtgcagttctacggcctgagcgagaacgacgagtggacccaggacagagccaagcccgtgacccagatcgtgtctgccgaagcctggggcagagccgattgcgacgtgaagctggtggaaaagagcttcgagacagacaccaacctgaacttccagaacctgagcgtgatcggcttcagaatcctgctgctgaaagtggccggctttaacctgctgatgaccctgcggctgtggtccagcagggccaagcgatctggatctggagcaacaaacttctcactactcaaacaagcaggtgacgtggaggagaatcccgggcctactagtatggactggatttggcgcatccttttccttgtcggcgctgctaccggcgcgcattccttcgaagaagtgcagctggttgaatcaggcggaggactggttcagcctggcggatctctgagactgtcttgtgccgccagcggctacaccttcagcagctactggatgaactgggtccgacaggcccctggcaaaggactggaatgggtcggaatgatcgaccccagcgacagcgagacacactacaaccacatcttcaaggaccgcttcaccatcagcgccgacaccagcaagaataccgcctacctccagatgaactccctgagagccgaggacaccgccgtgtactactgcgccagaaacctgtatctgtggggccagggaaccctggtcacagtgtcatctacgcgtatccagaaccctgatcctgccgtgtaccagctgcgggatagcaagagcagcgacaagagcgtgtgtctgttcaccgacttcgacagccagaccaacgtgtcccagagcaaggactccgacgtgtacatcaccgataagtgcgtgctggacatgcggagcatggacttcaagagcaactccgccgtggcctggtccaacaagtccgatttcgcctgcgccaacgccttcaacaacagcattatccccgaggacacattcttcccaagccccgagagcagctgcggctttaccagcgagagctaccagcagggcgtgctgagcgccaccatcctgtacgagatcctgctgggcaaggccaccctgtacgccgtgctggtgtctgccctggtgctgatggctatggtcaagcggaaggacagccggggataa

SEQ ID NO: 36885 - DNA, 1860 bp, synthetic construct
  source 1..1860: mol_type = other DNA
atggccttaccagtgaccgccttgctcctgccgctggccttgctgctccacgccgccaggccggacatccagatgacacagagccctagcagcctgtctgccagcgtgggagacagagtgaccatcacatgcaagagcagccagagcctgctggactccgatggcaagacctacctgaactggtatcagcagaagcccggcaaggcccctaagctgctgatctacctggtgtccaagctggatagcggcgtgcccagcagattttctggcagcggcagcggaaccgacttcaccctgacaatatccagcctccagcctgaggacttcgccacctactactgctggcaaggcacccactttccattcaccttcggccagggcaccaaggtggaaatcaaaagactcgaggacctgaagaacgtgttcccacctgaggtggccgtgttcgagcctagcgaggccgagatcagccacacccagaaagccaccctcgtgtgcctggctaccggcttctaccccgaccatgtggaactgtcttggtgggtcaacggcaaagaggtgcacagcggcgtgtgtaccgacccccagccactgaaagaacagcccgccctgaacgacagccggtactgcctgagcagcagactgagagtgtccgccaccttctggcagaacccccggaaccacttcagatgccaggtgcagttctacggcctgagcgagaacgacgagtggacccaggacagagccaagcccgtgacccagatcgtgtctgccgaagcctggggcagagccgattgcggctttaccagcgagagctaccagcagggcgtgctgagcgccaccaacctgagcgtgatcggcttcagaatcctgctgctgaaagtggccggctttaacctgctgatgaccctgcggctgtggtccagcagggccaagcgatctggatctggagcaacaaacttctcactactcaaacaagcaggtgacgtggaggagaatcccgggcctactagtatggactggatttggcgcatccttttccttgtcggcgctgctaccggcgcgcattccttcgaagaagtgcagctggttgaatcaggcggaggactggttcagcctggcggatctctgagactgtcttgtgccgccagcggctacaccttcagcagctactggatgaactgggtccgacaggcccctggcaaaggactggaatgggtcggaatgatcgaccccagcgacagcgagacacactacaaccacatcttcaaggaccgcttcaccatcagcgccgacaccagcaagaataccgcctacctccagatgaactccctgagagccgaggacaccgccgtgtactactgcgccagaaacctgtatctgtggggccagggaaccctggtcacagtgtcatctacgcgtatccagaaccctgatcctgccgtgtaccagctgcgggatagcaagagcagcgacaagagcgtgtgtctgttcaccgacttcgacagccagaccaacgtgtcccagagcaaggactccgacgtgtacatcaccgataagtgcgtgctggacatgcggagcatggacttcaagagcaactccgccgtggcctggtccaacaagtccgatttcgcctgcgccaacgccttcaacaacagcattatccccgaggacacattcttcccaagccccgagagcagctgcgacgtgaagctggtggaaaagagcttcgagacagacaccaacctgaacttccagatcctgtacgagatcctgctgggcaaggccaccctgtacgccgtgctggtgtctgccctggtgctgatggctatggtcaagcggaaggacagccggggataa

SEQ ID NO: 36886 - DNA, 1860 bp, synthetic construct; identical to SEQ ID NO: 36884
  source 1..1860: mol_type = other DNA

SEQ ID NO: 36887 - DNA, 1860 bp, synthetic construct; identical to SEQ ID NO: 36885
  source 1..1860: mol_type = other DNA

SEQ ID NO: 36888 - DNA, 1857 bp, synthetic construct
  source 1..1857: mol_type = other DNA
atggccttaccagtgaccgccttgctcctgccgctggccttgctgctccacgccgccaggccggacatccagatgacacagagccctagcagcctgtctgccagcgtgggagacagagtgaccatcacatgcaagagcagccagagcctgctggactccgatggcaagacctacctgaactggtatcagcagaagcccggcaaggcccctaagctgctgatctacctggtgtccaagctggatagcggcgtgcccagcagattttctggcagcggcagcggaaccgacttcaccctgacaatatccagcctccagcctgaggacttcgccacctactactgctggcaaggcacccactttccattcaccttcggccagggcaccaaggtggaaatcaaaagactcgaggacctgaagaacgtgttcccacctgaggtggccgtgttcgagcctagcgaggccgagatcagccacacccagaaagccaccctcgtgtgcctggctaccggcttctaccccgaccatgtggaactgtcttggtgggtcaacggcaaagaggtgcacagcggcgtgtgtaccgacccccagccactgaaagaacagcccgccctgaacgacagccggtactgcctgagcagcagactgagagtgtccgccaccttctggcagaacccccggaaccacttcagatgccaggtgcagttctacggcctgagcgagaacgacgagtggacccaggacagagccaagcccgtgacccagatcgtgtctgccgaagcctggggcagagccgattgcgacgtgaagctggtggaaaagagcttcgagacagacaccaacctgaacttccagaacctgagcgtgatcggcttcagaatcctgctgctgaaagtggccggctttaacctgctgatgaccctgcggctgtggtccagcagggccaagcgatctggatctggagcaacaaacttctcactactcaaacaagcaggtgacgtggaggagaatcccgggcctactagtatggactggatttggcgcatccttttccttgtcggcgctgctaccggcgcgcattccttcgaagaagtgcagctggttgaatcaggcggaggactggttcagcctggcggatctctgagactgtcttgtgccgccagcggctacaccttcagcagctactggatgaactgggtccgacaggcccctggcaaaggactggaatgggtcggaatgatcgaccccagcgacagcgagacacactacaaccacatcttcaaggaccgcttcaccatcagcgccgacaccagcaagaataccgcctacctccagatgaactccctgagagccgaggacaccgccgtgtactactgcgccagaaacctgtatctgtggggccagggaaccctggtcacagtgtcatctacgcgtatccagaaccctgatcctgccgtgtaccagctgcgggatagcaagagcagcgacaagagcgtgtgtctgttcaccgacttcgacagccagaccaacgtgtcccagagcaaggactccgacgtgtacatcaccgataagtgcgtgctggacatgcggagcatggacttcaagagcaactccgccgtggcctggtccaacaagtccgatttcgcctgcgccaacgccttcaacaacagcattatccccgaggacacattcttcccaagccccgagagcagctgcggctttaccagcgagagctaccagcagggcgtgctgagcgccaccatcctgtacgagatcctgctgggcaaggccaccctgtacgccgtgctggtgtctgccctggtgctgatggctatggtcaagcggaaggacagccgggga

SEQ ID NO: 36889 - DNA, 1869 bp, synthetic construct
  source 1..1869: mol_type = other DNA
atggccttaccagtgaccgccttgctcctgccgctggccttgctgctccacgccgccaggccggacatccagatgacacagagccctagcagcctgtctgccagcgtgggagacagagtgaccatcacatgcaagagcagccagagcctgctggactccgatggcaagacctacctgaactggtatcagcagaagcccggcaaggcccctaagctgctgatctacctggtgtccaagctggatagcggcgtgcccagcagattttctggcagcggcagcggaaccgacttcaccctgacaatatccagcctccagcctgaggacttcgccacctactactgctggcaaggcacccactttccattcaccttcggccagggcaccaaggtggaaatcaaaagactcgaggccgacgtgtcccccaagcctaccatcttcctgccctctatcgccgagacaaagctccagaaggccggcacctacctgtgcctgctggaaaagttcttcccagatgtgattaagatccactggcaggaaaagaagtccaacaccatcctgggcagccaggaaggcaacaccatgaagaccaacgacacctacatgaagttcagctggctgaccgtgcccgagaagtccctggacaaagaacacagatgcatcgtgcggcacgaaaacaacaagaacggcgtggaccaggaaatcatcttcccacccatcaagaccgatgtgattacaatggaccccaaggacaactgctccaaggacgccaacgataccctgctgctccagctgaccaacaccagcgcctactacatgtacttgttgctgctgctgaagtccgtggtgtacttcgccatcatcacatgctgcctgctgcggagaaccgccttctgctgcaacggcgagaagtctagggccaagcgatctggatctggagcaacaaacttctcactactcaaacaagcaggtgacgtggaggagaatcccgggcctactagtatggactggatttggcgcatccttttccttgtcggcgctgctaccggcgcgcattccttcgaagaagtgcagctggttgaatcaggcggaggactggttcagcctggcggatctctgagactgtcttgtgccgccagcggctacaccttcagcagctactggatgaactgggtccgacaggcccctggcaaaggactggaatgggtcggaatgatcgaccccagcgacagcgagacacactacaaccacatcttcaaggaccgcttcaccatcagcgccgacaccagcaagaataccgcctacctccagatgaactccctgagagccgaggacaccgccgtgtactactgcgccagaaacctgtatctgtggggccagggaaccctggtcacagtgtcatctacgcgtagccagcctcacaccaagcccagcgtgttcgtgatgaagaacggcaccaacgtggcctgcctcgtgaaagagttctaccccaaggacatcaggatcaacctggtgtccagcaagaagatcaccgagttcgaccccgccatcgtgatctcccccagcggcaagtacaacgccgtgaagctggggaagtatgaggacagcaacagcgtgacctgctccgtgcagcacgacaacaagaccgtgcacagcaccgactttgaagtgaaaaccgactccaccgaccacgtgaagcccaaagagacagagaacaccaagcagcccagcaagagctgccacaagcccaaggccatcgtgcacaccgagaaagtgaacatgatgagcctgaccgtgatcggcttcagaatcctgctgctgaaagtggccggctttaacctgctgatgaccctgcggctgtggtccagctaa

SEQ ID NO: 36890 - DNA, 1869 bp, synthetic construct
  source 1..1869: mol_type = other DNA
atggccttaccagtgaccgccttgctcctgccgctggccttgctgctccacgccgccaggccggacatccagatgacacagagccctagcagcctgtctgccagcgtgggagacagagtgaccatcacatgcaagagcagccagagcctgctggactccgatggcaagacctacctgaactggtatcagcagaagcccggcaaggcccctaagctgctgatctacctggtgtccaagctggatagcggcgtgcccagcagattttctggcagcggcagcggaaccgacttcaccctgacaatatccagcctccagcctgaggacttcgccacctactactgctggcaaggcacccactttccattcaccttcggccagggcaccaaggtggaaatcaaaagactcgaggccgacgtgtcccccaagcctaccatcttcctgccctctatcgccgagacaaagctccagaaggccggcacctacctgtgcctgctggaaaagttcttcccagatgtgattaagatccactggcaggaaaagaagtccaacaccatcctgggcagccaggaaggcaacaccatgaagaccaacgacacctacatgaagttcagctggctgaccgtgcccgagaagtccctggacaaagaacacagatgcatcgtgcggcacgaaaacaacaagaacggcgtggaccaggaaatcatcttcccacccatcaagaccgatgtgattacaatggaccccaaggacaactgctccaaggacgccaacgataccctgctgctccagctgaccaacaccagcgcctactacatgtacttgttgctgctgctgaagtccgtggtgtacttcgccatcatcacatgctgcctgctgcggagaaccgccttctgctgcaacggcgagaagtctagggccaagcgatctggatctggagcaacaaacttctcactactcaaacaagcaggtgacgtggaggagaatcccgggcctactagtatggactggatttggcgcatccttttccttgtcggcgctgctaccggcgcgcattccttcgaagaagtgcagctggttgaatcaggcggaggactggttcagcctggcggatctctgagactgtcttgtgccgccagcggctacaccttcagcagctactggatgaactgggtccgacaggcccctggcaaaggactggaatgggtcggaatgatcgaccccagcgacagcgagacacactacaaccacatcttcaaggaccgcttcaccatcagcgccgacaccagcaagaataccgcctacctccagatgaactccctgagagccgaggacaccgccgtgtactactgcgccagaaacctgtatctgtggggccagggaaccctggtcacagtgtcatctacgcgtagccagcctcacaccaagcccagcgtgttcgtgatgaagaacggcaccaacgtggcctgcctcgtgaaagagttctaccccaaggacatcaggatcaacctggtgtccagcaagaagatcaccgagttcgaccccgccatcgtgatctcccccagcggcaagtacaacgccgtgaagctggggaagtacgaggacagcaacagcgtgacctgctccgtgcagcacgacaacaagaccgtgcacagcaccgactttgaagtgaaaaccgactccaccgaccacgtgaagcccaaagagacagagaacaccaagcagcccagcaagagctgccacaagcccaaggccatcgtgcacaccgagaaagtgaacatgatgagcctgaccgtgctgggcttcagaatcctgctgctgaaagtggccggctttaacctgctgatgaccctgcggctgtggtccagctaa

SEQ ID NO: 36891 - DNA, 1857 bp, synthetic construct; identical to SEQ ID NO: 36888
  source 1..1857: mol_type = other DNA

SEQ ID NO: 36892 - DNA, 1869 bp, synthetic construct
  source 1..1869: mol_type = other DNA
atggccttaccagtgaccgccttgctcctgccgctggccttgctgctccacgccgccaggccggacatccagatgacacagagccctagcagcctgtctgccagcgtgggagacagagtgaccatcacatgcaagagcagccagagcctgctggactccgatggcaagacctacctgaactggtatcagcagaagcccggcaaggcccctaagctgctgatctacctggtgtccaagctggatagcggcgtgcccagcagattttctggcagcggcagcggaaccgacttcaccctgacaatatccagcctccagcctgaggacttcgccacctactactgctggcaaggcacccactttccattcaccttcggccagggcaccaaggtggaaatcaaaagactcgagatccagaaccctgatcctgccgtgtaccagctgcgggatagcaagagcagcgacaagagcgtgtgtctgttcaccgacttcgacagccagaccaacgtgtcccagagcaaggactccgacgtgtacatcaccgataagtgcgtgctggacatgcggagcatggacttcaagagcaactccgccgtggcctggtccaacaagtccgatttcgcctgcgccaacgccttcaacaacagcattatccccgaggacacattcttcccaagccccgagagcagctgcggctttaccagcgagagctaccagcagggcgtgctgagcgccaccatcctgtacgagatcctgctgggcaaggccaccctgtacgccgtgctggtgtctgccctggtgctgatggctatggtcaagcggaaggacagccggggacgcgccaagagaagcggatctggcgtgaagcagaccctgaatttcgacctgctgaagctggctggcgacgtggaatccaacccaggccctactagtatggactggatttggcgcatccttttccttgtcggcgctgctaccggcgcgcattccttcgaagaagtgcagctggttgaatcaggcggaggactggttcagcctggcggatctctgagactgtcttgtgccgccagcggctacaccttcagcagctactggatgaactgggtccgacaggcccctggcaaaggactggaatgggtcggaatgatcgaccccagcgacagcgagacacactacaaccacatcttcaaggaccgcttcaccatcagcgccgacaccagcaagaataccgcctacctccagatgaactccctgagagccgaggacaccgccgtgtactactgcgccagaaacctgtatctgtggggccagggaaccctggtcacagtgtcatctacgcgtgaggacctgaagaacgtgttcccacctgaggtggccgtgttcgagcctagcgaggccgagatcagccacacccagaaagccaccctcgtgtgcctggctaccggcttctaccccgaccatgtggaactgtcttggtgggtcaacggcaaagaggtgcacagcggcgtgtgtaccgacccccagccactgaaagaacagcccgccctgaacgacagccggtactgcctgagcagcagactgagagtgtccgccaccttctggcagaacccccggaaccacttcagatgccaggtgcagttctacggcctgagcgagaacgacgagtggacccaggacagagccaagcccgtgacccagatcgtgtctgccgaagcctggggcagagccgattgcgacgtgaagctggtggaaaagagcttcgagacagacaccaacctgaacttccagaacctgagcgtgatcggcttcagaatcctgctgctgaaagtggccggctttaacctgctgatgaccctgcggctgtggtccagc

SEQ ID NO: 36893 - DNA, 2262 bp, synthetic construct
  source 1..2262: mol_type = other DNA
atggccttaccagtgaccgccttgctcctgccgctggccttgctgctccacgccgccaggccggaagtgcagctggttgaatctggcggaggactggttcagcctggcggatctctgagactgtcttgtgccgccagcggcttcagcttcagcgacttttggatgagctgggtccgacaggcccctggcaaaggacttgaatgggtcgccacaatcagccaggccggcagcgagaaggactacgtggactctgtgaagggcagattcaccatcagccgggacaacgccaagaagtccctgtacctccagatgaacagcctgagagccgaggacaccgccgtgtactattgtgcctctggcgtgtacagcttcgactacagaggccagggcaccctggtcacagtctcttctggtaccggcggaggcggatctggcggcggaggtagcggtggcggaggatctgaattcgacatccagatgacacagagccctagcagcctgtctgccagcgtgggagacagagtgaccatcacatgcaagagcagccagagcctgctggactccgatggcaagacctacctgaactggtatcagcagaagcccggcaaggcccctaagctgctgatctacctggtgtccaagctggatagcggcgtgcccagcagattttctggcagcggcagcggaaccgacttcaccctgacaatatccagcctccagcctgaggacttcgccacctactactgctggcaaggcacccactttccattcaccttcggccagggcaccaaggtggaaatcaaaagactcgaggacctgaagaacgtgttcccacctgaggtggccgtgttcgagcctagcgaggccgagatcagccacacccagaaagccaccctcgtgtgcctggctaccggcttctaccccgaccatgtggaactgtcttggtgggtcaacggcaaagaggtgcacagcggcgtgtgtaccgacccccagccactgaaagaacagcccgccctgaacgacagccggtactgcctgagcagcagactgagagtgtccgccaccttctggcagaacccccggaaccacttcagatgccaggtgcagttctacggcctgagcgagaacgacgagtggacccaggacagagccaagcccgtgacccagatcgtgtctgccgaagcctggggcagagccgattgcgacgtgaagctggtggaaaagagcttcgagacagacaccaacctgaacttccagaacctgagcgtgatcggcttcagaatcctgctgctgaaagtggccggctttaacctgctgatgaccctgcggctgtggtccagcagggccaagcgatctggatctggagcaacaaacttctcactactcaaacaagcaggtgacgtggaggagaatcccgggcctactagtatggactggatttggcgcatccttttccttgtcggcgctgctaccggcgcgcattccttcgaagaagtgcagctggttgaatcaggcggaggactggttcagcctggcggatctctgagactgtcttgtgccgccagcggctacaccttcagcagctactggatgaactgggtccgacaggcccctggcaaaggactggaatgggtcggaatgatcgaccccagcgacagcgagacacactacaaccacatcttcaaggaccgcttcaccatcagcgccgacaccagcaagaataccgcctacctccagatgaactccctgagagccgaggacaccgccgtgtactactgcgccagaaacctgtatctgtggggccagggaaccctggtcacagtgtcatctacgcgtatccagaaccctgatcctgccgtgtaccagctgcgggatagcaagagcagcgacaagagcgtgtgtctgttcaccgacttcgacagccagaccaacgtgtcccagagcaaggactccgacgtgtacatcaccgataagtgcgtgctggacatgcggagcatggacttcaagagcaactccgccgtggcctggtccaacaagtccgatttcgcctgcgccaacgccttcaacaacagcattatccccgaggacacattcttcccaagccccgagagcagctgcggctttaccagcgagagctaccagcagggcgtgctgagcgccaccatcctgtacgagatcctgctgggcaaggccaccctgtacgccgtgctggtgtctgccctggtgctgatggctatggtcaagcggaaggacagccgggga

SEQ ID NO: 36894 - DNA, 2274 bp, synthetic construct
  source 1..2274: mol_type = other DNA
atggccttaccagtgaccgccttgctcctgccgctggccttgctgctccacgccgccaggccggaagtgcagctggttgaatctggcggaggactggttcagcctggcggatctctgagactgtcttgtgccgccagcggcttcagcttcagcgacttttggatgagctgggtccgacaggcccctggcaaaggacttgaatgggtcgccacaatcagccaggccggcagcgagaaggactacgtggactctgtgaagggcagattcaccatcagccgggacaacgccaagaagtccctgtacctccagatgaacagcctgagagccgaggacaccgccgtgtactattgtgcctctggcgtgtacagcttcgactacagaggccagggcaccctggtcacagtctcttctggtaccggcggaggcggatctggcggcggaggtagcggtggcggaggatctgaattcgacatccagatgacacagagccctagcagcctgtctgccagcgtgggagacagagtgaccatcacatgcaagagcagccagagcctgctggactccgatggcaagacctacctgaactggtatcagcagaagcccggcaaggcccctaagctgctgatctacctggtgtccaagctggatagcggcgtgcccagcagattttctggcagcggcagcggaaccgacttcaccctgacaatatccagcctccagcctgaggacttcgccacctactactgctggcaaggcacccactttccattcaccttcggccagggcaccaaggtggaaatcaaaagactcgagatccagaaccctgatcctgccgtgtaccagctgcgggatagcaagagcagcgacaagagcgtgtgtctgttcaccgacttcgacagccagaccaacgtgtcccagagcaaggactccgacgtgtacatcaccgataagtgcgtgctggacatgcggagcatggacttcaagagcaactccgccgtggcctggtccaacaagtccgatttcgcctgcgccaacgccttcaacaacagcattatccccgaggacacattcttcccaagccccgagagcagctgcggctttaccagcgagagctaccagcagggcgtgctgagcgccaccatcctgtacgagatcctgctgggcaaggccaccctgtacgccgtgctggtgtctgccctggtgctgatggctatggtcaagcggaaggacagccggggacgcgccaagagaagcggatctggcgtgaagcagaccctgaatttcgacctgctgaagctggctggcgacgtggaatccaacccaggccctactagtatggactggatttggcgcatccttttccttgtcggcgctgctaccggcgcgcattccttcgaagaagtgcagctggttgaatcaggcggaggactggttcagcctggcggatctctgagactgtcttgtgccgccagcggctacaccttcagcagctactggatgaactgggtccgacaggcccctggcaaaggactggaatgggtcggaatgatcgaccccagcgacagcgagacacactacaaccacatcttcaaggaccgcttcaccatcagcgccgacaccagcaagaataccgcctacctccagatgaactccctgagagccgaggacaccgccgtgtactactgcgccagaaacctgtatctgtggggccagggaaccctggtcacagtgtcatctacgcgtgaggacctgaagaacgtgttcccacctgaggtggccgtgttcgagcctagcgaggccgagatcagccacacccagaaagccaccctcgtgtgcctggctaccggcttctaccccgaccatgtggaactgtcttggtgggtcaacggcaaagaggtgcacagcggcgtgtgtaccgacccccagccactgaaagaacagcccgccctgaacgacagccggtactgcctgagcagcagactgagagtgtccgccaccttctggcagaacccccggaaccacttcagatgccaggtgcagttctacggcctgagcgagaacgacgagtggacccaggacagagccaagcccgtgacccagatcgtgtctgccgaagcctggggcagagccgattgcgacgtgaagctggtggaaaagagcttcgagacagacaccaacctgaacttccagaacctgagcgtgatcggcttcagaatcctgctgctgaaagtggccggctttaacctgctgatgaccctgcggctgtggtccagc

SEQ ID NO: 36895 - DNA, 2673 bp, synthetic construct
  source 1..2673: mol_type = other DNA
atggccttaccagtgaccgccttgctcctgccgctggccttgctgctccacgccgccaggccggaagtgcagctggttgaatctggcggaggactggttcagcctggcggatctctgagactgtcttgtgccgccagcggcttcagcttcagcgacttttggatgagctgggtccgacaggcccctggcaaaggacttgaatgggtcgccacaatcagccaggccggcagcgagaaggactacgtggactctgtgaagggcagattcaccatcagccgggacaacgccaagaagtccctgtacctccagatgaacagcctgagagccgaggacaccgccgtgtactattgtgcctctggcgtgtacagcttcgactacagaggccagggcaccctggtcacagtctcttctggtaccggcggaggcggatctggcggcggaggtagcggtggcggaggatctgaattcgacatccagatgacacagagccctagcagcctgtctgccagcgtgggagacagagtgaccatcacatgcaagagcagccagagcctgctggactccgatggcaagacctacctgaactggtatcagcagaagcccggcaaggcccctaagctgctgatctacctggtgtccaagctggatagcggcgtgcccagcagattttctggcagcggcagcggaaccgacttcaccctgacaatatccagcctccagcctgaggacttcgccacctactactgctggcaaggcacccactttccattcaccttcggccagggcaccaaggtggaaatcaaaagactcgaggacctgaagaacgtgttcccacctgaggtggccgtgttcgagcctagcgaggccgagatcagccacacccagaaagccaccctcgtgtgcctggctaccggcttctaccccgaccatgtggaactgtcttggtgggtcaacggcaaagaggtgcacagcggcgtgtgtaccgacccccagccactgaaagaacagcccgccctgaacgacagccggtactgcctgagcagcagactgagagtgtccgccaccttctggcagaacccccggaaccacttcagatgccaggtgcagttctacggcctgagcgagaacgacgagtggacccaggacagagccaagcccgtgacccagatcgtgtctgccgaagcctggggcagagccgattgcgacgtgaagctggtggaaaagagcttcgagacagacaccaacctgaacttccagaacctgagcgtgatcggcttcagaatcctgctgctgaaagtggccggctttaacctgctgatgaccctgcggctgtggtccagcagggccaagcgatctggatctggagcaacaaacttctcactactcaaacaagcaggtgacgtggaggagaatcccgggcctactagtatggactggatttggcgcatccttttccttgtcggcgctgctaccggcgcgcattccgggccccagctccagctgcaagagtctggacctggcctggtcaagcctagcgagacactgagcctgacctgtaccgtgtccggcgatagcatcagcagcggcgattactactggggctggatcagacagcctcctggcaaaggactggaatggatcggccacatctactacagcggcgtgacctactacaaccccagcctgaagtccagagtgaccatcagcgtggacaccagccggaaccagttctccctgaagctgtctagcgtgacagccgccgataccgccgtgtactactgcaccagagaggacagcagcaactggcggagtagaggccagggaacactggtcacagttagctctggatccggcggaggcggaagtggaggcggaggatctggcggcggaggctctttcgaagaagtgcagctggttgaatcaggcggaggactggttcagcctggcggatctctgagactgtcttgtgccgccagcggctacaccttcagcagctactggatgaactgggtccgacaggcccctggcaaaggactggaatgggtcggaatgatcgaccccagcgacagcgagacacactacaaccacatcttcaaggaccgcttcaccatcagcgccgacaccagcaagaataccgcctacctccagatgaactccctgagagccgaggacaccgccgtgtactactgcgccagaaacctgtatctgtggggccagggaaccctggtcacagtgtcatctacgcgtatccagaaccctgatcctgccgtgtaccagctgcgggatagcaagagcagcgacaagagcgtgtgtctgttcaccgacttcgacagccagaccaacgtgtcccagagcaaggactccgacgtgtacatcaccgataagtgcgtgctggacatgcggagcatggacttcaagagcaactccgccgtggcctggtccaacaagtccgatttcgcctgcgccaacgccttcaacaacagcattatccccgaggacacattcttcccaagccccgagagcagctgcggctttaccagcgagagctaccagcagggcgtgctgagcgccaccatcctgtacgagatcctgctgggcaaggccaccctgtacgccgtgctggtgtctgccctggtgctgatggctatggtcaagcggaaggacagccgggga

SEQ ID NO: 36896 - DNA, 2685 bp, synthetic construct
  source 1..2685: mol_type = other DNA
atggccttaccagtgaccgccttgctcctgccgctggccttgctgctccacgccgccaggccggaagtgcagctggttgaatctggcggaggactggttcagcctggcggatctctgagactgtcttgtgccgccagcggcttcagcttcagcgacttttggatgagctgggtccgacaggcccctggcaaaggacttgaatgggtcgccacaatcagccaggccggcagcgagaaggactacgtggactctgtgaagggcagattcaccatcagccgggacaacgccaagaagtccctgtacctccagatgaacagcctgagagccgaggacaccgccgtgtactattgtgcctctggcgtgtacagcttcgactacagaggccagggcaccctggtcacagtctcttctggtaccggcggaggcggatctggcggcggaggtagcggtggcggaggatctgaattcgacatccagatgacacagagccctagcagcctgtctgccagcgtgggagacagagtgaccatcacatgcaagagcagccagagcctgctggactccgatggcaagacctacctgaactggtatcagcagaagcccggcaaggcccctaagctgctgatctacctggtgtccaagctggatagcggcgtgcccagcagattttctggcagcggcagcggaaccgacttcaccctgacaatatccagcctccagcctgaggacttcgccacctactactgctggcaaggcacccactttccattcaccttcggccagggcaccaaggtggaaatcaaaagactcgagatccagaaccctgatcctgccgtgtaccagctgcgggatagcaagagcagcgacaagagcgtgtgtctgttcaccgacttcgacagccagaccaacgtgtcccagagcaaggactccgacgtgtacatcaccgataagtgcgtgctggacatgcggagcatggacttcaagagcaactccgccgtggcctggtccaacaagtccgatttcgcctgcgccaacgccttcaacaacagcattatccccgaggacacattcttcccaagccccgagagcagctgcggctttaccagcgagagctaccagcagggcgtgctgagcgccaccatcctgtacgagatcctgctgggcaaggccaccctgtacgccgtgctggtgtctgccctggtgctgatggctatggtcaagcggaaggacagccggggacgcgccaagagaagcggatctggcgtgaagcagaccctgaatttcgacctgctgaagctggctggcgacgtggaatccaacccaggccctactagtatggactggatttggcgcatccttttccttgtcggcgctgctaccggcgcgcattccgggccccagctccagctgcaagagtctggacctggcctggtcaagcctagcgagacactgagcctgacctgtaccgtgtccggcgatagcatcagcagcggcgattactactggggctggatcagacagcctcctggcaaaggactggaatggatcggccacatctactacagcggcgtgacctactacaaccccagcctgaagtccagagtgaccatcagcgtggacaccagccggaaccagttctccctgaagctgtctagcgtgacagccgccgataccgccgtgtactactgcaccagagaggacagcagcaactggcggagtagaggccagggaacactggtcacagttagctctggatccggcggaggcggaagtggaggcggaggatctggcggcggaggctctttcgaagaagtgcagctggttgaatcaggcggaggactggttcagcctggcggatctctgagactgtcttgtgccgccagcggctacaccttcagcagctactggatgaactgggtccgacaggcccctggcaaaggactggaatgggtcggaatgatcgaccccagcgacagcgagacacactacaaccacatcttcaaggaccgcttcaccatcagcgccgacaccagcaagaataccgcctacctccagatgaactccctgagagccgaggacaccgccgtgtactactgcgccagaaacctgtatctgtggggccagggaaccctggtcacagtgtcatctacgcgtgaggacctgaagaacgtgttcccacctgaggtggccgtgttcgagcctagcgaggccgagatcagccacacccagaaagccaccctcgtgtgcctggctaccggcttctaccccgaccatgtggaactgtcttggtgggtcaacggcaaagaggtgcacagcggcgtgtgtaccgacccccagccactgaaagaacagcccgccctgaacgacagccggtactgcctgagcagcagactgagagtgtccgccaccttctggcagaacccccggaaccacttcagatgccaggtgcagttctacggcctgagcgagaacgacgagtggacccaggacagagccaagcccgtgacccagatcgtgtctgccgaagcctggggcagagccgattgcgacgtgaagctggtggaaaagagcttcgagacagacaccaacctgaacttccagaacctgagcgtgatcggcttcagaatcctgctgctgaaagtggccggctttaacctgctgatgaccctgcggctgtggtccagc

SEQ ID NO: 36897 - DNA, 2067 bp, synthetic construct
  source 1..2067: mol_type = other DNA
atggccttaccagtgaccgccttgctcctgccgctggccttgctgctccacgccgccaggccggacatccagatgacacagagccctagcagcctgtctgccagcgtgggagacagagtgaccatcacatgcaagagcagccagagcctgctggactccgatggcaagacctacctgaactggtatcagcagaagcccggcaaggcccctaagctgctgatctacctggtgtccaagctggatagcggcgtgcccagcagattttctggcagcggcagcggaaccgacttcaccctgacaatatccagcctccagcctgaggacttcgccacctactactgctggcaaggcacccactttccattcaccttcggccagggcaccaaggtggaaatcaaaagactcgaggacctgaagaacgtgttcccacctgaggtggccgtgttcgagcctagcgaggccgagatcagccacacccagaaagccaccctcgtgtgcctggctaccggcttctaccccgaccatgtggaactgtcttggtgggtcaacggcaaagaggtgcacagcggcgtgtgtaccgacccccagccactgaaagaacagcccgccctgaacgacagccggtactgcctgagcagcagactgagagtgtccgccaccttctggcagaacccccggaaccacttcagatgccaggtgcagttctacggcctgagcgagaacgacgagtggacccaggacagagccaagcccgtgacccagatcgtgtctgccgaagcctggggcagagccgattgcgacgtgaagctggtggaaaagagcttcgagacagacaccaacctgaacttccagaacctgagcgtgatcggcttcagaatcctgctgctgaaagtggccggctttaacctgctgatgaccctgcggctgtggtccagcagggccaagcgatctggatctggagcaacaaacttctcactactcaaacaagcaggtgacgtggaggagaatcccgggcctactagtatggactggatttggcgcatccttttccttgtcggcgctgctaccggcgcccattccgggcccatggaccccgacctggaaatcagagccgccttcctgcggcagagaaacacagccctgagaacagaggtggccgagctggaacaagaggtgcagcggctggaaaacgaggtgtcccagtacgagacaagatacggccctctcggaggcggaaaaggatccggcggcggaggatctggcggaggcggatctgggggcggaggctctttcgaagaagtgcagctggttgaatcaggcggaggactggttcagcctggcggatctctgagactgtcttgtgccgccagcggctacaccttcagcagctactggatgaactgggtccgacaggcccctggcaaaggactggaatgggtcggaatgatcgaccccagcgacagcgagacacactacaaccacatcttcaaggaccgcttcaccatcagcgccgacaccagcaagaataccgcctacctccagatgaactccctgagagccgaggacaccgccgtgtactactgcgccagaaacctgtatctgtggggccagggaaccctggtcacagtgtcatctacgcgtatccagaaccctgatcctgccgtgtaccagctgcgggatagcaagagcagcgacaagagcgtgtgtctgttcaccgacttcgacagccagaccaacgtgtcccagagcaaggactccgacgtgtacatcaccgataagtgcgtgctggacatgcggagcatggacttcaagagcaactccgccgtggcctggtccaacaagtccgatttcgcctgcgccaacgccttcaacaacagcattatccccgaggacacattcttcccaagccccgagagcagctgcggctttaccagcgagagctaccagcagggcgtgctgagcgccaccatcctgtacgagatcctgctgggcaaggccaccctgtacgccgtgctggtgtctgccctggtgctgatggctatggtcaagcggaaggacagccgggga

SEQ ID NO: 36898 - DNA, 2079 bp, synthetic construct
  source 1..2079: mol_type = other DNA
atggccttaccagtgaccgccttgctcctgccgctggccttgctgctccacgccgccaggccggacatccagatgacacagagccctagcagcctgtctgccagcgtgggagacagagtgaccatcacatgcaagagcagccagagcctgctggactccgatggcaagacctacctgaactggtatcagcagaagcccggcaaggcccctaagctgctgatctacctggtgtccaagctggatagcggcgtgcccagcagattttctggcagcggcagcggaaccgacttcaccctgacaatatccagcctccagcctgaggacttcgccacctactactgctggcaaggcacccactttccattcaccttcggccagggcaccaaggtggaaatcaaaagactcgagatccagaaccctgatcctgccgtgtaccagctgcgggatagcaagagcagcgacaagagcgtgtgtctgttcaccgacttcgacagccagaccaacgtgtcccagagcaaggactccgacgtgtacatcaccgataagtgcgtgctggacatgcggagcatggacttcaagagcaactccgccgtggcctggtccaacaagtccgatttcgcctgcgccaacgccttcaacaacagcattatccccgaggacacattcttcccaagccccgagagcagctgcggctttaccagcgagagctaccagcagggcgtgctgagcgccaccatcctgtacgagatcctgctgggcaaggccaccctgtacgccgtgctggtgtctgccctggtgctgatggctatggtcaagcggaaggacagccggggacgcgccaagagaagcggatctggcgtgaagcagaccctgaatttcgacctgctgaagctggctggcgacgtggaatccaacccaggccctactagtatggactggatttggcgcatccttttccttgtcggcgctgctaccggcgcccattccgggcccatggaccccgacctggaaatcagagccgccttcctgcggcagagaaacacagccctgagaacagaggtggccgagctggaacaagaggtgcagcggctggaaaacgaggtgtcccagtacgagacaagatacggccctctcggaggcggaaaaggatccggcggcggaggatctggcggaggcggatctgggggcggaggctctttcgaagaagtgcagctggttgaatcaggcggaggactggttcagcctggcggatctctgagactgtcttgtgccgccagcggctacaccttcagcagctactggatgaactgggtccgacaggcccctggcaaaggactggaatgggtcggaatgatcgaccccagcgacagcgagacacactacaaccacatcttcaaggaccgcttcaccatcagcgccgacaccagcaagaataccgcctacctccagatgaactccctgagagccgaggacaccgccgtgtactactgcgccagaaacctgtatctgtggggccagggaaccctggtcacagtgtcatctacgcgtgaggacctgaagaacgtgttcccacctgaggtggccgtgttcgagcctagcgaggccgagatcagccacacccagaaagccaccctcgtgtgcctggctaccggcttctaccccgaccatgtggaactgtcttggtgggtcaacggcaaagaggtgcacagcggcgtgtgtaccgacccccagccactgaaagaacagcccgccctgaacgacagccggtactgcctgagcagcagactgagagtgtccgccaccttctggcagaacccccggaaccacttcagatgccaggtgcagttctacggcctgagcgagaacgacgagtggacccaggacagagccaagcccgtgacccagatcgtgtctgccgaagcctggggcagagccgattgcgacgtgaagctggtggaaaagagcttcgagacagacaccaacctgaacttccagaacctgagcgtgatcggcttcagaatcctgctgctgaaagtggccggctttaacctgctgatgaccctgcggctgtggtccagc

SEQ ID NO: 36899 - DNA, 1998 bp, synthetic construct
  source 1..1998: mol_type = other DNA
atggccttaccagtgaccgccttgctcctgccgctggccttgctgctccacgccgccaggccggacatccagatgacacagagccctagcagcctgtctgccagcgtgggagacagagtgaccatcacatgcaagagcagccagagcctgctggactccgatggcaagacctacctgaactggtatcagcagaagcccggcaaggcccctaagctgctgatctacctggtgtccaagctggatagcggcgtgcccagcagattttctggcagcggcagcggaaccgacttcaccctgacaatatccagcctccagcctgaggacttcgccacctactactgctggcaaggcacccactttccattcaccttcggccagggcaccaaggtggaaatcaaaagactcgaggacctgaagaacgtgttcccacctgaggtggccgtgttcgagcctagcgaggccgagatcagccacacccagaaagccaccctcgtgtgcctggctaccggcttctaccccgaccatgtggaactgtcttggtgggtcaacggcaaagaggtgcacagcggcgtgtgtaccgacccccagccactgaaagaacagcccgccctgaacgacagccggtactgcctgagcagcagactgagagtgtccgccaccttctggcagaacccccggaaccacttcagatgccaggtgcagttctacggcctgagcgagaacgacgagtggacccaggacagagccaagcccgtgacccagatcgtgtctgccgaagcctggggcagagccgattgcgacgtgaagctggtggaaaagagcttcgagacagacaccaacctgaacttccagaacctgagcgtgatcggcttcagaatcctgctgctgaaagtggccggctttaacctgctgatgaccctgcggctgtggtccagcagggccaagcgatctggatctggagcaacaaacttctcactactcaaacaagcaggtgacgtggaggagaatcccgggcctactagtatggactggatttggcgcatccttttccttgtcggcgctgctaccggcgcccattccgggcccgaagttgctgccctcgagaaggaggtagcagctttggaaaaagaagtcgcagcccttgagaaagaagttgcggctctggagaagggatccggcggcggaggatctggcggaggcggatctgggggcggaggctctttcgaagaagtgcagctggttgaatcaggcggaggactggttcagcctggcggatctctgagactgtcttgtgccgccagcggctacaccttcagcagctactggatgaactgggtccgacaggcccctggcaaaggactggaatgggtcggaatgatcgaccccagcgacagcgagacacactacaaccacatcttcaaggaccgcttcaccatcagcgccgacaccagcaagaataccgcctacctccagatgaactccctgagagccgaggacaccgccgtgtactactgcgccagaaacctgtatctgtggggccagggaaccctggtcacagtgtcatctacgcgtatccagaaccctgatcctgccgtgtaccagctgcgggatagcaagagcagcgacaagagcgtgtgtctgttcaccgacttcgacagccagaccaacgtgtcccagagcaaggactccgacgtgtacatcaccgataagtgcgtgctggacatgcggagcatggacttcaagagcaactccgccgtggcctggtccaacaagtccgatttcgcctgcgccaacgccttcaacaacagcattatccccgaggacacattcttcccaagccccgagagcagctgcggctttaccagcgagagctaccagcagggcgtgctgagcgccaccatcctgtacgagatcctgctgggcaaggccaccctgtacgccgtgctggtgtctgccctggtgctgatggctatggtcaagcggaaggacagccgggga

SEQ ID NO: 36900 - DNA, 2010 bp, synthetic construct
  source 1..2010: mol_type = other DNA
atggccttaccagtgaccgccttgctcctgccgctggccttgctgctccacgccgccaggccggacatccagatgacacagagccctagcagcctgtctgccagcgtgggagacagagtgaccatcacatgcaagagcagccagagcctgctggactccgatggcaagacctacctgaactggtatcagcagaagcccggcaaggcccctaagctgctgatctacctggtgtccaagctggatagcggcgtgcccagcagattttctggcagcggcagcggaaccgacttcaccctgacaatatccagcctccagcctgaggacttcgccacctactactgctggcaaggcacccactttccattcaccttcggccagggcaccaaggtggaaatcaaaagactcgagatccagaaccctgatcctgccgtgtaccagctgcgggatagcaagagcagcgacaagagcgtgtgtctgttcaccgacttcgacagccagaccaacgtgtcccagagcaaggactccgacgtgtacatcaccgataagtgcgtgctggacatgcggagcatggacttcaagagcaactccgccgtggcctggtccaacaagtccgatttcgcctgcgccaacgccttcaacaacagcattatccccgaggacacattcttcccaagccccgagagcagctgcggctttaccagcgagagctaccagcagggcgtgctgagcgccaccatcctgtacgagatcctgctgggcaaggccaccctgtacgccgtgctggtgtctgccctggtgctgatggctatggtcaagcggaaggacagccggggacgcgccaagagaagcggatctggcgtgaagcagaccctgaatttcgacctgctgaagctggctggcgacgtggaatccaacccaggccctactagtatggactggatttggcgcatccttttccttgtcggcgctgctaccggcgcccattccgggcccgaagttgctgccctcgagaaggaggtagcagctttggaaaaagaagtcgcagcccttgagaaagaagttgcggctctggagaagggatccggcggcggaggatctggcggaggcggatctgggggcggaggctctttcgaagaagtgcagctggttgaatcaggcggaggactggttcagcctggcggatctctgagactgtcttgtgccgccagcggctacaccttcagcagctactggatgaactgggtccgacaggcccctggcaaaggactggaatgggtcggaatgatcgaccccagcgacagcgagacacactacaaccacatcttcaaggaccgcttcaccatcagcgccgacaccagcaagaataccgcctacctccagatgaactccctgagagccgaggacaccgccgtgtactactgcgccagaaacctgtatctgtggggccagggaaccctggtcacagtgtcatctacgcgtgaggacctgaagaacgtgttcccacctgaggtggccgtgttcgagcctagcgaggccgagatcagccacacccagaaagccaccctcgtgtgcctggctaccggcttctaccccgaccatgtggaactgtcttggtgggtcaacggcaaagaggtgcacagcggcgtgtgtaccgacccccagccactgaaagaacagcccgccctgaacgacagccggtactgcctgagcagcagactgagagtgtccgccaccttctggcagaacccccggaaccacttcagatgccaggtgcagttctacggcctgagcgagaacgacgagtggacccaggacagagccaagcccgtgacccagatcgtgtctgccgaagcctggggcagagccgattgcgacgtgaagctggtggaaaagagcttcgagacagacaccaacctgaacttccagaacctgagcgtgatcggcttcagaatcctgctgctgaaagtggccggctttaacctgctgatgaccctgcggctgtggtccagc

SEQ ID NO: 36901 - DNA, 2268 bp, synthetic construct
  source 1..2268: mol_type = other DNA
atggccttaccagtgaccgccttgctcctgccgctggccttgctgctccacgccgccaggccggacatccagatgacacagagccctagcagcctgtctgccagcgtgggagacagagtgaccatcacatgcaagagcagccagagcctgctggactccgatggcaagacctacctgaactggtatcagcagaagcccggcaaggcccctaagctgctgatctacctggtgtccaagctggatagcggcgtgcccagcagattttctggcagcggcagcggaaccgacttcaccctgacaatatccagcctccagcctgaggacttcgccacctactactgctggcaaggcacccactttccattcaccttcggccagggcaccaaggtggaaatcaaaagactcgaggacctgaagaacgtgttcccacctgaggtggccgtgttcgagcctagcgaggccgagatcagccacacccagaaagccaccctcgtgtgcctggctaccggcttctaccccgaccatgtggaactgtcttggtgggtcaacggcaaagaggtgcacagcggcgtgtgtaccgacccccagccactgaaagaacagcccgccctgaacgacagccggtactgcctgagcagcagactgagagtgtccgccaccttctggcagaacccccggaaccacttcagatgccaggtgcagttctacggcctgagcgagaacgacgagtggacccaggacagagccaagcccgtgacccagatcgtgtctgccgaagcctggggcagagccgattgcgacgtgaagctggtggaaaagagcttcgagacagacaccaacctgaacttccagaacctgagcgtgatcggcttcagaatcctgctgctgaaagtggccggctttaacctgctgatgaccctgcggctgtggtccagcagggccaagcgatctggatctggagcaacaaacttctcactactcaaacaagcaggtgacgtggaggagaatcccgggcctactagtatggactggatttggcgcatccttttccttgtcggcgctgctaccggcgcccattccgggccccaggttcagctgcaagagtctggcggaggacttgctcaagctggcggaagcctgagactgtcttgtgccgcctctggcagaaccttcagcatgggctggtttagacaggcccctggcaaagagagagagttcgtcgccgccatcacatacagcggcggcagcccttactacgcctcttctgtcagaggccggttcaccatcagccgggacaacgccaagaacaccgtgtacctccagatgaacagcctgaagccagaggacaccgccgtgtactactgtgccgccaatccaacctacggcagcgactggaatgccgagaattggggccagggcacccaagtgacagtgtctagtggatccggcggcggaggatctggcggaggcggatctgggggcggaggctctttcgaagaagtgcagctggttgaatcaggcggaggactggttcagcctggcggatctctgagactgtcttgtgccgccagcggctacaccttcagcagctactggatgaactgggtccgacaggcccctggcaaaggactggaatgggtcggaatgatcgaccccagcgacagcgagacacactacaaccacatcttcaaggaccgcttcaccatcagcgccgacaccagcaagaataccgcctacctccagatgaactccctgagagccgaggacaccgccgtgtactactgcgccagaaacctgtatctgtggggccagggaaccctggtcacagtgtcatctacgcgtatccagaaccctgatcctgccgtgtaccagctgcgggatagcaagagcagcgacaagagcgtgtgtctgttcaccgacttcgacagccagaccaacgtgtcccagagcaaggactccgacgtgtacatcaccgataagtgcgtgctggacatgcggagcatggacttcaagagcaactccgccgtggcctggtccaacaagtccgatttcgcctgcgccaacgccttcaacaacagcattatccccgaggacacattcttcccaagccccgagagcagctgcggctttaccagcgagagctaccagcagggcgtgctgagcgccaccatcctgtacgagatcctgctgggcaaggccaccctgtacgccgtgctggtgtctgccctggtgctgatggctatggtcaagcggaaggacagccgggga

SEQ ID NO: 36902 - DNA, 2280 bp, synthetic construct
  source 1..2280: mol_type = other DNA
atggccttaccagtgaccgccttgctcctgccgctggccttgctgctccacgccgccaggccggacatccagatgacacagagccctagcagcctgtctgccagcgtgggagacagagtgaccatcacatgcaagagcagccagagcctgctggactccgatggcaagacctacctgaactggtatcagcagaagcccggcaaggcccctaagctgctgatctacctggtgtccaagctggatagcggcgtgcccagcagattttctggcagcggcagcggaaccgacttcaccctgacaatatccagcctccagcctgaggacttcgccacctactactgctggcaaggcacccactttccattcaccttcggccagggcaccaaggtggaaatcaaaagactcgagatccagaaccctgatcctgccgtgtaccagctgcgggatagcaagagcagcgacaagagcgtgtgtctgttcaccgacttcgacagccagaccaacgtgtcccagagcaaggactccgacgtgtacatcaccgataagtgcgtgctggacatgcggagcatggacttcaagagcaactccgccgtggcctggtccaacaagtccgatttcgcctgcgccaacgccttcaacaacagcattatccccgaggacacattcttcccaagccccgagagcagctgcggctttaccagcgagagctaccagcagggcgtgctgagcgccaccatcctgtacgagatcctgctgggcaaggccaccctgtacgccgtgctggtgtctgccctggtgctgatggctatggtcaagcggaaggacagccggggacgcgccaagagaagcggatctggcgtgaagcagaccctgaatttcgacctgctgaagctggctggcgacgtggaatccaacccaggccctactagtatggactggatttggcgcatccttttccttgtcggcgctgctaccggcgcccattccgggccccaggttcagctgcaagagtctggcggaggacttgctcaagctggcggaagcctgagactgtcttgtgccgcctctggcagaaccttcagcatgggctggtttagacaggcccctggcaaagagagagagttcgtcgccgccatcacatacagcggcggcagcccttactacgcctcttctgtcagaggccggttcaccatcagccgggacaacgccaagaacaccgtgtacctccagatgaacagcctgaagccagaggacaccgccgtgtactactgtgccgccaatccaacctacggcagcgactggaatgccgagaattggggccagggcacccaagtgacagtgtctagtggatccggcggcggaggatctggcggaggcggatctgggggcggaggctctttcgaagaagtgcagctggttgaatcaggcggaggactggttcagcctggcggatctctgagactgtcttgtgccgccagcggctacaccttcagcagctactggatgaactgggtccgacaggcccctggcaaaggactggaatgggtcggaatgatcgaccccagcgacagcgagacacactacaaccacatcttcaaggaccgcttcaccatcagcgccgacaccagcaagaataccgcctacctccagatgaactccctgagagccgaggacaccgccgtgtactactgcgccagaaacctgtatctgtggggccagggaaccctggtcacagtgtcatctacgcgtgaggacctgaagaacgtgttcccacctgaggtggccgtgttcgagcctagcgaggccgagatcagccacacccagaaagccaccctcgtgtgcctggctaccggcttctaccccgaccatgtggaactgtcttggtgggtcaacggcaaagaggtgcacagcggcgtgtgtaccgacccccagccactgaaagaacagcccgccctgaacgacagccggtactgcctgagcagcagactgagagtgtccgccaccttctggcagaacccccggaaccacttcagatgccaggtgcagttctacggcctgagcgagaacgacgagtggacccaggacagagccaagcccgtgacccagatcgtgtctgccgaagcctggggcagagccgattgcgacgtgaagctggtggaaaagagcttcgagacagacaccaacctgaacttccagaacctgagcgtgatcggcttcagaatcctgctgctgaaagtggccggctttaacctgctgatgaccctgcggctgtggtccagc

SEQ ID NO: 36903 - DNA, 2286 bp, synthetic construct
  source 1..2286: mol_type = other DNA
atggccttaccagtgaccgccttgctcctgccgctggccttgctgctccacgccgccaggccggaagtgcaactggtggaatctggaggctctctggtgcagccagggggaagcctgagactgtcttgtgccgcttccggcttcaccttcgacgactacgccatgagctgggtgcgccaggtgccaggcaaaggcctggaatgggtgtccagcatcaactggagcggcacccacaccgattacgccgactccgtgaaaggcagattcacaatcagcagaaacaacgccaacaataccctgtacctgcagatgaactccctgaagtctgaggatacagcagtgtattattgcgccaagaactggcgggacgccggcaccacttggtttgagaaaagcggctctgccggacagggaacccaagtgacagtgtcctccggtaccggcggaggcggatctggcggcggaggtagcggtggcggaggatctgaattcgacatccagatgacacagagccctagcagcctgtctgccagcgtgggagacagagtgaccatcacatgcaagagcagccagagcctgctggactccgatggcaagacctacctgaactggtatcagcagaagcccggcaaggcccctaagctgctgatctacctggtgtccaagctggatagcggcgtgcccagcagattttctggcagcggcagcggaaccgacttcaccctgacaatatccagcctccagcctgaggacttcgccacctactactgctggcaaggcacccactttccattcaccttcggccagggcaccaaggtggaaatcaaaagactcgaggacctgaagaacgtgttcccacctgaggtggccgtgttcgagcctagcgaggccgagatcagccacacccagaaagccaccctcgtgtgcctggctaccggcttctaccccgaccatgtggaactgtcttggtgggtcaacggcaaagaggtgcacagcggcgtgtgtaccgacccccagccactgaaagaacagcccgccctgaacgacagccggtactgcctgagcagcagactgagagtgtccgccaccttctggcagaacccccggaaccacttcagatgccaggtgcagttctacggcctgagcgagaacgacgagtggacccaggacagagccaagcccgtgacccagatcgtgtctgccgaagcctggggcagagccgattgcgacgtgaagctggtggaaaagagcttcgagacagacaccaacctgaacttccagaacctgagcgtgatcggcttcagaatcctgctgctgaaagtggccggctttaacctgctgatgaccctgcggctgtggtccagcagggccaagcgatctggatctggagcaacaaacttctcactactcaaacaagcaggtgacgtggaggagaatcccgggcctactagtatggactggatttggcgcatccttttccttgtcggcgctgctaccggcgcgcattccttcgaagaagtgcagctggttgaatcaggcggaggactggttcagcctggcggatctctgagactgtcttgtgccgccagcggctacaccttcagcagctactggatgaactgggtccgacaggcccctggcaaaggactggaatgggtcggaatgatcgaccccagcgacagcgagacacactacaaccacatcttcaaggaccgcttcaccatcagcgccgacaccagcaagaataccgcctacctccagatgaactccctgagagccgaggacaccgccgtgtactactgcgccagaaacctgtatctgtggggccagggaaccctggtcacagtgtcatctacgcgtatccagaaccctgatcctgccgtgtaccagctgcgggatagcaagagcagcgacaagagcgtgtgtctgttcaccgacttcgacagccagaccaacgtgtcccagagcaaggactccgacgtgtacatcaccgataagtgcgtgctggacatgcggagcatggacttcaagagcaactccgccgtggcctggtccaacaagtccgatttcgcctgcgccaacgccttcaacaacagcattatccccgaggacacattcttcccaagccccgagagcagctgcggctttaccagcgagagctaccagcagggcgtgctgagcgccaccatcctgtacgagatcctgctgggcaaggccaccctgtacgccgtgctggtgtctgccctggtgctgatggctatggtcaagcggaaggacagccgggga

SEQ ID NO: 36904 - DNA, 2298 bp, synthetic construct
  source 1..2298: mol_type = other DNA
atggccttaccagtgaccgccttgctcctgccgctggccttgctgctccacgccgccaggccggaagtgcaactggtggaatctggaggctctctggtgcagccagggggaagcctgagactgtcttgtgccgcttccggcttcaccttcgacgactacgccatgagctgggtgcgccaggtgccaggcaaaggcctggaatgggtgtccagcatcaactggagcggcacccacaccgattacgccgactccgtgaaaggcagattcacaatcagcagaaacaacgccaacaataccctgtacctgcagatgaactccctgaagtctgaggatacagcagtgtattattgcgccaagaactggcgggacgccggcaccacttggtttgagaaaagcggctctgccggacagggaacccaagtgacagtgtcctccggtaccggcggaggcggatctggcggcggaggtagcggtggcggaggatctgaattcgacatccagatgacacagagccctagcagcctgtctgccagcgtgggagacagagtgaccatcacatgcaagagcagccagagcctgctggactccgatggcaagacctacctgaactggtatcagcagaagcccggcaaggcccctaagctgctgatctacctggtgtccaagctggatagcggcgtgcccagcagattttctggcagcggcagcggaaccgacttcaccctgacaatatccagcctccagcctgaggacttcgccacctactactgctggcaaggcacccactttccattcaccttcggccagggcaccaaggtggaaatcaaaagactcgagatccagaaccctgatcctgccgtgtaccagctgcgggatagcaagagcagcgacaagagcgtgtgtctgttcaccgacttcgacagccagaccaacgtgtcccagagcaaggactccgacgtgtacatcaccgataagtgcgtgctggacatgcggagcatggacttcaagagcaactccgccgtggcctggtccaacaagtccgatttcgcctgcgccaacgccttcaacaacagcattatccccgaggacacattcttcccaagccccgagagcagctgcggctttaccagcgagagctaccagcagggcgtgctgagcgccaccatcctgtacgagatcctgctgggcaaggccaccctgtacgccgtgctggtgtctgccctggtgctgatggctatggtcaagcggaaggacagccggggacgcgccaagagaagcggatctggcgtgaagcagaccctgaatttcgacctgctgaagctggctggcgacgtggaatccaacccaggccctactagtatggactggatttggcgcatccttttccttgtcggcgctgctaccggcgcgcattccttcgaagaagtgcagctggttgaatcaggcggaggactggttcagcctggcggatctctgagactgtcttgtgccgccagcggctacaccttcagcagctactggatgaactgggtccgacaggcccctggcaaaggactggaatgggtcggaatgatcgaccccagcgacagcgagacacactacaaccacatcttcaaggaccgcttcaccatcagcgccgacaccagcaagaataccgcctacctccagatgaactccctgagagccgaggacaccgccgtgtactactgcgccagaaacctgtatctgtggggccagggaaccctggtcacagtgtcatctacgcgtgaggacctgaagaacgtgttcccacctgaggtggccgtgttcgagcctagcgaggccgagatcagccacacccagaaagccaccctcgtgtgcctggctaccggcttctaccccgaccatgtggaactgtcttggtgggtcaacggcaaagaggtgcacagcggcgtgtgtaccgacccccagccactgaaagaacagcccgccctgaacgacagccggtactgcctgagcagcagactgagagtgtccgccaccttctggcagaacccccggaaccacttcagatgccaggtgcagttctacggcctgagcgagaacgacgagtggacccaggacagagccaagcccgtgacccagatcgtgtctgccgaagcctggggcagagccgattgcgacgtgaagctggtggaaaagagcttcgagacagacaccaacctgaacttccagaacctgagcgtgatcggcttcagaatcctgctgctgaaagtggccggctttaacctgctgatgaccctgcggctgtggtccagc

SEQ ID NO: 36905 - DNA, 2280 bp, synthetic construct
  source 1..2280: mol_type = other DNA
atggccttaccagtgaccgccttgctcctgccgctggccttgctgctccacgccgccaggccggaagttcagctgcttgagtctggcggaggactggttcaacctggcggaagcctgagactgtcttgtgccgccagcggcttcatcttcagcagctacgccatgagctgggtccgacaggctcctggaaagggccaagaatgggtttccggcgttagcggcacaggcgtgaacacctactacgccgatagcgtgaagggcagattcaccatcagccgggacaacagcaagaacaccctgtacctccagatgaacagcctgagagccgaggacaccgccgtgtactattgtgcctctggcaaaggctgggacagcggctcttggtacgaggactatagaggccagggcaccctggtcacagtttcttcaggtaccggcggaggcggatctggcggcggaggtagcggtggcggaggatctgaattcgacatccagatgacacagagccctagcagcctgtctgccagcgtgggagacagagtgaccatcacatgcaagagcagccagagcctgctggactccgatggcaagacctacctgaactggtatcagcagaagcccggcaaggcccctaagctgctgatctacctggtgtccaagctggatagcggcgtgcccagcagattttctggcagcggcagcggaaccgacttcaccctgacaatatccagcctccagcctgaggacttcgccacctactactgctggcaaggcacccactttccattcaccttcggccagggcaccaaggtggaaatcaaaagactcgaggacctgaagaacgtgttcccacctgaggtggccgtgttcgagcctagcgaggccgagatcagccacacccagaaagccaccctcgtgtgcctggctaccggcttctaccccgaccatgtggaactgtcttggtgggtcaacggcaaagaggtgcacagcggcgtgtgtaccgacccccagccactgaaagaacagcccgccctgaacgacagccggtactgcctgagcagcagactgagagtgtccgccaccttctggcagaacccccggaaccacttcagatgccaggtgcagttctacggcctgagcgagaacgacgagtggacccaggacagagccaagcccgtgacccagatcgtgtctgccgaagcctggggcagagccgattgcgacgtgaagctggtggaaaagagcttcgagacagacaccaacctgaacttccagaacctgagcgtgatcggcttcagaatcctgctgctgaaagtggccggctttaacctgctgatgaccctgcggctgtggtccagcagggccaagcgatctggatctggagcaacaaacttctcactactcaaacaagcaggtgacgtggaggagaatcccgggcctactagtatggactggatttggcgcatccttttccttgtcggcgctgctaccggcgcgcattccttcgaagaagtgcagctggttgaatcaggcggaggactggttcagcctggcggatctctgagactgtcttgtgccgccagcggctacaccttcagcagctactggatgaactgggtccgacaggcccctggcaaaggactggaatgggtcggaatgatcgaccccagcgacagcgagacacactacaaccacatcttcaaggaccgcttcaccatcagcgccgacaccagcaagaataccgcctacctccagatgaactccctgagagccgaggacaccgccgtgtactactgcgccagaaacctgtatctgtggggccagggaaccctggtcacagtgtcatctacgcgtatccagaaccctgatcctgccgtgtaccagctgcgggatagcaagagcagcgacaagagcgtgtgtctgttcaccgacttcgacagccagaccaacgtgtcccagagcaaggactccgacgtgtacatcaccgataagtgcgtgctggacatgcggagcatggacttcaagagcaactccgccgtggcctggtccaacaagtccgatttcgcctgcgccaacgccttcaacaacagcattatccccgaggacacattcttcccaagccccgagagcagctgcggctttaccagcgagagctaccagcagggcgtgctgagcgccaccatcctgtacgagatcctgctgggcaaggccaccctgtacgccgtgctggtgtctgccctggtgctgatggctatggtcaagcggaaggacagccgggga

SEQ ID NO: 36906 - DNA, 2292 bp, synthetic construct
  source 1..2292: mol_type = other DNA
atggccttaccagtgaccgccttgctcctgccgctggccttgctgctccacgccgccaggccggaagttcagctgcttgagtctggcggaggactggttcaacctggcggaagcctgagactgtcttgtgccgccagcggcttcatcttcagcagctacgccatgagctgggtccgacaggctcctggaaagggccaagaatgggtttccggcgttagcggcacaggcgtgaacacctactacgccgatagcgtgaagggcagattcaccatcagccgggacaacagcaagaacaccctgtacctccagatgaacagcctgagagccgaggacaccgccgtgtactattgtgcctctggcaaaggctgggacagcggctcttggtacgaggactatagaggccagggcaccctggtcacagtttcttcaggtaccggcggaggcggatctggcggcggaggtagcggtggcggaggatctgaattcgacatccagatgacacagagccctagcagcctgtctgccagcgtgggagacagagtgaccatcacatgcaagagcagccagagcctgctggactccgatggcaagacctacctgaactggtatcagcagaagcccggcaaggcccctaagctgctgatctacctggtgtccaagctggatagcggcgtgcccagcagattttctggcagcggcagcggaaccgacttcaccctgacaatatccagcctccagcctgaggacttcgccacctactactgctggcaaggcacccactttccattcaccttcggccagggcaccaaggtggaaatcaaaagactcgagatccagaaccctgatcctgccgtgtaccagctgcgggatagcaagagcagcgacaagagcgtgtgtctgttcaccgacttcgacagccagaccaacgtgtcccagagcaaggactccgacgtgtacatcaccgataagtgcgtgctggacatgcggagcatggacttcaagagcaactccgccgtggcctggtccaacaagtccgatttcgcctgcgccaacgccttcaacaacagcattatccccgaggacacattcttcccaagccccgagagcagctgcggctttaccagcgagagctaccagcagggcgtgctgagcgccaccatcctgtacgagatcctgctgggcaaggccaccctgtacgccgtgctggtgtctgccctggtgctgatggctatggtcaagcggaaggacagccggggacgcgccaagagaagcggatctggcgtgaagcagaccctgaatttcgacctgctgaagctggctggcgacgtggaatccaacccaggccctactagtatggactggatttggcgcatccttttccttgtcggcgctgctaccggcgcgcattccttcgaagaagtgcagctggttgaatcaggcggaggactggttcagcctggcggatctctgagactgtcttgtgccgccagcggctacaccttcagcagctactggatgaactgggtccgacaggcccctggcaaaggactggaatgggtcggaatgatcgaccccagcgacagcgagacacactacaaccacatcttcaaggaccgcttcaccatcagcgccgacaccagcaagaataccgcctacctccagatgaactccctgagagccgaggacaccgccgtgtactactgcgccagaaacctgtatctgtggggccagggaaccctggtcacagtgtcatctacgcgtgaggacctgaagaacgtgttcccacctgaggtggccgtgttcgagcctagcgaggccgagatcagccacacccagaaagccaccctcgtgtgcctggctaccggcttctaccccgaccatgtggaactgtcttggtgggtcaacggcaaagaggtgcacagcggcgtgtgtaccgacccccagccactgaaagaacagcccgccctgaacgacagccggtactgcctgagcagcagactgagagtgtccgccaccttctggcagaacccccggaaccacttcagatgccaggtgcagttctacggcctgagcgagaacgacgagtggacccaggacagagccaagcccgtgacccagatcgtgtctgccgaagcctggggcagagccgattgcgacgtgaagctggtggaaaagagcttcgagacagacaccaacctgaacttccagaacctgagcgtgatcggcttcagaatcctgctgctgaaagtggccggctttaacctgctgatgaccctgcggctgtggtccagc

SEQ ID NO: 36907 - DNA, 2184 bp, synthetic construct
  source 1..2184: mol_type = other DNA
atggccttaccagtgaccgccttgctcctgccgctggccttgctgctccacgccgccaggccgatgctgcccgctcctaagaatctggtggtgtccagaatcaccgaggacagcgccagactgtcttggacagctcctgatgccgccttcgacagcttccccatccggtacatcgagacactgatctggggcgaagccatctggctggatgtgcctggaagcgagagaagctacgacctgaccggactgaagcctggcacagagtatgccgtggtcatcaccggcgtgaaaggcggcagattctctagccctctggtggcctctttcaccaccggtaccggcggaggcggatctggcggcggaggtagcggtggcggaggatctgaattcgacatccagatgacacagagccctagcagcctgtctgccagcgtgggagacagagtgaccatcacatgcaagagcagccagagcctgctggactccgatggcaagacctacctgaactggtatcagcagaagcccggcaaggcccctaagctgctgatctacctggtgtccaagctggatagcggcgtgcccagcagattttctggcagcggcagcggaaccgacttcaccctgacaatatccagcctccagcctgaggacttcgccacctactactgctggcaaggcacccactttccattcaccttcggccagggcaccaaggtggaaatcaaaagactcgaggacctgaagaacgtgttcccacctgaggtggccgtgttcgagcctagcgaggccgagatcagccacacccagaaagccaccctcgtgtgcctggctaccggcttctaccccgaccatgtggaactgtcttggtgggtcaacggcaaagaggtgcacagcggcgtgtgtaccgacccccagccactgaaagaacagcccgccctgaacgacagccggtactgcctgagcagcagactgagagtgtccgccaccttctggcagaacccccggaaccacttcagatgccaggtgcagttctacggcctgagcgagaacgacgagtggacccaggacagagccaagcccgtgacccagatcgtgtctgccgaagcctggggcagagccgattgcgacgtgaagctggtggaaaagagcttcgagacagacaccaacctgaacttccagaacctgagcgtgatcggcttcagaatcctgctgctgaaagtggccggctttaacctgctgatgaccctgcggctgtggtccagcagggccaagcgatctggatctggagcaacaaacttctcactactcaaacaagcaggtgacgtggaggagaatcccgggcctactagtatggactggatttggcgcatccttttccttgtcggcgctgctaccggcgcgcattccttcgaagaagtgcagctggttgaatcaggcggaggactggttcagcctggcggatctctgagactgtcttgtgccgccagcggctacaccttcagcagctactggatgaactgggtccgacaggcccctggcaaaggactggaatgggtcggaatgatcgaccccagcgacagcgagacacactacaaccacatcttcaaggaccgcttcaccatcagcgccgacaccagcaagaataccgcctacctccagatgaactccctgagagccgaggacaccgccgtgtactactgcgccagaaacctgtatctgtggggccagggaaccctggtcacagtgtcatctacgcgtatccagaaccctgatcctgccgtgtaccagctgcgggatagcaagagcagcgacaagagcgtgtgtctgttcaccgacttcgacagccagaccaacgtgtcccagagcaaggactccgacgtgtacatcaccgataagtgcgtgctggacatgcggagcatggacttcaagagcaactccgccgtggcctggtccaacaagtccgatttcgcctgcgccaacgccttcaacaacagcattatccccgaggacacattcttcccaagccccgagagcagctgcggctttaccagcgagagctaccagcagggcgtgctgagcgccaccatcctgtacgagatcctgctgggcaaggccaccctgtacgccgtgctggtgtctgccctggtgctgatggctatggtcaagcggaaggacagccgggga

SEQ ID NO: 36908 - DNA, 2196 bp, synthetic construct
  source 1..2196: mol_type = other DNA
atggccttaccagtgaccgccttgctcctgccgctggccttgctgctccacgccgccaggccgatgctgcccgctcctaagaatctggtggtgtccagaatcaccgaggacagcgccagactgtcttggacagctcctgatgccgccttcgacagcttccccatccggtacatcgagacactgatctggggcgaagccatctggctggatgtgcctggaagcgagagaagctacgacctgaccggactgaagcctggcacagagtatgccgtggtcatcaccggcgtgaaaggcggcagattctctagccctctggtggcctctttcaccaccggtaccggcggaggcggatctggcggcggaggtagcggtggcggaggatctgaattcgacatccagatgacacagagccctagcagcctgtctgccagcgtgggagacagagtgaccatcacatgcaagagcagccagagcctgctggactccgatggcaagacctacctgaactggtatcagcagaagcccggcaaggcccctaagctgctgatctacctggtgtccaagctggatagcggcgtgcccagcagattttctggcagcggcagcggaaccgacttcaccctgacaatatccagcctccagcctgaggacttcgccacctactactgctggcaaggcacccactttccattcaccttcggccagggcaccaaggtggaaatcaaaagactcgagatccagaaccctgatcctgccgtgtaccagctgcgggatagcaagagcagcgacaagagcgtgtgtctgttcaccgacttcgacagccagaccaacgtgtcccagagcaaggactccgacgtgtacatcaccgataagtgcgtgctggacatgcggagcatggacttcaagagcaactccgccgtggcctggtccaacaagtccgatttcgcctgcgccaacgccttcaacaacagcattatccccgaggacacattcttcccaagccccgagagcagctgcggctttaccagcgagagctaccagcagggcgtgctgagcgccaccatcctgtacgagatcctgctgggcaaggccaccctgtacgccgtgctggtgtctgccctggtgctgatggctatggtcaagcggaaggacagccggggacgcgccaagagaagcggatctggcgtgaagcagaccctgaatttcgacctgctgaagctggctggcgacgtggaatccaacccaggccctactagtatggactggatttggcgcatccttttccttgtcggcgctgctaccggcgcgcattccttcgaagaagtgcagctggttgaatcaggcggaggactggttcagcctggcggatctctgagactgtcttgtgccgccagcggctacaccttcagcagctactggatgaactgggtccgacaggcccctggcaaaggactggaatgggtcggaatgatcgaccccagcgacagcgagacacactacaaccacatcttcaaggaccgcttcaccatcagcgccgacaccagcaagaataccgcctacctccagatgaactccctgagagccgaggacaccgccgtgtactactgcgccagaaacctgtatctgtggggccagggaaccctggtcacagtgtcatctacgcgtgaggacctgaagaacgtgttcccacctgaggtggccgtgttcgagcctagcgaggccgagatcagccacacccagaaagccaccctcgtgtgcctggctaccggcttctaccccgaccatgtggaactgtcttggtgggtcaacggcaaagaggtgcacagcggcgtgtgtaccgacccccagccactgaaagaacagcccgccctgaacgacagccggtactgcctgagcagcagactgagagtgtccgccaccttctggcagaacccccggaaccacttcagatgccaggtgcagttctacggcctgagcgagaacgacgagtggacccaggacagagccaagcccgtgacccagatcgtgtctgccgaagcctggggcagagccgattgcgacgtgaagctggtggaaaagagcttcgagacagacaccaacctgaacttccagaacctgagcgtgatcggcttcagaatcctgctgctgaaagtggccggctttaacctgctgatgaccctgcggctgtggtccagc

SEQ ID NO: 36909 - DNA, 2271 bp, synthetic construct
  source 1..2271: mol_type = other DNA
atggccttaccagtgaccgccttgctcctgccgctggccttgctgctccacgccgccaggccggaggtgcagctggttgaatctggcggaggactggttcagcctggcggatctctgagactgtcttgtgccgccagcggcttcaacatcaaggatacctgtatcggctgggttcgcagagcccctggcaaagaggaagaactggtcgccaaaatctgcaagtacagcggccacaccagatacgccgacagcgtgaagggcagattcaccatcagcgccgacaccagcaagaacaccgcctacctccagatgaacagcctgagagccgaggacaccgccgtgtactattgtgccgctgtgtccgtcagagatgggcactacaattactggggccagggcaccaccgtgaccgtttcttcaggtaccggcggaggcggatctggcggcggaggtagcggtggcggaggatctgaattcgacatccagatgacacagagccctagcagcctgtctgccagcgtgggagacagagtgaccatcacatgcaagagcagccagagcctgctggactccgatggcaagacctacctgaactggtatcagcagaagcccggcaaggcccctaagctgctgatctacctggtgtccaagctggatagcggcgtgcccagcagattttctggcagcggcagcggaaccgacttcaccctgacaatatccagcctccagcctgaggacttcgccacctactactgctggcaaggcacccactttccattcaccttcggccagggcaccaaggtggaaatcaaaagactcgaggacctgaagaacgtgttcccacctgaggtggccgtgttcgagcctagcgaggccgagatcagccacacccagaaagccaccctcgtgtgcctggctaccggcttctaccccgaccatgtggaactgtcttggtgggtcaacggcaaagaggtgcacagcggcgtgtgtaccgacccccagccactgaaagaacagcccgccctgaacgacagccggtactgcctgagcagcagactgagagtgtccgccaccttctggcagaacccccggaaccacttcagatgccaggtgcagttctacggcctgagcgagaacgacgagtggacccaggacagagccaagcccgtgacccagatcgtgtctgccgaagcctggggcagagccgattgcgacgtgaagctggtggaaaagagcttcgagacagacaccaacctgaacttccagaacctgagcgtgatcggcttcagaatcctgctgctgaaagtggccggctttaacctgctgatgaccctgcggctgtggtccagcagggccaagcgatctggatctggagcaacaaacttctcactactcaaacaagcaggtgacgtggaggagaatcccgggcctactagtatggactggatttggcgcatccttttccttgtcggcgctgctaccggcgcgcattccttcgaagaagtgcagctggttgaatcaggcggaggactggttcagcctggcggatctctgagactgtcttgtgccgccagcggctacaccttcagcagctactggatgaactgggtccgacaggcccctggcaaaggactggaatgggtcggaatgatcgaccccagcgacagcgagacacactacaaccacatcttcaaggaccgcttcaccatcagcgccgacaccagcaagaataccgcctacctccagatgaactccctgagagccgaggacaccgccgtgtactactgcgccagaaacctgtatctgtggggccagggaaccctggtcacagtgtcatctacgcgtatccagaaccctgatcctgccgtgtaccagctgcgggatagcaagagcagcgacaagagcgtgtgtctgttcaccgacttcgacagccagaccaacgtgtcccagagcaaggactccgacgtgtacatcaccgataagtgcgtgctggacatgcggagcatggacttcaagagcaactccgccgtggcctggtccaacaagtccgatttcgcctgcgccaacgccttcaacaacagcattatccccgaggacacattcttcccaagccccgagagcagctgcggctttaccagcgagagctaccagcagggcgtgctgagcgccaccatcctgtacgagatcctgctgggcaaggccaccctgtacgccgtgctggtgtctgccctggtgctgatggctatggtcaagcggaaggacagccgggga

SEQ ID NO: 36910 - DNA, 2283 bp, synthetic construct
  source 1..2283: mol_type = other DNA
atggccttaccagtgaccgccttgctcctgccgctggccttgctgctccacgccgccaggccggaggtgcagctggttgaatctggcggaggactggttcagcctggcggatctctgagactgtcttgtgccgccagcggcttcaacatcaaggatacctgtatcggctgggttcgcagagcccctggcaaagaggaagaactggtcgccaaaatctgcaagtacagcggccacaccagatacgccgacagcgtgaagggcagattcaccatcagcgccgacaccagcaagaacaccgcctacctccagatgaacagcctgagagccgaggacaccgccgtgtactattgtgccgctgtgtccgtcagagatgggcactacaattactggggccagggcaccaccgtgaccgtttcttcaggtaccggcggaggcggatctggcggcggaggtagcggtggcggaggatctgaattcgacatccagatgacacagagccctagcagcctgtctgccagcgtgggagacagagtgaccatcacatgcaagagcagccagagcctgctggactccgatggcaagacctacctgaactggtatcagcagaagcccggcaaggcccctaagctgctgatctacctggtgtccaagctggatagcggcgtgcccagcagattttctggcagcggcagcggaaccgacttcaccctgacaatatccagcctccagcctgaggacttcgccacctactactgctggcaaggcacccactttccattcaccttcggccagggcaccaaggtggaaatcaaaagactcgagatccagaaccctgatcctgccgtgtaccagctgcgggatagcaagagcagcgacaagagcgtgtgtctgttcaccgacttcgacagccagaccaacgtgtcccagagcaaggactccgacgtgtacatcaccgataagtgcgtgctggacatgcggagcatggacttcaagagcaactccgccgtggcctggtccaacaagtccgatttcgcctgcgccaacgccttcaacaacagcattatccccgaggacacattcttcccaagccccgagagcagctgcggctttaccagcgagagctaccagcagggcgtgctgagcgccaccatcctgtacgagatcctgctgggcaaggccaccctgtacgccgtgctggtgtctgccctggtgctgatggctatggtcaagcggaaggacagccggggacgcgccaagagaagcggatctggcgtgaagcagaccctgaatttcgacctgctgaagctggctggcgacgtggaatccaacccaggccctactagtatggactggatttggcgcatccttttccttgtcggcgctgctaccggcgcgcattccttcgaagaagtgcagctggttgaatcaggcggaggactggttcagcctggcggatctctgagactgtcttgtgccgccagcggctacaccttcagcagctactggatgaactgggtccgacaggcccctggcaaaggactggaatgggtcggaatgatcgaccccagcgacagcgagacacactacaaccacatcttcaaggaccgcttcaccatcagcgccgacaccagcaagaataccgcctacctccagatgaactccctgagagccgaggacaccgccgtgtactactgcgccagaaacctgtatctgtggggccagggaaccctggtcacagtgtcatctacgcgtgaggacctgaagaacgtgttcccacctgaggtggccgtgttcgagcctagcgaggccgagatcagccacacccagaaagccaccctcgtgtgcctggctaccggcttctaccccgaccatgtggaactgtcttggtgggtcaacggcaaagaggtgcacagcggcgtgtgtaccgacccccagccactgaaagaacagcccgccctgaacgacagccggtactgcctgagcagcagactgagagtgtccgccaccttctggcagaacccccggaaccacttcagatgccaggtgcagttctacggcctgagcgagaacgacgagtggacccaggacagagccaagcccgtgacccagatcgtgtctgccgaagcctggggcagagccgattgcgacgtgaagctggtggaaaagagcttcgagacagacaccaacctgaacttccagaacctgagcgtgatcggcttcagaatcctgctgctgaaagtggccggctttaacctgctgatgaccctgcggctgtggtccagc

SEQ ID NO: 36911 - DNA, 3387 bp, synthetic construct
  source 1..3387: mol_type = other DNA
atggccttaccagtgaccgccttgctcctgccgctggccttgctgctccacgccgccaggccggaagtgcagctggttgaatctggcggaggactggttcaggctggcggatctctgagactgtcttgtgccgccagcggcagaacctttagcatgggctggtttagacaggcccctggcaaagagagagagttcgtcgccgccatcacatactctggcggcagcccttactacgccgactctgtgaagggcagattcaccatcagccgggacaacgccaagaacaccgtgtacctccagatgaacagcctgaagcctgaggacaccgccgtgtactactgcgccgccaatccaacatacggcagcgactggaacgccgagaattggggccagggaacccaagtgacagtgtctagcggtaccggcggaggcggatctggcggcggaggtagcggtggcggaggatctgaattcgacatccagatgacacagagccctagcagcctgtctgccagcgtgggagacagagtgaccatcacatgcaagagcagccagagcctgctggactccgatggcaagacctacctgaactggtatcagcagaagcccggcaaggcccctaagctgctgatctacctggtgtccaagctggatagcggcgtgcccagcagattttctggcagcggcagcggaaccgacttcaccctgacaatatccagcctccagcctgaggacttcgccacctactactgctggcaaggcacccactttccattcaccttcggccagggcaccaaggtggaaatcaaaagactcgaggacctgaagaacgtgttcccacctgaggtggccgtgttcgagcctagcgaggccgagatcagccacacccagaaagccaccctcgtgtgcctggctaccggcttctaccccgaccatgtggaactgtcttggtgggtcaacggcaaagaggtgcacagcggcgtgtgtaccgacccccagccactgaaagaacagcccgccctgaacgacagccggtactgcctgagcagcagactgagagtgtccgccaccttctggcagaacccccggaaccacttcagatgccaggtgcagttctacggcctgagcgagaacgacgagtggacccaggacagagccaagcccgtgacccagatcgtgtctgccgaagcctggggcagagccgattgcgacgtgaagctggtggaaaagagcttcgagacagacaccaacctgaacttccagaacctgagcgtgatcggcttcagaatcctgctgctgaaagtggccggctttaacctgctgatgaccctgcggctgtggtccagcagggccaagcgatctggatctggagcaacaaacttctcactactcaaacaagcaggtgacgtggaggagaatcccgggcctactagtgccaccatggactggatttggcgcatccttttccttgtcggcgctgctaccggcgcccattccgggcccgaagtgcaactggttgaatccggtggcggcctggtgcaagcaggcggatctctcagacttagctgtgccgcctccggcagaaccttcacaatgggatggtttaggcaggctccagggaaagagagagagttcgtcgccgccatctctctgtctcccacactggcctactacgccgactctgtgaaaggccggttcaccatctccagagataatgccaagaacaccgtggtgctgcaaatgaactctctgaaacccgaggatacagccctgtactattgtgccgctgaccggaagtccgtgatgagcatcagacccgattactggggacagggcacacaagtcacagtgtcctctggatccggcggcggaggatctggcggaggcggatctgggggcggaggctctttcgaagaagtgcagctggttgaatcaggcggaggactggttcagcctggcggatctctgagactgtcttgtgccgccagcggctacaccttcagcagctactggatgaactgggtccgacaggcccctggcaaaggactggaatgggtcggaatgatcgaccccagcgacagcgagacacactacaaccacatcttcaaggaccgcttcaccatcagcgccgacaccagcaagaataccgcctacctccagatgaactccctgagagccgaggacaccgccgtgtactactgcgccagaaacctgtatctgtggggccagggaaccctggtcacagtgtcatctacgcgtatccagaaccctgatcctgccgtgtaccagctgcgggatagcaagagcagcgacaagagcgtgtgtctgttcaccgacttcgacagccagaccaacgtgtcccagagcaaggactccgacgtgtacatcaccgataagtgcgtgctggacatgcggagcatggacttcaagagcaactccgccgtggcctggtccaacaagtccgatttcgcctgcgccaacgccttcaacaacagcattatccccgaggacacattcttcccaagccccgagagcagctgcggctttaccagcgagagctaccagcagggcgtgctgagcgccaccatcctgtacgagatcctgctgggcaaggccaccctgtacgccgtgctggtgtctgccctggtgctgatggctatggtcaagcggaaggacagccggggacgcgccaagagaagcggatctggcgtgaagcagaccctgaatttcgacctgctgaagctggctggcgacgtggaatccaacccaggcccttctagaggccatatgaccgagtacaagcccacggtgcgcctcgccacccgcgacgacgtccccagggccgtacgcaccctcgccgccgcgttcgccgactaccccgccacgcgccacaccgtcgatccggaccgccacatcgagcgggtcaccgagctgcaagaactcttcctcacgcgcgtcgggctcgacatcggcaaggtgtgggtcgcggacgacggcgccgcggtggcggtctggaccacgccggagagcgtcgaagcgggggcggtgttcgccgagatcggcccgcgcatggccgagttgagcggttcccggctggccgcgcagcaacagatggaaggcctcctggcgccgcaccggcccaaggagcccgcgtggttcctggccaccgtcggcgtctcgcccgaccaccagggcaagggtctgggcagcgccgtcgtgctccccggagtggaggcggccgagcgcgccggggtgcccgccttcctggagacctccgcgccccgcaacctccccttctacgagcggctcggcttcaccgtcaccgccgacgtcgaggtgcccgaaggaccgcgcacctggtgcatgacccgcaagcccggtgcctga

SEQ ID NO: 36912 - DNA, 2301 bp, synthetic construct
  source 1..2301: mol_type = other DNA
atggccttaccagtgaccgccttgctcctgccgctggccttgctgctccacgccgccaggccggaagtgcagctggttgaatctggcggaggactggttcagcctggcggatctctgagactgtcttgtgccgcctctggcttcgccagcgactactatatcatcggctggttcagacaggcccctggcaaagagagagagggcgtcagctgtatcagcagcagatacgccaacaccaactacgccgacagcgtgaagggcagattcaccatcagccgggacaacgccaagaacaccgtgtacctccagatgaacagcctgaagcctgaggacaccgccgtgtactactgtgccgccgacaccagaagatacacctgtcctgacattgccaccatgcaccggaacttcgattcttggggccagggcacactggtcaccgtttcttctggtaccggcggaggcggatctggcggcggaggtagcggtggcggaggatctgaattcgacatccagatgacacagagccctagcagcctgtctgccagcgtgggagacagagtgaccatcacatgcaagagcagccagagcctgctggactccgatggcaagacctacctgaactggtatcagcagaagcccggcaaggcccctaagctgctgatctacctggtgtccaagctggatagcggcgtgcccagcagattttctggcagcggcagcggaaccgacttcaccctgacaatatccagcctccagcctgaggacttcgccacctactactgctggcaaggcacccactttccattcaccttcggccagggcaccaaggtggaaatcaaaagactcgaggacctgaagaacgtgttcccacctgaggtggccgtgttcgagcctagcgaggccgagatcagccacacccagaaagccaccctcgtgtgcctggctaccggcttctaccccgaccatgtggaactgtcttggtgggtcaacggcaaagaggtgcacagcggcgtgtgtaccgacccccagccactgaaagaacagcccgccctgaacgacagccggtactgcctgagcagcagactgagagtgtccgccaccttctggcagaacccccggaaccacttcagatgccaggtgcagttctacggcctgagcgagaacgacgagtggacccaggacagagccaagcccgtgacccagatcgtgtctgccgaagcctggggcagagccgattgcgacgtgaagctggtggaaaagagcttcgagacagacaccaacctgaacttccagaacctgagcgtgatcggcttcagaatcctgctgctgaaagtggccggctttaacctgctgatgaccctgcggctgtggtccagcagggccaagcgatctggatctggagcaacaaacttctcactactcaaacaagcaggtgacgtggaggagaatcccgggcctactagtatggactggatttggcgcatccttttccttgtcggcgctgctaccggcgcgcattccttcgaagaagtgcagctggttgaatcaggcggaggactggttcagcctggcggatctctgagactgtcttgtgccgccagcggctacaccttcagcagctactggatgaactgggtccgacaggcccctggcaaaggactggaatgggtcggaatgatcgaccccagcgacagcgagacacactacaaccacatcttcaaggaccgcttcaccatcagcgccgacaccagcaagaataccgcctacctccagatgaactccctgagagccgaggacaccgccgtgtactactgcgccagaaacctgtatctgtggggccagggaaccctggtcacagtgtcatctacgcgtatccagaaccctgatcctgccgtgtaccagctgcgggatagcaagagcagcgacaagagcgtgtgtctgttcaccgacttcgacagccagaccaacgtgtcccagagcaaggactccgacgtgtacatcaccgataagtgcgtgctggacatgcggagcatggacttcaagagcaactccgccgtggcctggtccaacaagtccgatttcgcctgcgccaacgccttcaacaacagcattatccccgaggacacattcttcccaagccccgagagcagctgcggctttaccagcgagagctaccagcagggcgtgctgagcgccaccatcctgtacgagatcctgctgggcaaggccaccctgtacgccgtgctggtgtctgccctggtgctgatggctatggtcaagcggaaggacagccggggataa

SEQ ID NO: 36913 - DNA, 2301 bp, synthetic construct
  source 1..2301: mol_type = other DNA
atggccttaccagtgaccgccttgctcctgccgctggccttgctgctccacgccgccaggccggaagtgcagctggttgaatctggcggaggactggttcagcctggcggatctctgagactgagctgtgaagccagcggcttcgccagcgacgattacatcatcggctggttcagacaggcccctggcaaagagagagagggcgtcagctgcatcagctctaagtacgccaacaccgtgtacaccgacagcgtgaagggcagattcagactgagcagaggcaccgccaagaataccgtgtacctccagatgagcgccctgaagcctgaggataccgccgtgtactactgcgctatggacagccgcagagtgacatgccctgagatcagcaccatgcaccggaacttcgattcttggggccagggcacactggtcacagtgtcatctggtaccggcggaggcggatctggcggcggaggtagcggtggcggaggatctgaattcgacatccagatgacacagagccctagcagcctgtctgccagcgtgggagacagagtgaccatcacatgcaagagcagccagagcctgctggactccgatggcaagacctacctgaactggtatcagcagaagcccggcaaggcccctaagctgctgatctacctggtgtccaagctggatagcggcgtgcccagcagattttctggcagcggcagcggaaccgacttcaccctgacaatatccagcctccagcctgaggacttcgccacctactactgctggcaaggcacccactttccattcaccttcggccagggcaccaaggtggaaatcaaaagactcgaggacctgaagaacgtgttcccacctgaggtggccgtgttcgagcctagcgaggccgagatcagccacacccagaaagccaccctcgtgtgcctggctaccggcttctaccccgaccatgtggaactgtcttggtgggtcaacggcaaagaggtgcacagcggcgtgtgtaccgacccccagccactgaaagaacagcccgccctgaacgacagccggtactgcctgagcagcagactgagagtgtccgccaccttctggcagaacccccggaaccacttcagatgccaggtgcagttctacggcctgagcgagaacgacgagtggacccaggacagagccaagcccgtgacccagatcgtgtctgccgaagcctggggcagagccgattgcgacgtgaagctggtggaaaagagcttcgagacagacaccaacctgaacttccagaacctgagcgtgatcggcttcagaatcctgctgctgaaagtggccggctttaacctgctgatgaccctgcggctgtggtccagcagggccaagcgatctggatctggagcaacaaacttctcactactcaaacaagcaggtgacgtggaggagaatcccgggcctactagtatggactggatttggcgcatccttttccttgtcggcgctgctaccggcgcgcattccttcgaagaagtgcagctggttgaatcaggcggaggactggttcagcctggcggatctctgagactgtcttgtgccgccagcggctacaccttcagcagctactggatgaactgggtccgacaggcccctggcaaaggactggaatgggtcggaatgatcgaccccagcgacagcgagacacactacaaccacatcttcaaggaccgcttcaccatcagcgccgacaccagcaagaataccgcctacctccagatgaactccctgagagccgaggacaccgccgtgtactactgcgccagaaacctgtatctgtggggccagggaaccctggtcacagtgtcatctacgcgtatccagaaccctgatcctgccgtgtaccagctgcgggatagcaagagcagcgacaagagcgtgtgtctgttcaccgacttcgacagccagaccaacgtgtcccagagcaaggactccgacgtgtacatcaccgataagtgcgtgctggacatgcggagcatggacttcaagagcaactccgccgtggcctggtccaacaagtccgatttcgcctgcgccaacgccttcaacaacagcattatccccgaggacacattcttcccaagccccgagagcagctgcggctttaccagcgagagctaccagcagggcgtgctgagcgccaccatcctgtacgagatcctgctgggcaaggccaccctgtacgccgtgctggtgtctgccctggtgctgatggctatggtcaagcggaaggacagccggggataa

SEQ ID NO: 36914 - DNA, 2298 bp, synthetic construct
  source 1..2298: mol_type = other DNA
atggccttaccagtgaccgccttgctcctgccgctggccttgctgctccacgccgccaggccggaagtgcagctggttgaatctggcggaggactggttcagcctggcggatctctgagactgtcttgtgccgcctctggcttcgccagcgactactatatcatcggctggttcagacaggcccctggcaaagagagagagggcgtcagctgtatcagcagcagatacgccaacaccaactacgccgacagcgtgaagggcagattcaccatcagccgggacaacgccaagaacaccgtgtacctccagatgaacagcctgaagcctgaggacaccgccgtgtactactgtgccgccgacaccagaagatacacctgtcctgacattgccaccatgcaccggaacttcgattcttggggccagggcacactggtcaccgtttcttctggtaccggcggaggcggatctggcggcggaggtagcggtggcggaggatctgaattcgacatccagatgacacagagccctagcagcctgtctgccagcgtgggagacagagtgaccatcacatgcaagagcagccagagcctgctggactccgatggcaagacctacctgaactggtatcagcagaagcccggcaaggcccctaagctgctgatctacctggtgtccaagctggatagcggcgtgcccagcagattttctggcagcggcagcggaaccgacttcaccctgacaatatccagcctccagcctgaggacttcgccacctactactgctggcaaggcacccactttccattcaccttcggccagggcaccaaggtggaaatcaaaagactcgagatccagaaccctgatcctgccgtgtaccagctgcgggatagcaagagcagcgacaagagcgtgtgtctgttcaccgacttcgacagccagaccaacgtgtcccagagcaaggactccgacgtgtacatcaccgataagtgcgtgctggacatgcggagcatggacttcaagagcaactccgccgtggcctggtccaacaagtccgatttcgcctgcgccaacgccttcaacaacagcattatccccgaggacacattcttcccaagccccgagagcagctgcggctttaccagcgagagctaccagcagggcgtgctgagcgccaccatcctgtacgagatcctgctgggcaaggccaccctgtacgccgtgctggtgtctgccctggtgctgatggctatggtcaagcggaaggacagccggggaagggccaagcgatctggatctggagcaacaaacttctcactactcaaacaagcaggtgacgtggaggagaatcccgggcctactagtatggactggatttggcgcatccttttccttgtcggcgctgctaccggcgcgcattccttcgaagaagtgcagctggttgaatcaggcggaggactggttcagcctggcggatctctgagactgtcttgtgccgccagcggctacaccttcagcagctactggatgaactgggtccgacaggcccctggcaaaggactggaatgggtcggaatgatcgaccccagcgacagcgagacacactacaaccacatcttcaaggaccgcttcaccatcagcgccgacaccagcaagaataccgcctacctccagatgaactccctgagagccgaggacaccgccgtgtactactgcgccagaaacctgtatctgtggggccagggaaccctggtcacagtgtcatctacgcgtgacctgaagaacgtgttcccacctgaggtggccgtgttcgagcctagcgaggccgagatcagccacacccagaaagccaccctcgtgtgcctggctaccggcttctaccccgaccatgtggaactgtcttggtgggtcaacggcaaagaggtgcacagcggcgtgtgtaccgacccccagccactgaaagaacagcccgccctgaacgacagccggtactgcctgagcagcagactgagagtgtccgccaccttctggcagaacccccggaaccacttcagatgccaggtgcagttctacggcctgagcgagaacgacgagtggacccaggacagagccaagcccgtgacccagatcgtgtctgccgaagcctggggcagagccgattgcgacgtgaagctggtggaaaagagcttcgagacagacaccaacctgaacttccagaacctgagcgtgatcggcttcagaatcctgctgctgaaagtggccggctttaacctgctgatgaccctgcggctgtggtccagc

SEQ ID NO: 36915 - DNA, 2298 bp, synthetic construct
  source 1..2298: mol_type = other DNA
atggccttaccagtgaccgccttgctcctgccgctggccttgctgctccacgccgccaggccggaagtgcagctggttgaatctggcggaggactggttcagcctggcggatctctgagactgagctgtgaagccagcggcttcgccagcgacgattacatcatcggctggttcagacaggcccctggcaaagagagagagggcgtcagctgcatcagctctaagtacgccaacaccgtgtacaccgacagcgtgaagggcagattcagactgagcagaggcaccgccaagaataccgtgtacctccagatgagcgccctgaagcctgaggataccgccgtgtactactgcgctatggacagccgcagagtgacatgccctgagatcagcaccatgcaccggaacttcgattcttggggccagggcacactggtcacagtgtcatctggtaccggcggaggcggatctggcggcggaggtagcggtggcggaggatctgaattcgacatccagatgacacagagccctagcagcctgtctgccagcgtgggagacagagtgaccatcacatgcaagagcagccagagcctgctggactccgatggcaagacctacctgaactggtatcagcagaagcccggcaaggcccctaagctgctgatctacctggtgtccaagctggatagcggcgtgcccagcagattttctggcagcggcagcggaaccgacttcaccctgacaatatccagcctccagcctgaggacttcgccacctactactgctggcaaggcacccactttccattcaccttcggccagggcaccaaggtggaaatcaaaagactcgagatccagaaccctgatcctgccgtgtaccagctgcgggatagcaagagcagcgacaagagcgtgtgtctgttcaccgacttcgacagccagaccaacgtgtcccagagcaaggactccgacgtgtacatcaccgataagtgcgtgctggacatgcggagcatggacttcaagagcaactccgccgtggcctggtccaacaagtccgatttcgcctgcgccaacgccttcaacaacagcattatccccgaggacacattcttcccaagccccgagagcagctgcggctttaccagcgagagctaccagcagggcgtgctgagcgccaccatcctgtacgagatcctgctgggcaaggccaccctgtacgccgtgctggtgtctgccctggtgctgatggctatggtcaagcggaaggacagccggggaagggccaagcgatctggatctggagcaacaaacttctcactactcaaacaagcaggtgacgtggaggagaatcccgggcctactagtatggactggatttggcgcatccttttccttgtcggcgctgctaccggcgcgcattccttcgaagaagtgcagctggttgaatcaggcggaggactggttcagcctggcggatctctgagactgtcttgtgccgccagcggctacaccttcagcagctactggatgaactgggtccgacaggcccctggcaaaggactggaatgggtcggaatgatcgaccccagcgacagcgagacacactacaaccacatcttcaaggaccgcttcaccatcagcgccgacaccagcaagaataccgcctacctccagatgaactccctgagagccgaggacaccgccgtgtactactgcgccagaaacctgtatctgtggggccagggaaccctggtcacagtgtcatctacgcgtgacctgaagaacgtgttcccacctgaggtggccgtgttcgagcctagcgaggccgagatcagccacacccagaaagccaccctcgtgtgcctggctaccggcttctaccccgaccatgtggaactgtcttggtgggtcaacggcaaagaggtgcacagcggcgtgtgtaccgacccccagccactgaaagaacagcccgccctgaacgacagccggtactgcctgagcagcagactgagagtgtccgccaccttctggcagaacccccggaaccacttcagatgccaggtgcagttctacggcctgagcgagaacgacgagtggacccaggacagagccaagcccgtgacccagatcgtgtctgccgaagcctggggcagagccgattgcgacgtgaagctggtggaaaagagcttcgagacagacaccaacctgaacttccagaacctgagcgtgatcggcttcagaatcctgctgctgaaagtggccggctttaacctgctgatgaccctgcggctgtggtccagc

SEQ ID NO: 36916 - DNA, 2271 bp, synthetic construct
  source 1..2271: mol_type = other DNA
atggccttaccagtgaccgccttgctcctgccgctggccttgctgctccacgccgccaggccgcaagtcaaactggaagaaagcggtggcggcctggtgcaacctggcgaatctctgagactgagctgtagcgccagcggctccatcttcaaggtgttcagagtgttcgccatgagctggtacaggcaaggccctggcaagcagagagagctggtcgcctctatcagcagcggcgagacaaccacatacgccgaatctgtgaaaggccggttcaccatcagccgggataatgccaagaataccgcctatctccagatggactccctgaagcctgaagatacagctgtgtactactgcaacgccgaccataccttcaccggcgatttttggggccagggaacccaagtgaccgtgtctagtggtaccggcggaggcggatctggcggcggaggtagcggtggcggaggatctgaattcgacatccagatgacacagagccctagcagcctgtctgccagcgtgggagacagagtgaccatcacatgcaagagcagccagagcctgctggactccgatggcaagacctacctgaactggtatcagcagaagcccggcaaggcccctaagctgctgatctacctggtgtccaagctggatagcggcgtgcccagcagattttctggcagcggcagcggaaccgacttcaccctgacaatatccagcctccagcctgaggacttcgccacctactactgctggcaaggcacccactttccattcaccttcggccagggcaccaaggtggaaatcaaaagactcgagatccagaaccctgatcctgccgtgtaccagctgcgggatagcaagagcagcgacaagagcgtgtgtctgttcaccgacttcgacagccagaccaacgtgtcccagagcaaggactccgacgtgtacatcaccgataagtgcgtgctggacatgcggagcatggacttcaagagcaactccgccgtggcctggtccaacaagtccgatttcgcctgcgccaacgccttcaacaacagcattatccccgaggacacattcttcccaagccccgagagcagctgcggctttaccagcgagagctaccagcagggcgtgctgagcgccaccatcctgtacgagatcctgctgggcaaggccaccctgtacgccgtgctggtgtctgccctggtgctgatggctatggtcaagcggaaggacagccggggaagggccaagcgatctggatctggagcaacaaacttctcactactcaaacaagcaggtgacgtggaggagaatcccgggcctactagtatggactggatttggcgcatccttttccttgtcggcgctgctaccggcgcgcattccttcgaagaagtgcagctggttgaatcaggcggaggactggttcagcctggcggatctctgagactgtcttgtgccgccagcggctacaccttcagcagctactggatgaactgggtccgacaggcccctggcaaaggactggaatgggtcggaatgatcgaccccagcgacagcgagacacactacaaccacatcttcaaggaccgcttcaccatcagcgccgacaccagcaagaataccgcctacctccagatgaactccctgagagccgaggacaccgccgtgtactactgcgccagaaacctgtatctgtggggccagggaaccctggtcacagtgtcatctacgcgtgacctgaagaacgtgttcccacctgaggtggccgtgttcgagcctagcgaggccgagatcagccacacccagaaagccaccctcgtgtgcctggctaccggcttctaccccgaccatgtggaactgtcttggtgggtcaacggcaaagaggtgcacagcggcgtgtgtaccgacccccagccactgaaagaacagcccgccctgaacgacagccggtactgcctgagcagcagactgagagtgtccgccaccttctggcagaacccccggaaccacttcagatgccaggtgcagttctacggcctgagcgagaacgacgagtggacccaggacagagccaagcccgtgacccagatcgtgtctgccgaagcctggggcagagccgattgcgacgtgaagctggtggaaaagagcttcgagacagacaccaacctgaacttccagaacctgagcgtgatcggcttcagaatcctgctgctgaaagtggccggctttaacctgctgatgaccctgcggctgtggtccagc

SEQ ID NO: 36917 - DNA, 2277 bp, synthetic construct
  source 1..2277: mol_type = other DNA
atggccttaccagtgaccgccttgctcctgccgctggccttgctgctccacgccgccaggccggacatccagatgacacagagccctagcagcctgtctgccagcgtgggagacagagtgaccatcacatgcaagagcagccagagcctgctggactccgatggcaagacctacctgaactggtatcagcagaagcccggcaaggcccctaagctgctgatctacctggtgtccaagctggatagcggcgtgcccagcagattttctggcagcggcagcggaaccgacttcaccctgacaatatccagcctccagcctgaggacttcgccacctactactgctggcaaggcacccactttccattcaccttcggccagggcaccaaggtggaaatcaaaagactcgaggacctgaagaacgtgttcccacctgaggtggccgtgttcgagcctagcgaggccgagatcagccacacccagaaagccaccctcgtgtgcctggctaccggcttctaccccgaccatgtggaactgtcttggtgggtcaacggcaaagaggtgcacagcggcgtgtgtaccgacccccagccactgaaagaacagcccgccctgaacgacagccggtactgcctgagcagcagactgagagtgtccgccaccttctggcagaacccccggaaccacttcagatgccaggtgcagttctacggcctgagcgagaacgacgagtggacccaggacagagccaagcccgtgacccagatcgtgtctgccgaagcctggggcagagccgattgcgacgtgaagctggtggaaaagagcttcgagacagacaccaacctgaacttccagaacctgagcgtgatcggcttcagaatcctgctgctgaaagtggccggctttaacctgctgatgaccctgcggctgtggtccagcagggccaagcgatctggatctggagcaacaaacttctcactactcaaacaagcaggtgacgtggaggagaatcccgggcctactagtgccaccatggactggatttggcgcatccttttccttgtcggcgctgctaccggcgcccattccgggcccgaagtgcagctggttgaatctggcggaggactggttcaggctggcggatctctgagactgtcttgtgccgccagcggcagaacctttagcatgggctggtttagacaggcccctggcaaagagagagagttcgtcgccgccatcacatactctggcggcagcccttactacgccgactctgtgaagggcagattcaccatcagccgggacaacgccaagaacaccgtgtacctccagatgaacagcctgaagcctgaggacaccgccgtgtactactgcgccgccaatccaacatacggcagcgactggaacgccgagaattggggccagggaacccaagtgacagtgtctagcggatccggcggcggaggatctggcggaggcggatctgggggcggaggctctttcgaagaagtgcagctggttgaatcaggcggaggactggttcagcctggcggatctctgagactgtcttgtgccgccagcggctacaccttcagcagctactggatgaactgggtccgacaggcccctggcaaaggactggaatgggtcggaatgatcgaccccagcgacagcgagacacactacaaccacatcttcaaggaccgcttcaccatcagcgccgacaccagcaagaataccgcctacctccagatgaactccctgagagccgaggacaccgccgtgtactactgcgccagaaacctgtatctgtggggccagggaaccctggtcacagtgtcatctacgcgtatccagaaccctgatcctgccgtgtaccagctgcgggatagcaagagcagcgacaagagcgtgtgtctgttcaccgacttcgacagccagaccaacgtgtcccagagcaaggactccgacgtgtacatcaccgataagtgcgtgctggacatgcggagcatggacttcaagagcaactccgccgtggcctggtccaacaagtccgatttcgcctgcgccaacgccttcaacaacagcattatccccgaggacacattcttcccaagccccgagagcagctgcggctttaccagcgagagctaccagcagggcgtgctgagcgccaccatcctgtacgagatcctgctgggcaaggccaccctgtacgccgtgctggtgtctgccctggtgctgatggctatggtcaagcggaaggacagccggggataa

SEQ ID NO: 36918 - DNA, 2280 bp, synthetic construct
  source 1..2280: mol_type = other DNA
atggccttaccagtgaccgccttgctcctgccgctggccttgctgctccacgccgccaggccggacatccagatgacacagagccctagcagcctgtctgccagcgtgggagacagagtgaccatcacatgcaagagcagccagagcctgctggactccgatggcaagacctacctgaactggtatcagcagaagcccggcaaggcccctaagctgctgatctacctggtgtccaagctggatagcggcgtgcccagcagattttctggcagcggcagcggaaccgacttcaccctgacaatatccagcctccagcctgaggacttcgccacctactactgctggcaaggcacccactttccattcaccttcggccagggcaccaaggtggaaatcaaaagactcgaggacctgaagaacgtgttcccacctgaggtggccgtgttcgagcctagcgaggccgagatcagccacacccagaaagccaccctcgtgtgcctggctaccggcttctaccccgaccatgtggaactgtcttggtgggtcaacggcaaagaggtgcacagcggcgtgtgtaccgacccccagccactgaaagaacagcccgccctgaacgacagccggtactgcctgagcagcagactgagagtgtccgccaccttctggcagaacccccggaaccacttcagatgccaggtgcagttctacggcctgagcgagaacgacgagtggacccaggacagagccaagcccgtgacccagatcgtgtctgccgaagcctggggcagagccgattgcgacgtgaagctggtggaaaagagcttcgagacagacaccaacctgaacttccagaacctgagcgtgatcggcttcagaatcctgctgctgaaagtggccggctttaacctgctgatgaccctgcggctgtggtccagcagggccaagcgatctggatctggagcaacaaacttctcactactcaaacaagcaggtgacgtggaggagaatcccgggcctactagtgccaccatggactggatttggcgcatccttttccttgtcggcgctgctaccggcgcccattccgggcccgaagtgcaactggtggaatctgggggcggactggtgcagccaggcggaagtctgaggctgtcttgtgccgcctccggcagcatcttcggcttcaacgacatggcctggtatcggcaggctcccggaaaacagcgcgagctggtggctctgattagcagagtgggcgtgaccagcagcgccgactctgtgaagggcagattcacaatctccagagtgaacgccaaggatacagtgtacctccagatgaactctctgaaacctgaggatacagcagtgtactattgctacatggaccagcggctggacggcagcacactggcctactggggacagggaactcaagtgacagtgtctagcggatccggcggcggaggatctggcggaggcggatctgggggcggaggctctttcgaagaagtgcagctggttgaatcaggcggaggactggttcagcctggcggatctctgagactgtcttgtgccgccagcggctacaccttcagcagctactggatgaactgggtccgacaggcccctggcaaaggactggaatgggtcggaatgatcgaccccagcgacagcgagacacactacaaccacatcttcaaggaccgcttcaccatcagcgccgacaccagcaagaataccgcctacctccagatgaactccctgagagccgaggacaccgccgtgtactactgcgccagaaacctgtatctgtggggccagggaaccctggtcacagtgtcatctacgcgtatccagaaccctgatcctgccgtgtaccagctgcgggatagcaagagcagcgacaagagcgtgtgtctgttcaccgacttcgacagccagaccaacgtgtcccagagcaaggactccgacgtgtacatcaccgataagtgcgtgctggacatgcggagcatggacttcaagagcaactccgccgtggcctggtccaacaagtccgatttcgcctgcgccaacgccttcaacaacagcattatccccgaggacacattcttcccaagccccgagagcagctgcggctttaccagcgagagctaccagcagggcgtgctgagcgccaccatcctgtacgagatcctgctgggcaaggccaccctgtacgccgtgctggtgtctgccctggtgctgatggctatggtcaagcggaaggacagccggggataa

SEQ ID NO: 36919 - DNA, 2268 bp, synthetic construct
  source 1..2268: mol_type = other DNA
atggccttaccagtgaccgccttgctcctgccgctggccttgctgctccacgccgccaggccggacatccagatgacacagagccctagcagcctgtctgccagcgtgggagacagagtgaccatcacatgcaagagcagccagagcctgctggactccgatggcaagacctacctgaactggtatcagcagaagcccggcaaggcccctaagctgctgatctacctggtgtccaagctggatagcggcgtgcccagcagattttctggcagcggcagcggaaccgacttcaccctgacaatatccagcctccagcctgaggacttcgccacctactactgctggcaaggcacccactttccattcaccttcggccagggcaccaaggtggaaatcaaaagactcgaggacctgaagaacgtgttcccacctgaggtggccgtgttcgagcctagcgaggccgagatcagccacacccagaaagccaccctcgtgtgcctggctaccggcttctaccccgaccatgtggaactgtcttggtgggtcaacggcaaagaggtgcacagcggcgtgtgtaccgacccccagccactgaaagaacagcccgccctgaacgacagccggtactgcctgagcagcagactgagagtgtccgccaccttctggcagaacccccggaaccacttcagatgccaggtgcagttctacggcctgagcgagaacgacgagtggacccaggacagagccaagcccgtgacccagatcgtgtctgccgaagcctggggcagagccgattgcgacgtgaagctggtggaaaagagcttcgagacagacaccaacctgaacttccagaacctgagcgtgatcggcttcagaatcctgctgctgaaagtggccggctttaacctgctgatgaccctgcggctgtggtccagcagggccaagcgatctggatctggagcaacaaacttctcactactcaaacaagcaggtgacgtggaggagaatcccgggcctactagtgccaccatggactggatttggcgcatccttttccttgtcggcgctgctaccggcgcccattccgggcccgaggtgcagctggttgaatctggcggaggactggttcaggctggcggatctctgagactgtcttgtgccgccagcggctctgtgttcagcggcaatgtgatgggctggtacagacaggcccctggcaaagaaagagagtgggttgccgccattgccagcggcggcagcatctactacagagactctgtgaagggcagattcaccatcagccgggacaacgccaagaacaccgtgtacctccagatgaacagcctgaagcctgaggacaccgccgtgtactactgcaactctcaccctcctacactgccctattggggcctgggaacccaagtgacagtgtcctctggatccggcggcggaggatctggcggaggcggatctgggggcggaggctctttcgaagaagtgcagctggttgaatcaggcggaggactggttcagcctggcggatctctgagactgtcttgtgccgccagcggctacaccttcagcagctactggatgaactgggtccgacaggcccctggcaaaggactggaatgggtcggaatgatcgaccccagcgacagcgagacacactacaaccacatcttcaaggaccgcttcaccatcagcgccgacaccagcaagaataccgcctacctccagatgaactccctgagagccgaggacaccgccgtgtactactgcgccagaaacctgtatctgtggggccagggaaccctggtcacagtgtcatctacgcgtatccagaaccctgatcctgccgtgtaccagctgcgggatagcaagagcagcgacaagagcgtgtgtctgttcaccgacttcgacagccagaccaacgtgtcccagagcaaggactccgacgtgtacatcaccgataagtgcgtgctggacatgcggagcatggacttcaagagcaactccgccgtggcctggtccaacaagtccgatttcgcctgcgccaacgccttcaacaacagcattatccccgaggacacattcttcccaagccccgagagcagctgcggctttaccagcgagagctaccagcagggcgtgctgagcgccaccatcctgtacgagatcctgctgggcaaggccaccctgtacgccgtgctggtgtctgccctggtgctgatggctatggtcaagcggaaggacagccggggataa

SEQ ID NO: 36920 - DNA, 2262 bp, synthetic construct
  source 1..2262: mol_type = other DNA
atggccttaccagtgaccgccttgctcctgccgctggccttgctgctccacgccgccaggccggacatccagatgacacagagccctagcagcctgtctgccagcgtgggagacagagtgaccatcacatgcaagagcagccagagcctgctggactccgatggcaagacctacctgaactggtatcagcagaagcccggcaaggcccctaagctgctgatctacctggtgtccaagctggatagcggcgtgcccagcagattttctggcagcggcagcggaaccgacttcaccctgacaatatccagcctccagcctgaggacttcgccacctactactgctggcaaggcacccactttccattcaccttcggccagggcaccaaggtggaaatcaaaagactcgaggacctgaagaacgtgttcccacctgaggtggccgtgttcgagcctagcgaggccgagatcagccacacccagaaagccaccctcgtgtgcctggctaccggcttctaccccgaccatgtggaactgtcttggtgggtcaacggcaaagaggtgcacagcggcgtgtgtaccgacccccagccactgaaagaacagcccgccctgaacgacagccggtactgcctgagcagcagactgagagtgtccgccaccttctggcagaacccccggaaccacttcagatgccaggtgcagttctacggcctgagcgagaacgacgagtggacccaggacagagccaagcccgtgacccagatcgtgtctgccgaagcctggggcagagccgattgcgacgtgaagctggtggaaaagagcttcgagacagacaccaacctgaacttccagaacctgagcgtgatcggcttcagaatcctgctgctgaaagtggccggctttaacctgctgatgaccctgcggctgtggtccagcagggccaagcgatctggatctggagcaacaaacttctcactactcaaacaagcaggtgacgtggaggagaatcccgggcctactagtgccaccatggactggatttggcgcatccttttccttgtcggcgctgctaccggcgcccattccgggcccgaagttcagctgctggaatctggcggaggactcgttcaacctggcggctctctgagactgagctgtgccgcttctggcttcagcttctctagctacgccctgagctgggttcgacaagctcccggaaagggccttgaatgggtgtccagcatcggcgagaatgacggcaccacagactatgccgatgccgtgaaaggccggtttaccatcagcagagacaattccaagaacacgctctatctgcaaatgaactccctgcgcgtggaagatacagccgtgtattattgcgtgaaggacggcatccactggggacagggaaccctggttacagtgtctagcggatccggcggcggaggatctggcggaggcggatctgggggcggaggctctttcgaagaagtgcagctggttgaatcaggcggaggactggttcagcctggcggatctctgagactgtcttgtgccgccagcggctacaccttcagcagctactggatgaactgggtccgacaggcccctggcaaaggactggaatgggtcggaatgatcgaccccagcgacagcgagacacactacaaccacatcttcaaggaccgcttcaccatcagcgccgacaccagcaagaataccgcctacctccagatgaactccctgagagccgaggacaccgccgtgtactactgcgccagaaacctgtatctgtggggccagggaaccctggtcacagtgtcatctacgcgtatccagaaccctgatcctgccgtgtaccagctgcgggatagcaagagcagcgacaagagcgtgtgtctgttcaccgacttcgacagccagaccaacgtgtcccagagcaaggactccgacgtgtacatcaccgataagtgcgtgctggacatgcggagcatggacttcaagagcaactccgccgtggcctggtccaacaagtccgatttcgcctgcgccaacgccttcaacaacagcattatccccgaggacacattcttcccaagccccgagagcagctgcggctttaccagcgagagctaccagcagggcgtgctgagcgccaccatcctgtacgagatcctgctgggcaaggccaccctgtacgccgtgctggtgtctgccctggtgctgatggctatggtcaagcggaaggacagccggggataa

SEQ ID NO: 36921 - DNA, 3369 bp, synthetic construct
  source 1..3369: mol_type = other DNA
atgggacccagactgctgttttgggctctgctgtgtctgctcggcacaggacctgttgaagctggcgtgacacagagccccacacacctgattaagaccagaggccagcaggccacactgagatgcagccctatcagcggccacaccagcgtgtactggtatcagcaggctctcggactgggcctccagttcctgctttggtacgacgagggcgaagagagaaaccggggcaacttccctcctcggttttccggcagacagttccccaactacagcagcgagctgaacgtgaacgccctggaactggaagatagcgccctgtacctgtgtgcctcttctcttggtggacctcgcggactggctggactgagaggggatgagcagtttttcggccctggcaccagactgaccgtgctggaaggtaccggcggaggcggatctggcggcggagaattcgacatccagatgacacagagccctagcagcctgtctgccagcgtgggagacagagtgaccatcacatgcaagagcagccagagcctgctggactccgatggcaagacctacctgaactggtatcagcagaagcccggcaaggcccctaagctgctgatctacctggtgtccaagctggatagcggcgtgcccagcagattttctggcagcggcagcggaaccgacttcaccctgacaatatccagcctccagcctgaggacttcgccacctactactgctggcaaggcacccactttccattcaccttcggccagggcaccaaggtggaaatcaaaagactcgaggacctgaagaacgtgttcccacctgaggtggccgtgttcgagcctagcgaggccgagatcagccacacccagaaagccaccctcgtgtgcctggctaccggcttctaccccgaccatgtggaactgtcttggtgggtcaacggcaaagaggtgcacagcggcgtgtgtaccgacccccagccactgaaagaacagcccgccctgaacgacagccggtactgcctgagcagcagactgagagtgtccgccaccttctggcagaacccccggaaccacttcagatgccaggtgcagttctacggcctgagcgagaacgacgagtggacccaggacagagccaagcccgtgacccagatcgtgtctgccgaagcctggggcagagccgattgcgacgtgaagctggtggaaaagagcttcgagacagacaccaacctgaacttccagaacctgagcgtgatcggcttcagaatcctgctgctgaaagtggccggctttaacctgctgatgaccctgcggctgtggtccagcagggccaagcgatctggatctggagcaacaaacttctcactactcaaacaagcaggtgacgtggaggagaatcccgggcctactagtgccaccatggactggatttggcgcatccttttccttgtcggcgctgctaccggcgcccattccgggcccgaagtgcagctggttgaatctggcggaggactggttcaggctggcggatctctgagactgtcttgtgccgccagcggcagaacctttagcatgggctggtttagacaggcccctggcaaagagagagagttcgtcgccgccatcacatactctggcggcagcccttactacgccgactctgtgaagggcagattcaccatcagccgggacaacgccaagaacaccgtgtacctccagatgaacagcctgaagcctgaggacaccgccgtgtactactgcgccgccaatccaacatacggcagcgactggaacgccgagaattggggccagggaacccaagtgacagtgtctagcggatccggcggcggaggatctggcggaggcggatctgggggcggaggctctttcgaagaagtgcagctggttgaatcaggcggaggactggttcagcctggcggatctctgagactgtcttgtgccgccagcggctacaccttcagcagctactggatgaactgggtccgacaggcccctggcaaaggactggaatgggtcggaatgatcgaccccagcgacagcgagacacactacaaccacatcttcaaggaccgcttcaccatcagcgccgacaccagcaagaataccgcctacctccagatgaactccctgagagccgaggacaccgccgtgtactactgcgccagaaacctgtatctgtggggccagggaaccctggtcacagtgtcatctacgcgtatccagaaccctgatcctgccgtgtaccagctgcgggatagcaagagcagcgacaagagcgtgtgtctgttcaccgacttcgacagccagaccaacgtgtcccagagcaaggactccgacgtgtacatcaccgataagtgcgtgctggacatgcggagcatggacttcaagagcaactccgccgtggcctggtccaacaagtccgatttcgcctgcgccaacgccttcaacaacagcattatccccgaggacacattcttcccaagccccgagagcagctgcggctttaccagcgagagctaccagcagggcgtgctgagcgccaccatcctgtacgagatcctgctgggcaaggccaccctgtacgccgtgctggtgtctgccctggtgctgatggctatggtcaagcggaaggacagccggggacgcgccaagagaagcggatctggcgtgaagcagaccctgaatttcgacctgctgaagctggctggcgacgtggaatccaacccaggcccttctagaggccatatgaccgagtacaagcccacggtgcgcctcgccacccgcgacgacgtccccagggccgtacgcaccctcgccgccgcgttcgccgactaccccgccacgcgccacaccgtcgatccggaccgccacatcgagcgggtcaccgagctgcaagaactcttcctcacgcgcgtcgggctcgacatcggcaaggtgtgggtcgcggacgacggcgccgcggtggcggtctggaccacgccggagagcgtcgaagcgggggcggtgttcgccgagatcggcccgcgcatggccgagttgagcggttcccggctggccgcgcagcaacagatggaaggcctcctggcgccgcaccggcccaaggagcccgcgtggttcctggccaccgtcggcgtctcgcccgaccaccagggcaagggtctgggcagcgccgtcgtgctccccggagtggaggcggccgagcgcgccggggtgcccgccttcctggagacctccgcgccccgcaacctccccttctacgagcggctcggcttcaccgtcaccgccgacgtcgaggtgcccgaaggaccgcgcacctggtgcatgacccgcaagcccggtgcctga

SEQ ID NO: 36922 - DNA, 3366 bp, synthetic construct
  source 1..3366: mol_type = other DNA
atgggacccagactgctgttttgggctctgctgtgtctgctcggcacaggacctgttgaagctggcgtgacacagagccccacacacctgattaagaccagaggccagcaggccacactgagatgcagccctatcagcggccacaccagcgtgtactggtatcagcaggctctcggactgggcctccagttcctgctttggtacgacgagggcgaagagagaaaccggggcaacttccctcctcggttttccggcagacagttccccaactacagcagcgagctgaacgtgaacgccctggaactggaagatagcgccctgtacctgtgtgccagctctctcggcggagatgaactgggagccgatggcaacgagcagttctttggccctggcaccagactgaccgtgctggaaggtaccggcggaggcggatctggcggcggaagcgaattcgacatccagatgacacagagccctagcagcctgtctgccagcgtgggagacagagtgaccatcacatgcaagagcagccagagcctgctggactccgatggcaagacctacctgaactggtatcagcagaagcccggcaaggcccctaagctgctgatctacctggtgtccaagctggatagcggcgtgcccagcagattttctggcagcggcagcggaaccgacttcaccctgacaatatccagcctccagcctgaggacttcgccacctactactgctggcaaggcacccactttccattcaccttcggccagggcaccaaggtggaaatcaaaagactcgaggacctgaagaacgtgttcccacctgaggtggccgtgttcgagcctagcgaggccgagatcagccacacccagaaagccaccctcgtgtgcctggctaccggcttctaccccgaccatgtggaactgtcttggtgggtcaacggcaaagaggtgcacagcggcgtgtgtaccgacccccagccactgaaagaacagcccgccctgaacgacagccggtactgcctgagcagcagactgagagtgtccgccaccttctggcagaacccccggaaccacttcagatgccaggtgcagttctacggcctgagcgagaacgacgagtggacccaggacagagccaagcccgtgacccagatcgtgtctgccgaagcctggggcagagccgattgcgacgtgaagctggtggaaaagagcttcgagacagacaccaacctgaacttccagaacctgagcgtgatcggcttcagaatcctgctgctgaaagtggccggctttaacctgctgatgaccctgcggctgtggtccagcagggccaagcgatctggatctggagcaacaaacttctcactactcaaacaagcaggtgacgtggaggagaatcccgggcctactagtgccaccatggactggatttggcgcatccttttccttgtcggcgctgctaccggcgcccattccgggcccgaagtgcagctggttgaatctggcggaggactggttcaggctggcggatctctgagactgtcttgtgccgccagcggcagaacctttagcatgggctggtttagacaggcccctggcaaagagagagagttcgtcgccgccatcacatactctggcggcagcccttactacgccgactctgtgaagggcagattcaccatcagccgggacaacgccaagaacaccgtgtacctccagatgaacagcctgaagcctgaggacaccgccgtgtactactgcgccgccaatccaacatacggcagcgactggaacgccgagaattggggccagggaacccaagtgacagtgtctagcggatccggcggcggaggatctggcggaggcggatctgggggcggaggctctttcgaagaagtgcagctggttgaatcaggcggaggactggttcagcctggcggatctctgagactgtcttgtgccgccagcggctacaccttcagcagctactggatgaactgggtccgacaggcccctggcaaaggactggaatgggtcggaatgatcgaccccagcgacagcgagacacactacaaccacatcttcaaggaccgcttcaccatcagcgccgacaccagcaagaataccgcctacctccagatgaactccctgagagccgaggacaccgccgtgtactactgcgccagaaacctgtatctgtggggccagggaaccctggtcacagtgtcatctacgcgtatccagaaccctgatcctgccgtgtaccagctgcgggatagcaagagcagcgacaagagcgtgtgtctgttcaccgacttcgacagccagaccaacgtgtcccagagcaaggactccgacgtgtacatcaccgataagtgcgtgctggacatgcggagcatggacttcaagagcaactccgccgtggcctggtccaacaagtccgatttcgcctgcgccaacgccttcaacaacagcattatccccgaggacacattcttcccaagccccgagagcagctgcggctttaccagcgagagctaccagcagggcgtgctgagcgccaccatcctgtacgagatcctgctgggcaaggccaccctgtacgccgtgctggtgtctgccctggtgctgatggctatggtcaagcggaaggacagccggggacgcgccaagagaagcggatctggcgtgaagcagaccctgaatttcgacctgctgaagctggctggcgacgtggaatccaacccaggcccttctagaggccatatgaccgagtacaagcccacggtgcgcctcgccacccgcgacgacgtccccagggccgtacgcaccctcgccgccgcgttcgccgactaccccgccacgcgccacaccgtcgatccggaccgccacatcgagcgggtcaccgagctgcaagaactcttcctcacgcgcgtcgggctcgacatcggcaaggtgtgggtcgcggacgacggcgccgcggtggcggtctggaccacgccggagagcgtcgaagcgggggcggtgttcgccgagatcggcccgcgcatggccgagttgagcggttcccggctggccgcgcagcaacagatggaaggcctcctggcgccgcaccggcccaaggagcccgcgtggttcctggccaccgtcggcgtctcgcccgaccaccagggcaagggtctgggcagcgccgtcgtgctccccggagtggaggcggccgagcgcgccggggtgcccgccttcctggagacctccgcgccccgcaacctccccttctacgagcggctcggcttcaccgtcaccgccgacgtcgaggtgcccgaaggaccgcgcacctggtgcatgacccgcaagcccggtgcctga

SEQ ID NO: 36923 - DNA, 2841 bp, synthetic construct
  source 1..2841: mol_type = other DNA
atggccttaccagtgaccgccttgctcctgccgctggccttgctgctccacgccgccaggccggacatccagatgacacagagccctagcagcctgtctgccagcgtgggagacagagtgaccatcacatgcaagagcagccagagcctgctggactccgatggcaagacctacctgaactggtatcagcagaagcccggcaaggcccctaagctgctgatctacctggtgtccaagctggatagcggcgtgcccagcagattttctggcagcggcagcggaaccgacttcaccctgacaatatccagcctccagcctgaggacttcgccacctactactgctggcaaggcacccactttccattcaccttcggccagggcaccaaggtggaaatcaaaagactcgaggacctgaagaacgtgttcccacctgaggtggccgtgttcgagcctagcgaggccgagatcagccacacccagaaagccaccctcgtgtgcctggctaccggcttctaccccgaccatgtggaactgtcttggtgggtcaacggcaaagaggtgcacagcggcgtgtgtaccgacccccagccactgaaagaacagcccgccctgaacgacagccggtactgcctgagcagcagactgagagtgtccgccaccttctggcagaacccccggaaccacttcagatgccaggtgcagttctacggcctgagcgagaacgacgagtggacccaggacagagccaagcccgtgacccagatcgtgtctgccgaagcctggggcagagccgattgcgacgtgaagctggtggaaaagagcttcgagacagacaccaacctgaacttccagaacctgagcgtgatcggcttcagaatcctgctgctgaaagtggccggctttaacctgctgatgaccctgcggctgtggtccagcagggccaagcgatctggatctggagcaacaaacttctcactactcaaacaagcaggtgacgtggaggagaatcccgggcctactagtgccaccatggactggatttggcgcatccttttccttgtcggcgctgctaccggcgcccattccgggcccatgggaagctggcttgagttctaccacagactcaacgccattgacagcaggctgtgggcacttggcggaagcgaagctgaactcgccgcttttgaaaaagaaattgccgctttcgagtccgagcttcaggcttacaaaggcaaagggaatcctgaggtcgagagcctgagagatcacgctgcccacattagagagtggttgcaggcataccggcacaatggatccggcggcggaggatctggcggaggcggatctgggggcggaggctctttcgaagaagtgcagctggttgaatcaggcggaggactggttcagcctggcggatctctgagactgtcttgtgccgccagcggctacaccttcagcagctactggatgaactgggtccgacaggcccctggcaaaggactggaatgggtcggaatgatcgaccccagcgacagcgagacacactacaaccacatcttcaaggaccgcttcaccatcagcgccgacaccagcaagaataccgcctacctccagatgaactccctgagagccgaggacaccgccgtgtactactgcgccagaaacctgtatctgtggggccagggaaccctggtcacagtgtcatctacgcgtatccagaaccctgatcctgccgtgtaccagctgcgggatagcaagagcagcgacaagagcgtgtgtctgttcaccgacttcgacagccagaccaacgtgtcccagagcaaggactccgacgtgtacatcaccgataagtgcgtgctggacatgcggagcatggacttcaagagcaactccgccgtggcctggtccaacaagtccgatttcgcctgcgccaacgccttcaacaacagcattatccccgaggacacattcttcccaagccccgagagcagctgcggctttaccagcgagagctaccagcagggcgtgctgagcgccaccatcctgtacgagatcctgctgggcaaggccaccctgtacgccgtgctggtgtctgccctggtgctgatggctatggtcaagcggaaggacagccggggacgcgccaagagaagcggatctggcgtgaagcagaccctgaatttcgacctgctgaagctggctggcgacgtggaatccaacccaggcccttctagaggccatatgaccgagtacaagcccacggtgcgcctcgccacccgcgacgacgtccccagggccgtacgcaccctcgccgccgcgttcgccgactaccccgccacgcgccacaccgtcgatccggaccgccacatcgagcgggtcaccgagctgcaagaactcttcctcacgcgcgtcgggctcgacatcggcaaggtgtgggtcgcggacgacggcgccgcggtggcggtctggaccacgccggagagcgtcgaagcgggggcggtgttcgccgagatcggcccgcgcatggccgagttgagcggttcccggctggccgcgcagcaacagatggaaggcctcctggcgccgcaccggcccaaggagcccgcgtggttcctggccaccgtcggcgtctcgcccgaccaccagggcaagggtctgggcagcgccgtcgtgctccccggagtggaggcggccgagcgcgccggggtgcccgccttcctggagacctccgcgccccgcaacctccccttctacgagcggctcggcttcaccgtcaccgccgacgtcgaggtgcccgaaggaccgcgcacctggtgcatgacccgcaagcccggtgcctga

SEQ ID NO: 36924 - DNA, 2841 bp, synthetic construct
  source 1..2841: mol_type = other DNA
atggccttaccagtgaccgccttgctcctgccgctggccttgctgctccacgccgccaggccggcatgcatgggcagttggttcgagttctacgaccggctgaatgccatcgacgccagactgtgggctctcggaggatctgaagctgagctggccgccttcgagaaagagatcgccgcctttgagagcgagctgcaagcctacaaaggcaagggcaaccccgaggtggaaaacctgagagtgcacgccgctgccatcagagaatggctccaggcttacagacacaacggtaccggcggaggcggatctggcggcggaggtagcggtggcggaggatctgaattcgacatccagatgacacagagccctagcagcctgtctgccagcgtgggagacagagtgaccatcacatgcaagagcagccagagcctgctggactccgatggcaagacctacctgaactggtatcagcagaagcccggcaaggcccctaagctgctgatctacctggtgtccaagctggatagcggcgtgcccagcagattttctggcagcggcagcggaaccgacttcaccctgacaatatccagcctccagcctgaggacttcgccacctactactgctggcaaggcacccactttccattcaccttcggccagggcaccaaggtggaaatcaaaagactcgaggacctgaagaacgtgttcccacctgaggtggccgtgttcgagcctagcgaggccgagatcagccacacccagaaagccaccctcgtgtgcctggctaccggcttctaccccgaccatgtggaactgtcttggtgggtcaacggcaaagaggtgcacagcggcgtgtgtaccgacccccagccactgaaagaacagcccgccctgaacgacagccggtactgcctgagcagcagactgagagtgtccgccaccttctggcagaacccccggaaccacttcagatgccaggtgcagttctacggcctgagcgagaacgacgagtggacccaggacagagccaagcccgtgacccagatcgtgtctgccgaagcctggggcagagccgattgcgacgtgaagctggtggaaaagagcttcgagacagacaccaacctgaacttccagaacctgagcgtgatcggcttcagaatcctgctgctgaaagtggccggctttaacctgctgatgaccctgcggctgtggtccagcagggccaagcgatctggatctggagcaacaaacttctcactactcaaacaagcaggtgacgtggaggagaatcccgggcctactagtatggactggatttggcgcatccttttccttgtcggcgctgctaccggcgcgcattccttcgaagaagtgcagctggttgaatcaggcggaggactggttcagcctggcggatctctgagactgtcttgtgccgccagcggctacaccttcagcagctactggatgaactgggtccgacaggcccctggcaaaggactggaatgggtcggaatgatcgaccccagcgacagcgagacacactacaaccacatcttcaaggaccgcttcaccatcagcgccgacaccagcaagaataccgcctacctccagatgaactccctgagagccgaggacaccgccgtgtactactgcgccagaaacctgtatctgtggggccagggaaccctggtcacagtgtcatctacgcgtatccagaaccctgatcctgccgtgtaccagctgcgggatagcaagagcagcgacaagagcgtgtgtctgttcaccgacttcgacagccagaccaacgtgtcccagagcaaggactccgacgtgtacatcaccgataagtgcgtgctggacatgcggagcatggacttcaagagcaactccgccgtggcctggtccaacaagtccgatttcgcctgcgccaacgccttcaacaacagcattatccccgaggacacattcttcccaagccccgagagcagctgcggctttaccagcgagagctaccagcagggcgtgctgagcgccaccatcctgtacgagatcctgctgggcaaggccaccctgtacgccgtgctggtgtctgccctggtgctgatggctatggtcaagcggaaggacagccggggacgcgccaagagaagcggatctggcgtgaagcagaccctgaatttcgacctgctgaagctggctggcgacgtggaatccaacccaggcccttctagaggccatatgaccgagtacaagcccacggtgcgcctcgccacccgcgacgacgtccccagggccgtacgcaccctcgccgccgcgttcgccgactaccccgccacgcgccacaccgtcgatccggaccgccacatcgagcgggtcaccgagctgcaagaactcttcctcacgcgcgtcgggctcgacatcggcaaggtgtgggtcgcggacgacggcgccgcggtggcggtctggaccacgccggagagcgtcgaagcgggggcggtgttcgccgagatcggcccgcgcatggccgagttgagcggttcccggctggccgcgcagcaacagatggaaggcctcctggcgccgcaccggcccaaggagcccgcgtggttcctggccaccgtcggcgtctcgcccgaccaccagggcaagggtctgggcagcgccgtcgtgctccccggagtggaggcggccgagcgcgccggggtgcccgccttcctggagacctccgcgccccgcaacctccccttctacgagcggctcggcttcaccgtcaccgccgacgtcgaggtgcccgaaggaccgcgcacctggtgcatgacccgcaagcccggtgcctga

SEQ ID NO: 36925 - DNA, 3192 bp, synthetic construct
  source 1..3192: mol_type = other DNA
atggccttaccagtgaccgccttgctcctgccgctggccttgctgctccacgccgccaggccggcatgcatggaccccgacctggaaatcagagccgccttcctgcggcagagaaacacagccctgagaacagaggtggccgagctggaacaagaggtgcagcggctggaaaacgaggtgtcccagtacgagacaagatacggccctctcggaggcggaaaaggtaccggcggaggcggatctggcggcggaggtagcggtggcggaggatctgaattcgacatccagatgacacagagccctagcagcctgtctgccagcgtgggagacagagtgaccatcacatgcaagagcagccagagcctgctggactccgatggcaagacctacctgaactggtatcagcagaagcccggcaaggcccctaagctgctgatctacctggtgtccaagctggatagcggcgtgcccagcagattttctggcagcggcagcggaaccgacttcaccctgacaatatccagcctccagcctgaggacttcgccacctactactgctggcaaggcacccactttccattcaccttcggccagggcaccaaggtggaaatcaaaagactcgaggacctgaagaacgtgttcccacctgaggtggccgtgttcgagcctagcgaggccgagatcagccacacccagaaagccaccctcgtgtgcctggctaccggcttctaccccgaccatgtggaactgtcttggtgggtcaacggcaaagaggtgcacagcggcgtgtgtaccgacccccagccactgaaagaacagcccgccctgaacgacagccggtactgcctgagcagcagactgagagtgtccgccaccttctggcagaacccccggaaccacttcagatgccaggtgcagttctacggcctgagcgagaacgacgagtggacccaggacagagccaagcccgtgacccagatcgtgtctgccgaagcctggggcagagccgattgcgacgtgaagctggtggaaaagagcttcgagacagacaccaacctgaacttccagaacctgagcgtgatcggcttcagaatcctgctgctgaaagtggccggctttaacctgctgatgaccctgcggctgtggtccagcagggccaagcgatctggatctggagcaacaaacttctcactactcaaacaagcaggtgacgtggaggagaatcccgggcctactagtgccaccatggactggatttggcgcatccttttccttgtcggcgctgctaccggcgcccattccgggcccgaagtgcagctggttgaatctggcggaggactggttcaggctggcggatctctgagactgtcttgtgccgccagcggcagaacctttagcatgggctggtttagacaggcccctggcaaagagagagagttcgtcgccgccatcacatactctggcggcagcccttactacgccgactctgtgaagggcagattcaccatcagccgggacaacgccaagaacaccgtgtacctccagatgaacagcctgaagcctgaggacaccgccgtgtactactgcgccgccaatccaacatacggcagcgactggaacgccgagaattggggccagggaacccaagtgacagtgtctagcggatccggcggcggaggatctggcggaggcggatctgggggcggaggctctttcgaagaagtgcagctggttgaatcaggcggaggactggttcagcctggcggatctctgagactgtcttgtgccgccagcggctacaccttcagcagctactggatgaactgggtccgacaggcccctggcaaaggactggaatgggtcggaatgatcgaccccagcgacagcgagacacactacaaccacatcttcaaggaccgcttcaccatcagcgccgacaccagcaagaataccgcctacctccagatgaactccctgagagccgaggacaccgccgtgtactactgcgccagaaacctgtatctgtggggccagggaaccctggtcacagtgtcatctacgcgtatccagaaccctgatcctgccgtgtaccagctgcgggatagcaagagcagcgacaagagcgtgtgtctgttcaccgacttcgacagccagaccaacgtgtcccagagcaaggactccgacgtgtacatcaccgataagtgcgtgctggacatgcggagcatggacttcaagagcaactccgccgtggcctggtccaacaagtccgatttcgcctgcgccaacgccttcaacaacagcattatccccgaggacacattcttcccaagccccgagagcagctgcggctttaccagcgagagctaccagcagggcgtgctgagcgccaccatcctgtacgagatcctgctgggcaaggccaccctgtacgccgtgctggtgtctgccctggtgctgatggctatggtcaagcggaaggacagccggggacgcgccaagagaagcggatctggcgtgaagcagaccctgaatttcgacctgctgaagctggctggcgacgtggaatccaacccaggcccttctagaggccatatgaccgagtacaagcccacggtgcgcctcgccacccgcgacgacgtccccagggccgtacgcaccctcgccgccgcgttcgccgactaccccgccacgcgccacaccgtcgatccggaccgccacatcgagcgggtcaccgagctgcaagaactcttcctcacgcgcgtcgggctcgacatcggcaaggtgtgggtcgcggacgacggcgccgcggtggcggtctggaccacgccggagagcgtcgaagcgggggcggtgttcgccgagatcggcccgcgcatggccgagttgagcggttcccggctggccgcgcagcaacagatggaaggcctcctggcgccgcaccggcccaaggagcccgcgtggttcctggccaccgtcggcgtctcgcccgaccaccagggcaagggtctgggcagcgccgtcgtgctccccggagtggaggcggccgagcgcgccggggtgcccgccttcctggagacctccgcgccccgcaacctccccttctacgagcggctcggcttcaccgtcaccgccgacgtcgaggtgcccgaaggaccgcgcacctggtgcatgacccgcaagcccggtgcctga

SEQ ID NO: 36926 - DNA, 2841 bp, synthetic construct
  source 1..2841: mol_type = other DNA
atggccttaccagtgaccgccttgctcctgccgctggccttgctgctccacgccgccaggccggacatccagatgacacagagccctagcagcctgtctgccagcgtgggagacagagtgaccatcacatgcaagagcagccagagcctgctggactccgatggcaagacctacctgaactggtatcagcagaagcccggcaaggcccctaagctgctgatctacctggtgtccaagctggatagcggcgtgcccagcagattttctggcagcggcagcggaaccgacttcaccctgacaatatccagcctccagcctgaggacttcgccacctactactgctggcaaggcacccactttccattcaccttcggccagggcaccaaggtggaaatcaaaagactcgaggacctgaagaacgtgttcccacctgaggtggccgtgttcgagcctagcgaggccgagatcagccacacccagaaagccaccctcgtgtgcctggctaccggcttctaccccgaccatgtggaactgtcttggtgggtcaacggcaaagaggtgcacagcggcgtgtgtaccgacccccagccactgaaagaacagcccgccctgaacgacagccggtactgcctgagcagcagactgagagtgtccgccaccttctggcagaacccccggaaccacttcagatgccaggtgcagttctacggcctgagcgagaacgacgagtggacccaggacagagccaagcccgtgacccagatcgtgtctgccgaagcctggggcagagccgattgcgacgtgaagctggtggaaaagagcttcgagacagacaccaacctgaacttccagaacctgagcgtgatcggcttcagaatcctgctgctgaaagtggccggctttaacctgctgatgaccctgcggctgtggtccagcagggccaagcgatctggatctggagcaacaaacttctcactactcaaacaagcaggtgacgtggaggagaatcccgggcctactagtgccaccatggactggatttggcgcatccttttccttgtcggcgctgctaccggcgcccattccgggcccatgggatcttggagcgagttttacgatcggctgcacgccattcaccaccggctgtatgctctcggaggaagcgaagctgagctggccgcttttgaaaaagaaattgccgctttcgagtccgagcttcaggcttacaaaggcaaagggaatcctgaggtcgaggccctgagagataccgccgccttcatcagaacccggttgcaggcataccggcacaacggatccggcggcggaggatctggcggaggcggatctgggggcggaggctctttcgaagaagtgcagctggttgaatcaggcggaggactggttcagcctggcggatctctgagactgtcttgtgccgccagcggctacaccttcagcagctactggatgaactgggtccgacaggcccctggcaaaggactggaatgggtcggaatgatcgaccccagcgacagcgagacacactacaaccacatcttcaaggaccgcttcaccatcagcgccgacaccagcaagaataccgcctacctccagatgaactccctgagagccgaggacaccgccgtgtactactgcgccagaaacctgtatctgtggggccagggaaccctggtcacagtgtcatctacgcgtatccagaaccctgatcctgccgtgtaccagctgcgggatagcaagagcagcgacaagagcgtgtgtctgttcaccgacttcgacagccagaccaacgtgtcccagagcaaggactccgacgtgtacatcaccgataagtgcgtgctggacatgcggagcatggacttcaagagcaactccgccgtggcctggtccaacaagtccgatttcgcctgcgccaacgccttcaacaacagcattatccccgaggacacattcttcccaagccccgagagcagctgcggctttaccagcgagagctaccagcagggcgtgctgagcgccaccatcctgtacgagatcctgctgggcaaggccaccctgtacgccgtgctggtgtctgccctggtgctgatggctatggtcaagcggaaggacagccggggacgcgccaagagaagcggatctggcgtgaagcagaccctgaatttcgacctgctgaagctggctggcgacgtggaatccaacccaggcccttctagaggccatatgaccgagtacaagcccacggtgcgcctcgccacccgcgacgacgtccccagggccgtacgcaccctcgccgccgcgttcgccgactaccccgccacgcgccacaccgtcgatccggaccgccacatcgagcgggtcaccgagctgcaagaactcttcctcacgcgcgtcgggctcgacatcggcaaggtgtgggtcgcggacgacggcgccgcggtggcggtctggaccacgccggagagcgtcgaagcgggggcggtgttcgccgagatcggcccgcgcatggccgagttgagcggttcccggctggccgcgcagcaacagatggaaggcctcctggcgccgcaccggcccaaggagcccgcgtggttcctggccaccgtcggcgtctcgcccgaccaccagggcaagggtctgggcagcgccgtcgtgctccccggagtggaggcggccgagcgcgccggggtgcccgccttcctggagacctccgcgccccgcaacctccccttctacgagcggctcggcttcaccgtcaccgccgacgtcgaggtgcccgaaggaccgcgcacctggtgcatgacccgcaagcccggtgcctga

SEQ ID NO: 36927 - DNA, 3471 bp, synthetic construct
  source 1..3471: mol_type = other DNA
atggccttaccagtgaccgccttgctcctgccgctggccttgctgctccacgccgccaggccggacatccagatgacacagagccctagcagcctgtctgccagcgtgggagacagagtgaccatcacatgcaagagcagccagagcctgctggactccgatggcaagacctacctgaactggtatcagcagaagcccggcaaggcccctaagctgctgatctacctggtgtccaagctggatagcggcgtgcccagcagattttctggcagcggcagcggaaccgacttcaccctgacaatatccagcctccagcctgaggacttcgccacctactactgctggcaaggcacccactttccattcaccttcggccagggcaccaaggtggaaatcaaaagactcgaggacctgaagaacgtgttcccacctgaggtggccgtgttcgagcctagcgaggccgagatcagccacacccagaaagccaccctcgtgtgcctggctaccggcttctaccccgaccatgtggaactgtcttggtgggtcaacggcaaagaggtgcacagcggcgtgtgtaccgacccccagccactgaaagaacagcccgccctgaacgacagccggtactgcctgagcagcagactgagagtgtccgccaccttctggcagaacccccggaaccacttcagatgccaggtgcagttctacggcctgagcgagaacgacgagtggacccaggacagagccaagcccgtgacccagatcgtgtctgccgaagcctggggcagagccgattgcgacgtgaagctggtggaaaagagcttcgagacagacaccaacctgaacttccagaacctgagcgtgatcggcttcagaatcctgctgctgaaagtggccggctttaacctgctgatgaccctgcggctgtggtccagcagggccaagcgatctggatctggagcaacaaacttctcactactcaaacaagcaggtgacgtggaggagaatcccgggcctactagtaccatggactggatttggcgcatccttttccttgtcggcgctgctaccggcgcccattccctgttcaatcaagaggtgcagatccctctgaccgagagctactgtggcccctgtcctaagaactggatctgctacaagaacaactgctaccagttcttcgacgagagcaagaattggtacgagagccaggccagctgcatgagccagaatgccagcctgctgaaggtgtacagcaaagaggaccaggacctgctgaaactggtcaagagcgcccactggatgggccttgtgcacatccccaccaatggctcttggcagtgggaggacggcagcattctgagccctaacctgctgaccatcatcgagatgcagaagggcgactgcgccctgtacgccagcagctttaagggctacatcgagaattgcagcaccccgaacacctacatctgtatgcagagaaccgtttctggcggaggcggctctggaggaggcggaagtggcggcggaggcgacctctttaatcaagaagtccagattccactcaccgaatcctactgcggaccttgtccaaaaaattggatttgttataagaacaactgttatcaattctttgatgagtctaaaaattggtatgagtcccaggcttcctgcatgtctcagaacgcttctctgctgaaagtctactctaaagaagatcaggatctcctgaagctcgtcaagtctgcccattggatggggctcgtccacattcctaccaacggaagctggcaatgggaagatggctccatcctgtctccaaatctgctcacgattattgaaatgcagaaaggggattgtgctctctacgccagctccttcaagggatatattgagaactgtagcacgcccaatacttatatctgtatgcaacggaccgtgggatccggcggcggaggatctggcggaggcggatctgggggcggaggctctttcgaagaagtgcagctggttgaatcaggcggaggactggttcagcctggcggatctctgagactgtcttgtgccgccagcggctacaccttcagcagctactggatgaactgggtccgacaggcccctggcaaaggactggaatgggtcggaatgatcgaccccagcgacagcgagacacactacaaccacatcttcaaggaccgcttcaccatcagcgccgacaccagcaagaataccgcctacctccagatgaactccctgagagccgaggacaccgccgtgtactactgcgccagaaacctgtatctgtggggccagggaaccctggtcacagtgtcatctacgcgtatccagaaccctgatcctgccgtgtaccagctgcgggatagcaagagcagcgacaagagcgtgtgtctgttcaccgacttcgacagccagaccaacgtgtcccagagcaaggactccgacgtgtacatcaccgataagtgcgtgctggacatgcggagcatggacttcaagagcaactccgccgtggcctggtccaacaagtccgatttcgcctgcgccaacgccttcaacaacagcattatccccgaggacacattcttcccaagccccgagagcagctgcggctttaccagcgagagctaccagcagggcgtgctgagcgccaccatcctgtacgagatcctgctgggcaaggccaccctgtacgccgtgctggtgtctgccctggtgctgatggctatggtcaagcggaaggacagccggggacgcgccaagagaagcggatctggcgtgaagcagaccctgaatttcgacctgctgaagctggctggcgacgtggaatccaacccaggcccttctagaggccatatgaccgagtacaagcccacggtgcgcctcgccacccgcgacgacgtccccagggccgtacgcaccctcgccgccgcgttcgccgactaccccgccacgcgccacaccgtcgatccggaccgccacatcgagcgggtcaccgagctgcaagaactcttcctcacgcgcgtcgggctcgacatcggcaaggtgtgggtcgcggacgacggcgccgcggtggcggtctggaccacgccggagagcgtcgaagcgggggcggtgttcgccgagatcggcccgcgcatggccgagttgagcggttcccggctggccgcgcagcaacagatggaaggcctcctggcgccgcaccggcccaaggagcccgcgtggttcctggccaccgtcggcgtctcgcccgaccaccagggcaagggtctgggcagcgccgtcgtgctccccggagtggaggcggccgagcgcgccggggtgcccgccttcctggagacctccgcgccccgcaacctccccttctacgagcggctcggcttcaccgtcaccgccgacgtcgaggtgcccgaaggaccgcgcacctggtgcatgacccgcaagcccggtgcctga

SEQ ID NO: 36928 - DNA, 1857 bp, synthetic construct
  source 1..1857: mol_type = other DNA
atggccttaccagtgaccgccttgctcctgccgctggccttgctgctccacgccgccaggccggacatccagatgacacagagccctagcagcctgtctgccagcgtgggagacagagtgaccatcacatgcaagagcagccagagcctgctggactccgatggcaagacctacctgaactggtatcagcagaagcccggcaaggcccctaagctgctgatctacctggtgtccaagctggatagcggcgtgcccagcagattttctggcagcggcagcggaaccgacttcaccctgacaatatccagcctccagcctgaggacttcgccacctactactgctggcaaggcacccactttccattcaccttcggccagggcaccaaggtggaaatcaaaagactcgaggacctgaagaacgtgttcccacctgaggtggccgtgttcgagcctagcgaggccgagatcagccacacccagaaagccaccctcgtgtgcctggctaccggcttctaccccgaccatgtggaactgtcttggtgggtcaacggcaaagaggtgcacagcggcgtgtgtaccgacccccagccactgaaagaacagcccgccctgaacgacagccggtactgcctgagcagcagactgagagtgtccgccaccttctggcagaacccccggaaccacttcagatgccaggtgcagttctacggcctgagcgagaacgacgagtggacccaggacagagccaagcccgtgacccagatcgtgtctgccgaagcctggggcagagccgattgcggctttaccagcgagagctaccagcagggcgtgctgagcgccaccaacctgagcgtgatcggcttcagaatcctgctgctgaaagtggccggctttaacctgctgatgaccctgcggctgtggtccagcagggccaagcgatctggatctggagcaacaaacttctcactactcaaacaagcaggtgacgtggaggagaatcccgggcctactagtatggactggatttggcgcatccttttccttgtcggcgctgctaccggcgcgcattccttcgaagaagtgcagctggttgaatcaggcggaggactggttcagcctggcggatctctgagactgtcttgtgccgccagcggctacaccttcagcagctactggatgaactgggtccgacaggcccctggcaaaggactggaatgggtcggaatgatcgaccccagcgacagcgagacacactacaaccacatcttcaaggaccgcttcaccatcagcgccgacaccagcaagaataccgcctacctccagatgaactccctgagagccgaggacaccgccgtgtactactgcgccagaaacctgtatctgtggggccagggaaccctggtcacagtgtcatctacgcgtatccagaaccctgatcctgccgtgtaccagctgcgggatagcaagagcagcgacaagagcgtgtgtctgttcaccgacttcgacagccagaccaacgtgtcccagagcaaggactccgacgtgtacatcaccgataagtgcgtgctggacatgcggagcatggacttcaagagcaactccgccgtggcctggtccaacaagtccgatttcgcctgcgccaacgccttcaacaacagcattatccccgaggacacattcttcccaagccccgagagcagctgcgacgtgaagctggtggaaaagagcttcgagacagacaccaacctgaacttccagatcctgtacgagatcctgctgggcaaggccaccctgtacgccgtgctggtgtctgccctggtgctgatggctatggtcaagcggaaggacagccgggga

SEQ ID NO: 36929 - DNA, 1869 bp, synthetic construct
  source 1..1869: mol_type = other DNA
atggccttaccagtgaccgccttgctcctgccgctggccttgctgctccacgccgccaggccggacatccagatgacacagagccctagcagcctgtctgccagcgtgggagacagagtgaccatcacatgcaagagcagccagagcctgctggactccgatggcaagacctacctgaactggtatcagcagaagcccggcaaggcccctaagctgctgatctacctggtgtccaagctggatagcggcgtgcccagcagattttctggcagcggcagcggaaccgacttcaccctgacaatatccagcctccagcctgaggacttcgccacctactactgctggcaaggcacccactttccattcaccttcggccagggcaccaaggtggaaatcaaaagactcgagatccagaaccctgatcctgccgtgtaccagctgcgggatagcaagagcagcgacaagagcgtgtgtctgttcaccgacttcgacagccagaccaacgtgtcccagagcaaggactccgacgtgtacatcaccgataagtgcgtgctggacatgcggagcatggacttcaagagcaactccgccgtggcctggtccaacaagtccgatttcgcctgcgccaacgccttcaacaacagcattatccccgaggacacattcttcccaagccccgagagcagctgcgacgtgaagctggtggaaaagagcttcgagacagacaccaacctgaacttccagatcctgtacgagatcctgctgggcaaggccaccctgtacgccgtgctggtgtctgccctggtgctgatggctatggtcaagcggaaggacagccggggacgcgccaagagaagcggatctggcgtgaagcagaccctgaatttcgacctgctgaagctggctggcgacgtggaatccaacccaggccctactagtatggactggatttggcgcatccttttccttgtcggcgctgctaccggcgcgcattccttcgaagaagtgcagctggttgaatcaggcggaggactggttcagcctggcggatctctgagactgtcttgtgccgccagcggctacaccttcagcagctactggatgaactgggtccgacaggcccctggcaaaggactggaatgggtcggaatgatcgaccccagcgacagcgagacacactacaaccacatcttcaaggaccgcttcaccatcagcgccgacaccagcaagaataccgcctacctccagatgaactccctgagagccgaggacaccgccgtgtactactgcgccagaaacctgtatctgtggggccagggaaccctggtcacagtgtcatctacgcgtgaggacctgaagaacgtgttcccacctgaggtggccgtgttcgagcctagcgaggccgagatcagccacacccagaaagccaccctcgtgtgcctggctaccggcttctaccccgaccatgtggaactgtcttggtgggtcaacggcaaagaggtgcacagcggcgtgtgtaccgacccccagccactgaaagaacagcccgccctgaacgacagccggtactgcctgagcagcagactgagagtgtccgccaccttctggcagaacccccggaaccacttcagatgccaggtgcagttctacggcctgagcgagaacgacgagtggacccaggacagagccaagcccgtgacccagatcgtgtctgccgaagcctggggcagagccgattgcggctttaccagcgagagctaccagcagggcgtgctgagcgccaccaacctgagcgtgatcggcttcagaatcctgctgctgaaagtggccggctttaacctgctgatgaccctgcggctgtggtccagc

SEQ ID NO: 36930 - DNA, 2262 bp, synthetic construct
  source 1..2262: mol_type = other DNA
atggccttaccagtgaccgccttgctcctgccgctggccttgctgctccacgccgccaggccggaagtgcagctggttgaatctggcggaggactggttcagcctggcggatctctgagactgtcttgtgccgccagcggcttcagcttcagcgacttttggatgagctgggtccgacaggcccctggcaaaggacttgaatgggtcgccacaatcagccaggccggcagcgagaaggactacgtggactctgtgaagggcagattcaccatcagccgggacaacgccaagaagtccctgtacctccagatgaacagcctgagagccgaggacaccgccgtgtactattgtgcctctggcgtgtacagcttcgactacagaggccagggcaccctggtcacagtctcttctggtaccggcggaggcggatctggcggcggaggtagcggtggcggaggatctgaattcgacatccagatgacacagagccctagcagcctgtctgccagcgtgggagacagagtgaccatcacatgcaagagcagccagagcctgctggactccgatggcaagacctacctgaactggtatcagcagaagcccggcaaggcccctaagctgctgatctacctggtgtccaagctggatagcggcgtgcccagcagattttctggcagcggcagcggaaccgacttcaccctgacaatatccagcctccagcctgaggacttcgccacctactactgctggcaaggcacccactttccattcaccttcggccagggcaccaaggtggaaatcaaaagactcgaggacctgaagaacgtgttcccacctgaggtggccgtgttcgagcctagcgaggccgagatcagccacacccagaaagccaccctcgtgtgcctggctaccggcttctaccccgaccatgtggaactgtcttggtgggtcaacggcaaagaggtgcacagcggcgtgtgtaccgacccccagccactgaaagaacagcccgccctgaacgacagccggtactgcctgagcagcagactgagagtgtccgccaccttctggcagaacccccggaaccacttcagatgccaggtgcagttctacggcctgagcgagaacgacgagtggacccaggacagagccaagcccgtgacccagatcgtgtctgccgaagcctggggcagagccgattgcggctttaccagcgagagctaccagcagggcgtgctgagcgccaccaacctgagcgtgatcggcttcagaatcctgctgctgaaagtggccggctttaacctgctgatgaccctgcggctgtggtccagcagggccaagcgatctggatctggagcaacaaacttctcactactcaaacaagcaggtgacgtggaggagaatcccgggcctactagtatggactggatttggcgcatccttttccttgtcggcgctgctaccggcgcgcattccttcgaagaagtgcagctggttgaatcaggcggaggactggttcagcctggcggatctctgagactgtcttgtgccgccagcggctacaccttcagcagctactggatgaactgggtccgacaggcccctggcaaaggactggaatgggtcggaatgatcgaccccagcgacagcgagacacactacaaccacatcttcaaggaccgcttcaccatcagcgccgacaccagcaagaataccgcctacctccagatgaactccctgagagccgaggacaccgccgtgtactactgcgccagaaacctgtatctgtggggccagggaaccctggtcacagtgtcatctacgcgtatccagaaccctgatcctgccgtgtaccagctgcgggatagcaagagcagcgacaagagcgtgtgtctgttcaccgacttcgacagccagaccaacgtgtcccagagcaaggactccgacgtgtacatcaccgataagtgcgtgctggacatgcggagcatggacttcaagagcaactccgccgtggcctggtccaacaagtccgatttcgcctgcgccaacgccttcaacaacagcattatccccgaggacacattcttcccaagccccgagagcagctgcgacgtgaagctggtggaaaagagcttcgagacagacaccaacctgaacttccagatcctgtacgagatcctgctgggcaaggccaccctgtacgccgtgctggtgtctgccctggtgctgatggctatggtcaagcggaaggacagccgggga

SEQ ID NO: 36931 - DNA, 2274 bp, synthetic construct
  source 1..2274: mol_type = other DNA
atggccttaccagtgaccgccttgctcctgccgctggccttgctgctccacgccgccaggccggaagtgcagctggttgaatctggcggaggactggttcagcctggcggatctctgagactgtcttgtgccgccagcggcttcagcttcagcgacttttggatgagctgggtccgacaggcccctggcaaaggacttgaatgggtcgccacaatcagccaggccggcagcgagaaggactacgtggactctgtgaagggcagattcaccatcagccgggacaacgccaagaagtccctgtacctccagatgaacagcctgagagccgaggacaccgccgtgtactattgtgcctctggcgtgtacagcttcgactacagaggccagggcaccctggtcacagtctcttctggtaccggcggaggcggatctggcggcggaggtagcggtggcggaggatctgaattcgacatccagatgacacagagccctagcagcctgtctgccagcgtgggagacagagtgaccatcacatgcaagagcagccagagcctgctggactccgatggcaagacctacctgaactggtatcagcagaagcccggcaaggcccctaagctgctgatctacctggtgtccaagctggatagcggcgtgcccagcagattttctggcagcggcagcggaaccgacttcaccctgacaatatccagcctccagcctgaggacttcgccacctactactgctggcaaggcacccactttccattcaccttcggccagggcaccaaggtggaaatcaaaagactcgagatccagaaccctgatcctgccgtgtaccagctgcgggatagcaagagcagcgacaagagcgtgtgtctgttcaccgacttcgacagccagaccaacgtgtcccagagcaaggactccgacgtgtacatcaccgataagtgcgtgctggacatgcggagcatggacttcaagagcaactccgccgtggcctggtccaacaagtccgatttcgcctgcgccaacgccttcaacaacagcattatccccgaggacacattcttcccaagccccgagagcagctgcgacgtgaagctggtggaaaagagcttcgagacagacaccaacctgaacttccagatcctgtacgagatcctgctgggcaaggccaccctgtacgccgtgctggtgtctgccctggtgctgatggctatggtcaagcggaaggacagccggggacgcgccaagagaagcggatctggcgtgaagcagaccctgaatttcgacctgctgaagctggctggcgacgtggaatccaacccaggccctactagtatggactggatttggcgcatccttttccttgtcggcgctgctaccggcgcgcattccttcgaagaagtgcagctggttgaatcaggcggaggactggttcagcctggcggatctctgagactgtcttgtgccgccagcggctacaccttcagcagctactggatgaactgggtccgacaggcccctggcaaaggactggaatgggtcggaatgatcgaccccagcgacagcgagacacactacaaccacatcttcaaggaccgcttcaccatcagcgccgacaccagcaagaataccgcctacctccagatgaactccctgagagccgaggacaccgccgtgtactactgcgccagaaacctgtatctgtggggccagggaaccctggtcacagtgtcatctacgcgtgaggacctgaagaacgtgttcccacctgaggtggccgtgttcgagcctagcgaggccgagatcagccacacccagaaagccaccctcgtgtgcctggctaccggcttctaccccgaccatgtggaactgtcttggtgggtcaacggcaaagaggtgcacagcggcgtgtgtaccgacccccagccactgaaagaacagcccgccctgaacgacagccggtactgcctgagcagcagactgagagtgtccgccaccttctggcagaacccccggaaccacttcagatgccaggtgcagttctacggcctgagcgagaacgacgagtggacccaggacagagccaagcccgtgacccagatcgtgtctgccgaagcctggggcagagccgattgcggctttaccagcgagagctaccagcagggcgtgctgagcgccaccaacctgagcgtgatcggcttcagaatcctgctgctgaaagtggccggctttaacctgctgatgaccctgcggctgtggtccagc

SEQ ID NO: 36932 - DNA, 2673 bp, synthetic construct
  source 1..2673: mol_type = other DNA
atggccttaccagtgaccgccttgctcctgccgctggccttgctgctccacgccgccaggccggaagtgcagctggttgaatctggcggaggactggttcagcctggcggatctctgagactgtcttgtgccgccagcggcttcagcttcagcgacttttggatgagctgggtccgacaggcccctggcaaaggacttgaatgggtcgccacaatcagccaggccggcagcgagaaggactacgtggactctgtgaagggcagattcaccatcagccgggacaacgccaagaagtccctgtacctccagatgaacagcctgagagccgaggacaccgccgtgtactattgtgcctctggcgtgtacagcttcgactacagaggccagggcaccctggtcacagtctcttctggtaccggcggaggcggatctggcggcggaggtagcggtggcggaggatctgaattcgacatccagatgacacagagccctagcagcctgtctgccagcgtgggagacagagtgaccatcacatgcaagagcagccagagcctgctggactccgatggcaagacctacctgaactggtatcagcagaagcccggcaaggcccctaagctgctgatctacctggtgtccaagctggatagcggcgtgcccagcagattttctggcagcggcagcggaaccgacttcaccctgacaatatccagcctccagcctgaggacttcgccacctactactgctggcaaggcacccactttccattcaccttcggccagggcaccaaggtggaaatcaaaagactcgaggacctgaagaacgtgttcccacctgaggtggccgtgttcgagcctagcgaggccgagatcagccacacccagaaagccaccctcgtgtgcctggctaccggcttctaccccgaccatgtggaactgtcttggtgggtcaacggcaaagaggtgcacagcggcgtgtgtaccgacccccagccactgaaagaacagcccgccctgaacgacagccggtactgcctgagcagcagactgagagtgtccgccaccttctggcagaacccccggaaccacttcagatgccaggtgcagttctacggcctgagcgagaacgacgagtggacccaggacagagccaagcccgtgacccagatcgtgtctgccgaagcctggggcagagccgattgcggctttaccagcgagagctaccagcagggcgtgctgagcgccaccaacctgagcgtgatcggcttcagaatcctgctgctgaaagtggccggctttaacctgctgatgaccctgcggctgtggtccagcagggccaagcgatctggatctggagcaacaaacttctcactactcaaacaagcaggtgacgtggaggagaatcccgggcctactagtatggactggatttggcgcatccttttccttgtcggcgctgctaccggcgcgcattccgggccccagctccagctgcaagagtctggacctggcctggtcaagcctagcgagacactgagcctgacctgtaccgtgtccggcgatagcatcagcagcggcgattactactggggctggatcagacagcctcctggcaaaggactggaatggatcggccacatctactacagcggcgtgacctactacaaccccagcctgaagtccagagtgaccatcagcgtggacaccagccggaaccagttctccctgaagctgtctagcgtgacagccgccgataccgccgtgtactactgcaccagagaggacagcagcaactggcggagtagaggccagggaacactggtcacagttagctctggatccggcggaggcggaagtggaggcggaggatctggcggcggaggctctttcgaagaagtgcagctggttgaatcaggcggaggactggttcagcctggcggatctctgagactgtcttgtgccgccagcggctacaccttcagcagctactggatgaactgggtccgacaggcccctggcaaaggactggaatgggtcggaatgatcgaccccagcgacagcgagacacactacaaccacatcttcaaggaccgcttcaccatcagcgccgacaccagcaagaataccgcctacctccagatgaactccctgagagccgaggacaccgccgtgtactactgcgccagaaacctgtatctgtggggccagggaaccctggtcacagtgtcatctacgcgtatccagaaccctgatcctgccgtgtaccagctgcgggatagcaagagcagcgacaagagcgtgtgtctgttcaccgacttcgacagccagaccaacgtgtcccagagcaaggactccgacgtgtacatcaccgataagtgcgtgctggacatgcggagcatggacttcaagagcaactccgccgtggcctggtccaacaagtccgatttcgcctgcgccaacgccttcaacaacagcattatccccgaggacacattcttcccaagccccgagagcagctgcgacgtgaagctggtggaaaagagcttcgagacagacaccaacctgaacttccagatcctgtacgagatcctgctgggcaaggccaccctgtacgccgtgctggtgtctgccctggtgctgatggctatggtcaagcggaaggacagccgggga

SEQ ID NO: 36933 - DNA, 2685 bp, synthetic construct
  source 1..2685: mol_type = other DNA
atggccttaccagtgaccgccttgctcctgccgctggccttgctgctccacgccgccaggccggaagtgcagctggttgaatctggcggaggactggttcagcctggcggatctctgagactgtcttgtgccgccagcggcttcagcttcagcgacttttggatgagctgggtccgacaggcccctggcaaaggacttgaatgggtcgccacaatcagccaggccggcagcgagaaggactacgtggactctgtgaagggcagattcaccatcagccgggacaacgccaagaagtccctgtacctccagatgaacagcctgagagccgaggacaccgccgtgtactattgtgcctctggcgtgtacagcttcgactacagaggccagggcaccctggtcacagtctcttctggtaccggcggaggcggatctggcggcggaggtagcggtggcggaggatctgaattcgacatccagatgacacagagccctagcagcctgtctgccagcgtgggagacagagtgaccatcacatgcaagagcagccagagcctgctggactccgatggcaagacctacctgaactggtatcagcagaagcccggcaaggcccctaagctgctgatctacctggtgtccaagctggatagcggcgtgcccagcagattttctggcagcggcagcggaaccgacttcaccctgacaatatccagcctccagcctgaggacttcgccacctactactgctggcaaggcacccactttccattcaccttcggccagggcaccaaggtggaaatcaaaagactcgagatccagaaccctgatcctgccgtgtaccagctgcgggatagcaagagcagcgacaagagcgtgtgtctgttcaccgacttcgacagccagaccaacgtgtcccagagcaaggactccgacgtgtacatcaccgataagtgcgtgctggacatgcggagcatggacttcaagagcaactccgccgtggcctggtccaacaagtccgatttcgcctgcgccaacgccttcaacaacagcattatccccgaggacacattcttcccaagccccgagagcagctgcgacgtgaagctggtggaaaagagcttcgagacagacaccaacctgaacttccagatcctgtacgagatcctgctgggcaaggccaccctgtacgccgtgctggtgtctgccctggtgctgatggctatggtcaagcggaaggacagccggggacgcgccaagagaagcggatctggcgtgaagcagaccctgaatttcgacctgctgaagctggctggcgacgtggaatccaacccaggccctactagtatggactggatttggcgcatccttttccttgtcggcgctgctaccggcgcgcattccgggccccagctccagctgcaagagtctggacctggcctggtcaagcctagcgagacactgagcctgacctgtaccgtgtccggcgatagcatcagcagcggcgattactactggggctggatcagacagcctcctggcaaaggactggaatggatcggccacatctactacagcggcgtgacctactacaaccccagcctgaagtccagagtgaccatcagcgtggacaccagccggaaccagttctccctgaagctgtctagcgtgacagccgccgataccgccgtgtactactgcaccagagaggacagcagcaactggcggagtagaggccagggaacactggtcacagttagctctggatccggcggaggcggaagtggaggcggaggatctggcggcggaggctctttcgaagaagtgcagctggttgaatcaggcggaggactggttcagcctggcggatctctgagactgtcttgtgccgccagcggctacaccttcagcagctactggatgaactgggtccgacaggcccctggcaaaggactggaatgggtcggaatgatcgaccccagcgacagcgagacacactacaaccacatcttcaaggaccgcttcaccatcagcgccgacaccagcaagaataccgcctacctccagatgaactccctgagagccgaggacaccgccgtgtactactgcgccagaaacctgtatctgtggggccagggaaccctggtcacagtgtcatctacgcgtgaggacctgaagaacgtgttcccacctgaggtggccgtgttcgagcctagcgaggccgagatcagccacacccagaaagccaccctcgtgtgcctggctaccggcttctaccccgaccatgtggaactgtcttggtgggtcaacggcaaagaggtgcacagcggcgtgtgtaccgacccccagccactgaaagaacagcccgccctgaacgacagccggtactgcctgagcagcagactgagagtgtccgccaccttctggcagaacccccggaaccacttcagatgccaggtgcagttctacggcctgagcgagaacgacgagtggacccaggacagagccaagcccgtgacccagatcgtgtctgccgaagcctggggcagagccgattgcggctttaccagcgagagctaccagcagggcgtgctgagcgccaccaacctgagcgtgatcggcttcagaatcctgctgctgaaagtggccggctttaacctgctgatgaccctgcggctgtggtccagc

SEQ ID NO: 36934 - DNA, 2169 bp, synthetic construct
  source 1..2169: mol_type = other DNA
atggccttaccagtgaccgccttgctcctgccgctggccttgctgctccacgccgccaggccggacatccagatgacacagagccctagcagcctgtctgccagcgtgggagacagagtgaccatcacatgcaagagcagccagagcctgctggactccgatggcaagacctacctgaactggtatcagcagaagcccggcaaggcccctaagctgctgatctacctggtgtccaagctggatagcggcgtgcccagcagattttctggcagcggcagcggaaccgacttcaccctgacaatatccagcctccagcctgaggacttcgccacctactactgctggcaaggcacccactttccattcaccttcggccagggcaccaaggtggaaatcaaaagactcgaggacctgaagaacgtgttcccacctgaggtggccgtgttcgagcctagcgaggccgagatcagccacacccagaaagccaccctcgtgtgcctggctaccggcttctaccccgaccatgtggaactgtcttggtgggtcaacggcaaagaggtgcacagcggcgtgtgtaccgacccccagccactgaaagaacagcccgccctgaacgacagccggtactgcctgagcagcagactgagagtgtccgccaccttctggcagaacccccggaaccacttcagatgccaggtgcagttctacggcctgagcgagaacgacgagtggacccaggacagagccaagcccgtgacccagatcgtgtctgccgaagcctggggcagagccgatgatgtgattaagatccactggcaggaaaagaagtccaacaccatcctgggcagccaggaaggcaacaccatgaagaccaacgacacctacatgaagttcagctggctgaccgtgcccgagaagtccctggacaaagaacacagatgcatcgtgcggcacgaaaacaacaagaacggcgtggaccaggaaatcatcttcccacccatcaagaccgatgtgattacaatggaccccaaggacaactgctccaaggacgccaacgataccctgctgctccagctgaccaacaccagcgcctactacatgtacttgttgctgctgctgaagtccgtggtgtacttcgccatcatcacatgctgcctgctgatggctatggtcaagcggaaggacagccggggaagggccaagcgatctggatctggagcaacaaacttctcactactcaaacaagcaggtgacgtggaggagaatcccgggcctactagtatggactggatttggcgcatccttttccttgtcggcgctgctaccggcgcgcattccttcgaagaagtgcagctggttgaatcaggcggaggactggttcagcctggcggatctctgagactgtcttgtgccgccagcggctacaccttcagcagctactggatgaactgggtccgacaggcccctggcaaaggactggaatgggtcggaatgatcgaccccagcgacagcgagacacactacaaccacatcttcaaggaccgcttcaccatcagcgccgacaccagcaagaataccgcctacctccagatgaactccctgagagccgaggacaccgccgtgtactactgcgccagaaacctgtatctgtggggccagggaaccctggtcacagtgtcatctacgcgtatccagaaccctgatcctgccgtgtaccagctgcgggatagcaagagcagcgacaagagcgtgtgtctgttcaccgacttcgacagccagaccaacgtgtcccagagcaaggactccgacgtgtacatcaccgataagtgcgtgctggacatgcggagcatggacttcaagagcaactccgccgtggcctggtccaacaagtccgatttcgcctgcgccaacgccttcaacaacagcattatccccgaggacacattcttcccaagccccgagagcagcgactccaccgaccacgtgaagcccaaagagacagagaacaccaagcagcccagcaagagctgccacaagcccaaggccatcgtgcacaccgagaaagtgaacatgatgagcctgaccgtgctgggcctgcggatgctgttcgccaaaaccgtggccgtgaacttcctgctgaccgccaagctgttcttcctcctcaccgcc

SEQ ID NO: 36935 - DNA, 2181 bp, synthetic construct
  source 1..2181: mol_type = other DNA
atggccttaccagtgaccgccttgctcctgccgctggccttgctgctccacgccgccaggccggacatccagatgacacagagccctagcagcctgtctgccagcgtgggagacagagtgaccatcacatgcaagagcagccagagcctgctggactccgatggcaagacctacctgaactggtatcagcagaagcccggcaaggcccctaagctgctgatctacctggtgtccaagctggatagcggcgtgcccagcagattttctggcagcggcagcggaaccgacttcaccctgacaatatccagcctccagcctgaggacttcgccacctactactgctggcaaggcacccactttccattcaccttcggccagggcaccaaggtggaaatcaaaagactcgagatccagaaccctgatcctgccgtgtaccagctgcgggatagcaagagcagcgacaagagcgtgtgtctgttcaccgacttcgacagccagaccaacgtgtcccagagcaaggactccgacgtgtacatcaccgataagtgcgtgctggacatgcggagcatggacttcaagagcaactccgccgtggcctggtccaacaagtccgatttcgcctgcgccaacgccttcaacaacagcattatccccgaggacacattcttcccaagccccgagagcagcgactccaccgaccacgtgaagcccaaagagacagagaacaccaagcagcccagcaagagctgccacaagcccaaggccatcgtgcacaccgagaaagtgaacatgatgagcctgaccgtgctgggcctgcggatgctgttcgccaaaaccgtggccgtgaacttcctgctgaccgccaagctgttcttcctcctcaccgcccgcgccaagagaagcggatctggcgtgaagcagaccctgaatttcgacctgctgaagctggctggcgacgtggaatccaacccaggccctactagtatggactggatttggcgcatccttttccttgtcggcgctgctaccggcgcgcattccttcgaagaagtgcagctggttgaatcaggcggaggactggttcagcctggcggatctctgagactgtcttgtgccgccagcggctacaccttcagcagctactggatgaactgggtccgacaggcccctggcaaaggactggaatgggtcggaatgatcgaccccagcgacagcgagacacactacaaccacatcttcaaggaccgcttcaccatcagcgccgacaccagcaagaataccgcctacctccagatgaactccctgagagccgaggacaccgccgtgtactactgcgccagaaacctgtatctgtggggccagggaaccctggtcacagtgtcatctacgcgtgaggacctgaagaacgtgttcccacctgaggtggccgtgttcgagcctagcgaggccgagatcagccacacccagaaagccaccctcgtgtgcctggctaccggcttctaccccgaccatgtggaactgtcttggtgggtcaacggcaaagaggtgcacagcggcgtgtgtaccgacccccagccactgaaagaacagcccgccctgaacgacagccggtactgcctgagcagcagactgagagtgtccgccaccttctggcagaacccccggaaccacttcagatgccaggtgcagttctacggcctgagcgagaacgacgagtggacccaggacagagccaagcccgtgacccagatcgtgtctgccgaagcctggggcagagccgatgatgtgattaagatccactggcaggaaaagaagtccaacaccatcctgggcagccaggaaggcaacaccatgaagaccaacgacacctacatgaagttcagctggctgaccgtgcccgagaagtccctggacaaagaacacagatgcatcgtgcggcacgaaaacaacaagaacggcgtggaccaggaaatcatcttcccacccatcaagaccgatgtgattacaatggaccccaaggacaactgctccaaggacgccaacgataccctgctgctccagctgaccaacaccagcgcctactacatgtacttgttgctgctgctgaagtccgtggtgtacttcgccatcatcacatgctgcctgctgatggctatggtcaagcggaaggacagccgggga

SEQ ID NO: 36936 - DNA, 2574 bp, synthetic construct
  source 1..2574: mol_type = other DNA
atggccttaccagtgaccgccttgctcctgccgctggccttgctgctccacgccgccaggccggaagtgcagctggttgaatctggcggaggactggttcagcctggcggatctctgagactgtcttgtgccgccagcggcttcagcttcagcgacttttggatgagctgggtccgacaggcccctggcaaaggacttgaatgggtcgccacaatcagccaggccggcagcgagaaggactacgtggactctgtgaagggcagattcaccatcagccgggacaacgccaagaagtccctgtacctccagatgaacagcctgagagccgaggacaccgccgtgtactattgtgcctctggcgtgtacagcttcgactacagaggccagggcaccctggtcacagtctcttctggtaccggcggaggcggatctggcggcggaggtagcggtggcggaggatctgaattcgacatccagatgacacagagccctagcagcctgtctgccagcgtgggagacagagtgaccatcacatgcaagagcagccagagcctgctggactccgatggcaagacctacctgaactggtatcagcagaagcccggcaaggcccctaagctgctgatctacctggtgtccaagctggatagcggcgtgcccagcagattttctggcagcggcagcggaaccgacttcaccctgacaatatccagcctccagcctgaggacttcgccacctactactgctggcaaggcacccactttccattcaccttcggccagggcaccaaggtggaaatcaaaagactcgaggacctgaagaacgtgttcccacctgaggtggccgtgttcgagcctagcgaggccgagatcagccacacccagaaagccaccctcgtgtgcctggctaccggcttctaccccgaccatgtggaactgtcttggtgggtcaacggcaaagaggtgcacagcggcgtgtgtaccgacccccagccactgaaagaacagcccgccctgaacgacagccggtactgcctgagcagcagactgagagtgtccgccaccttctggcagaacccccggaaccacttcagatgccaggtgcagttctacggcctgagcgagaacgacgagtggacccaggacagagccaagcccgtgacccagatcgtgtctgccgaagcctggggcagagccgatgatgtgattaagatccactggcaggaaaagaagtccaacaccatcctgggcagccaggaaggcaacaccatgaagaccaacgacacctacatgaagttcagctggctgaccgtgcccgagaagtccctggacaaagaacacagatgcatcgtgcggcacgaaaacaacaagaacggcgtggaccaggaaatcatcttcccacccatcaagaccgatgtgattacaatggaccccaaggacaactgctccaaggacgccaacgataccctgctgctccagctgaccaacaccagcgcctactacatgtacttgttgctgctgctgaagtccgtggtgtacttcgccatcatcacatgctgcctgctgatggctatggtcaagcggaaggacagccggggaagggccaagcgatctggatctggagcaacaaacttctcactactcaaacaagcaggtgacgtggaggagaatcccgggcctactagtatggactggatttggcgcatccttttccttgtcggcgctgctaccggcgcgcattccttcgaagaagtgcagctggttgaatcaggcggaggactggttcagcctggcggatctctgagactgtcttgtgccgccagcggctacaccttcagcagctactggatgaactgggtccgacaggcccctggcaaaggactggaatgggtcggaatgatcgaccccagcgacagcgagacacactacaaccacatcttcaaggaccgcttcaccatcagcgccgacaccagcaagaataccgcctacctccagatgaactccctgagagccgaggacaccgccgtgtactactgcgccagaaacctgtatctgtggggccagggaaccctggtcacagtgtcatctacgcgtatccagaaccctgatcctgccgtgtaccagctgcgggatagcaagagcagcgacaagagcgtgtgtctgttcaccgacttcgacagccagaccaacgtgtcccagagcaaggactccgacgtgtacatcaccgataagtgcgtgctggacatgcggagcatggacttcaagagcaactccgccgtggcctggtccaacaagtccgatttcgcctgcgccaacgccttcaacaacagcattatccccgaggacacattcttcccaagccccgagagcagcgactccaccgaccacgtgaagcccaaagagacagagaacaccaagcagcccagcaagagctgccacaagcccaaggccatcgtgcacaccgagaaagtgaacatgatgagcctgaccgtgctgggcctgcggatgctgttcgccaaaaccgtggccgtgaacttcctgctgaccgccaagctgttcttcctcctcaccgcc

SEQ ID NO: 36937 - DNA, 2586 bp, synthetic construct
  source 1..2586: mol_type = other DNA
atggccttaccagtgaccgccttgctcctgccgctggccttgctgctccacgccgccaggccggaagtgcagctggttgaatctggcggaggactggttcagcctggcggatctctgagactgtcttgtgccgccagcggcttcagcttcagcgacttttggatgagctgggtccgacaggcccctggcaaaggacttgaatgggtcgccacaatcagccaggccggcagcgagaaggactacgtggactctgtgaagggcagattcaccatcagccgggacaacgccaagaagtccctgtacctccagatgaacagcctgagagccgaggacaccgccgtgtactattgtgcctctggcgtgtacagcttcgactacagaggccagggcaccctggtcacagtctcttctggtaccggcggaggcggatctggcggcggaggtagcggtggcggaggatctgaattcgacatccagatgacacagagccctagcagcctgtctgccagcgtgggagacagagtgaccatcacatgcaagagcagccagagcctgctggactccgatggcaagacctacctgaactggtatcagcagaagcccggcaaggcccctaagctgctgatctacctggtgtccaagctggatagcggcgtgcccagcagattttctggcagcggcagcggaaccgacttcaccctgacaatatccagcctccagcctgaggacttcgccacctactactgctggcaaggcacccactttccattcaccttcggccagggcaccaaggtggaaatcaaaagactcgagatccagaaccctgatcctgccgtgtaccagctgcgggatagcaagagcagcgacaagagcgtgtgtctgttcaccgacttcgacagccagaccaacgtgtcccagagcaaggactccgacgtgtacatcaccgataagtgcgtgctggacatgcggagcatggacttcaagagcaactccgccgtggcctggtccaacaagtccgatttcgcctgcgccaacgccttcaacaacagcattatccccgaggacacattcttcccaagccccgagagcagcgactccaccgaccacgtgaagcccaaagagacagagaacaccaagcagcccagcaagagctgccacaagcccaaggccatcgtgcacaccgagaaagtgaacatgatgagcctgaccgtgctgggcctgcggatgctgttcgccaaaaccgtggccgtgaacttcctgctgaccgccaagctgttcttcctcctcaccgcccgcgccaagagaagcggatctggcgtgaagcagaccctgaatttcgacctgctgaagctggctggcgacgtggaatccaacccaggccctactagtatggactggatttggcgcatccttttccttgtcggcgctgctaccggcgcgcattccttcgaagaagtgcagctggttgaatcaggcggaggactggttcagcctggcggatctctgagactgtcttgtgccgccagcggctacaccttcagcagctactggatgaactgggtccgacaggcccctggcaaaggactggaatgggtcggaatgatcgaccccagcgacagcgagacacactacaaccacatcttcaaggaccgcttcaccatcagcgccgacaccagcaagaataccgcctacctccagatgaactccctgagagccgaggacaccgccgtgtactactgcgccagaaacctgtatctgtggggccagggaaccctggtcacagtgtcatctacgcgtgaggacctgaagaacgtgttcccacctgaggtggccgtgttcgagcctagcgaggccgagatcagccacacccagaaagccaccctcgtgtgcctggctaccggcttctaccccgaccatgtggaactgtcttggtgggtcaacggcaaagaggtgcacagcggcgtgtgtaccgacccccagccactgaaagaacagcccgccctgaacgacagccggtactgcctgagcagcagactgagagtgtccgccaccttctggcagaacccccggaaccacttcagatgccaggtgcagttctacggcctgagcgagaacgacgagtggacccaggacagagccaagcccgtgacccagatcgtgtctgccgaagcctggggcagagccgatgatgtgattaagatccactggcaggaaaagaagtccaacaccatcctgggcagccaggaaggcaacaccatgaagaccaacgacacctacatgaagttcagctggctgaccgtgcccgagaagtccctggacaaagaacacagatgcatcgtgcggcacgaaaacaacaagaacggcgtggaccaggaaatcatcttcccacccatcaagaccgatgtgattacaatggaccccaaggacaactgctccaaggacgccaacgataccctgctgctccagctgaccaacaccagcgcctactacatgtacttgttgctgctgctgaagtccgtggtgtacttcgccatcatcacatgctgcctgctgatggctatggtcaagcggaaggacagccgggga

SEQ ID NO: 36938 - DNA, 2985 bp, synthetic construct
  source 1..2985: mol_type = other DNA
atggccttaccagtgaccgccttgctcctgccgctggccttgctgctccacgccgccaggccggaagtgcagctggttgaatctggcggaggactggttcagcctggcggatctctgagactgtcttgtgccgccagcggcttcagcttcagcgacttttggatgagctgggtccgacaggcccctggcaaaggacttgaatgggtcgccacaatcagccaggccggcagcgagaaggactacgtggactctgtgaagggcagattcaccatcagccgggacaacgccaagaagtccctgtacctccagatgaacagcctgagagccgaggacaccgccgtgtactattgtgcctctggcgtgtacagcttcgactacagaggccagggcaccctggtcacagtctcttctggtaccggcggaggcggatctggcggcggaggtagcggtggcggaggatctgaattcgacatccagatgacacagagccctagcagcctgtctgccagcgtgggagacagagtgaccatcacatgcaagagcagccagagcctgctggactccgatggcaagacctacctgaactggtatcagcagaagcccggcaaggcccctaagctgctgatctacctggtgtccaagctggatagcggcgtgcccagcagattttctggcagcggcagcggaaccgacttcaccctgacaatatccagcctccagcctgaggacttcgccacctactactgctggcaaggcacccactttccattcaccttcggccagggcaccaaggtggaaatcaaaagactcgaggacctgaagaacgtgttcccacctgaggtggccgtgttcgagcctagcgaggccgagatcagccacacccagaaagccaccctcgtgtgcctggctaccggcttctaccccgaccatgtggaactgtcttggtgggtcaacggcaaagaggtgcacagcggcgtgtgtaccgacccccagccactgaaagaacagcccgccctgaacgacagccggtactgcctgagcagcagactgagagtgtccgccaccttctggcagaacccccggaaccacttcagatgccaggtgcagttctacggcctgagcgagaacgacgagtggacccaggacagagccaagcccgtgacccagatcgtgtctgccgaagcctggggcagagccgatgatgtgattaagatccactggcaggaaaagaagtccaacaccatcctgggcagccaggaaggcaacaccatgaagaccaacgacacctacatgaagttcagctggctgaccgtgcccgagaagtccctggacaaagaacacagatgcatcgtgcggcacgaaaacaacaagaacggcgtggaccaggaaatcatcttcccacccatcaagaccgatgtgattacaatggaccccaaggacaactgctccaaggacgccaacgataccctgctgctccagctgaccaacaccagcgcctactacatgtacttgttgctgctgctgaagtccgtggtgtacttcgccatcatcacatgctgcctgctgatggctatggtcaagcggaaggacagccggggaagggccaagcgatctggatctggagcaacaaacttctcactactcaaacaagcaggtgacgtggaggagaatcccgggcctactagtatggactggatttggcgcatccttttccttgtcggcgctgctaccggcgcgcattccgggccccagctccagctgcaagagtctggacctggcctggtcaagcctagcgagacactgagcctgacctgtaccgtgtccggcgatagcatcagcagcggcgattactactggggctggatcagacagcctcctggcaaaggactggaatggatcggccacatctactacagcggcgtgacctactacaaccccagcctgaagtccagagtgaccatcagcgtggacaccagccggaaccagttctccctgaagctgtctagcgtgacagccgccgataccgccgtgtactactgcaccagagaggacagcagcaactggcggagtagaggccagggaacactggtcacagttagctctggatccggcggaggcggaagtggaggcggaggatctggcggcggaggctctttcgaagaagtgcagctggttgaatcaggcggaggactggttcagcctggcggatctctgagactgtcttgtgccgccagcggctacaccttcagcagctactggatgaactgggtccgacaggcccctggcaaaggactggaatgggtcggaatgatcgaccccagcgacagcgagacacactacaaccacatcttcaaggaccgcttcaccatcagcgccgacaccagcaagaataccgcctacctccagatgaactccctgagagccgaggacaccgccgtgtactactgcgccagaaacctgtatctgtggggccagggaaccctggtcacagtgtcatctacgcgtatccagaaccctgatcctgccgtgtaccagctgcgggatagcaagagcagcgacaagagcgtgtgtctgttcaccgacttcgacagccagaccaacgtgtcccagagcaaggactccgacgtgtacatcaccgataagtgcgtgctggacatgcggagcatggacttcaagagcaactccgccgtggcctggtccaacaagtccgatttcgcctgcgccaacgccttcaacaacagcattatccccgaggacacattcttcccaagccccgagagcagcgactccaccgaccacgtgaagcccaaagagacagagaacaccaagcagcccagcaagagctgccacaagcccaaggccatcgtgcacaccgagaaagtgaacatgatgagcctgaccgtgctgggcctgcggatgctgttcgccaaaaccgtggccgtgaacttcctgctgaccgccaagctgttcttcctcctcaccgcc

SEQ ID NO: 36939 - DNA, 2997 bp, synthetic construct
  source 1..2997: mol_type = other DNA
atggccttaccagtgaccgccttgctcctgccgctggccttgctgctccacgccgccaggccggaagtgcagctggttgaatctggcggaggactggttcagcctggcggatctctgagactgtcttgtgccgccagcggcttcagcttcagcgacttttggatgagctgggtccgacaggcccctggcaaaggacttgaatgggtcgccacaatcagccaggccggcagcgagaaggactacgtggactctgtgaagggcagattcaccatcagccgggacaacgccaagaagtccctgtacctccagatgaacagcctgagagccgaggacaccgccgtgtactattgtgcctctggcgtgtacagcttcgactacagaggccagggcaccctggtcacagtctcttctggtaccggcggaggcggatctggcggcggaggtagcggtggcggaggatctgaattcgacatccagatgacacagagccctagcagcctgtctgccagcgtgggagacagagtgaccatcacatgcaagagcagccagagcctgctggactccgatggcaagacctacctgaactggtatcagcagaagcccggcaaggcccctaagctgctgatctacctggtgtccaagctggatagcggcgtgcccagcagattttctggcagcggcagcggaaccgacttcaccctgacaatatccagcctccagcctgaggacttcgccacctactactgctggcaaggcacccactttccattcaccttcggccagggcaccaaggtggaaatcaaaagactcgagatccagaaccctgatcctgccgtgtaccagctgcgggatagcaagagcagcgacaagagcgtgtgtctgttcaccgacttcgacagccagaccaacgtgtcccagagcaaggactccgacgtgtacatcaccgataagtgcgtgctggacatgcggagcatggacttcaagagcaactccgccgtggcctggtccaacaagtccgatttcgcctgcgccaacgccttcaacaacagcattatccccgaggacacattcttcccaagccccgagagcagcgactccaccgaccacgtgaagcccaaagagacagagaacaccaagcagcccagcaagagctgccacaagcccaaggccatcgtgcacaccgagaaagtgaacatgatgagcctgaccgtgctgggcctgcggatgctgttcgccaaaaccgtggccgtgaacttcctgctgaccgccaagctgttcttcctcctcaccgcccgcgccaagagaagcggatctggcgtgaagcagaccctgaatttcgacctgctgaagctggctggcgacgtggaatccaacccaggccctactagtatggactggatttggcgcatccttttccttgtcggcgctgctaccggcgcgcattccgggccccagctccagctgcaagagtctggacctggcctggtcaagcctagcgagacactgagcctgacctgtaccgtgtccggcgatagcatcagcagcggcgattactactggggctggatcagacagcctcctggcaaaggactggaatggatcggccacatctactacagcggcgtgacctactacaaccccagcctgaagtccagagtgaccatcagcgtggacaccagccggaaccagttctccctgaagctgtctagcgtgacagccgccgataccgccgtgtactactgcaccagagaggacagcagcaactggcggagtagaggccagggaacactggtcacagttagctctggatccggcggaggcggaagtggaggcggaggatctggcggcggaggctctttcgaagaagtgcagctggttgaatcaggcggaggactggttcagcctggcggatctctgagactgtcttgtgccgccagcggctacaccttcagcagctactggatgaactgggtccgacaggcccctggcaaaggactggaatgggtcggaatgatcgaccccagcgacagcgagacacactacaaccacatcttcaaggaccgcttcaccatcagcgccgacaccagcaagaataccgcctacctccagatgaactccctgagagccgaggacaccgccgtgtactactgcgccagaaacctgtatctgtggggccagggaaccctggtcacagtgtcatctacgcgtgaggacctgaagaacgtgttcccacctgaggtggccgtgttcgagcctagcgaggccgagatcagccacacccagaaagccaccctcgtgtgcctggctaccggcttctaccccgaccatgtggaactgtcttggtgggtcaacggcaaagaggtgcacagcggcgtgtgtaccgacccccagccactgaaagaacagcccgccctgaacgacagccggtactgcctgagcagcagactgagagtgtccgccaccttctggcagaacccccggaaccacttcagatgccaggtgcagttctacggcctgagcgagaacgacgagtggacccaggacagagccaagcccgtgacccagatcgtgtctgccgaagcctggggcagagccgatgatgtgattaagatccactggcaggaaaagaagtccaacaccatcctgggcagccaggaaggcaacaccatgaagaccaacgacacctacatgaagttcagctggctgaccgtgcccgagaagtccctggacaaagaacacagatgcatcgtgcggcacgaaaacaacaagaacggcgtggaccaggaaatcatcttcccacccatcaagaccgatgtgattacaatggaccccaaggacaactgctccaaggacgccaacgataccctgctgctccagctgaccaacaccagcgcctactacatgtacttgttgctgctgctgaagtccgtggtgtacttcgccatcatcacatgctgcctgctgatggctatggtcaagcggaaggacagccgggga

SEQ ID NO: 36940 - DNA, 2163 bp, synthetic construct
  source 1..2163: mol_type = other DNA
atggccttaccagtgaccgccttgctcctgccgctggccttgctgctccacgccgccaggccggacatccagatgacacagagccctagcagcctgtctgccagcgtgggagacagagtgaccatcacatgcaagagcagccagagcctgctggactccgatggcaagacctacctgaactggtatcagcagaagcccggcaaggcccctaagctgctgatctacctggtgtccaagctggatagcggcgtgcccagcagattttctggcagcggcagcggaaccgacttcaccctgacaatatccagcctccagcctgaggacttcgccacctactactgctggcaaggcacccactttccattcaccttcggccagggcaccaaggtggaaatcaaaagactcgaggacctgaagaacgtgttcccacctgaggtggccgtgttcgagcctagcgaggccgagatcagccacacccagaaagccaccctcgtgtgcctggctaccggcttctaccccgaccatgtggaactgtcttggtgggtcaacggcaaagaggtgcacagcggcgtgtgtaccgacccccagccactgaaagaacagcccgccctgaacgacagccggtactgcctgagcagcagactgagagtgtccgccaccttctggcagaacccccggaaccacttcagatgccaggtgcagttctacggcctgagcgagaacgacgagtggacccaggacagagccaagcccgtgacccagatcgtgtctgccgaagcctggggcagagccgatgatgtgattaagatccactggcaggaaaagaagtccaacaccatcctgggcagccaggaaggcaacaccatgaagaccaacgacacctacatgaagttcagctggctgaccgtgcccgagaagtccctggacaaagaacacagatgcatcgtgcggcacgaaaacaacaagaacggcgtggaccaggaaatcatcttcccacccatcaagaccgatgtgattacaatggaccccaaggacaactgctccaaggacgccaacgataccctgctgctccagctgaccaacaccagcgcctactacatgtacttgttgctgctgctgaagtccgtggtgtacttcgccatcatcacatgctgcctgctgcggagaaccgccttctgctgcaacggcgagaagtctagggccaagcgatctggatctggagcaacaaacttctcactactcaaacaagcaggtgacgtggaggagaatcccgggcctactagtatggactggatttggcgcatccttttccttgtcggcgctgctaccggcgcgcattccttcgaagaagtgcagctggttgaatcaggcggaggactggttcagcctggcggatctctgagactgtcttgtgccgccagcggctacaccttcagcagctactggatgaactgggtccgacaggcccctggcaaaggactggaatgggtcggaatgatcgaccccagcgacagcgagacacactacaaccacatcttcaaggaccgcttcaccatcagcgccgacaccagcaagaataccgcctacctccagatgaactccctgagagccgaggacaccgccgtgtactactgcgccagaaacctgtatctgtggggccagggaaccctggtcacagtgtcatctacgcgtatccagaaccctgatcctgccgtgtaccagctgcgggatagcaagagcagcgacaagagcgtgtgtctgttcaccgacttcgacagccagaccaacgtgtcccagagcaaggactccgacgtgtacatcaccgataagtgcgtgctggacatgcggagcatggacttcaagagcaactccgccgtggcctggtccaacaagtccgatttcgcctgcgccaacgccttcaacaacagcattatccccgaggacacattcttcccaagccccgagagcagcgactccaccgaccacgtgaagcccaaagagacagagaacaccaagcagcccagcaagagctgccacaagcccaaggccatcgtgcacaccgagaaagtgaacatgatgagcctgaccgtgctgggcctgcggatgctgttcgccaaaaccgtggccgtgaacttcctgctgaccgccaagctgttcttcctc

SEQ ID NO: 36941 - DNA, 2175 bp, synthetic construct
  source 1..2175: mol_type = other DNA
atggccttaccagtgaccgccttgctcctgccgctggccttgctgctccacgccgccaggccggacatccagatgacacagagccctagcagcctgtctgccagcgtgggagacagagtgaccatcacatgcaagagcagccagagcctgctggactccgatggcaagacctacctgaactggtatcagcagaagcccggcaaggcccctaagctgctgatctacctggtgtccaagctggatagcggcgtgcccagcagattttctggcagcggcagcggaaccgacttcaccctgacaatatccagcctccagcctgaggacttcgccacctactactgctggcaaggcacccactttccattcaccttcggccagggcaccaaggtggaaatcaaaagactcgagatccagaaccctgatcctgccgtgtaccagctgcgggatagcaagagcagcgacaagagcgtgtgtctgttcaccgacttcgacagccagaccaacgtgtcccagagcaaggactccgacgtgtacatcaccgataagtgcgtgctggacatgcggagcatggacttcaagagcaactccgccgtggcctggtccaacaagtccgatttcgcctgcgccaacgccttcaacaacagcattatccccgaggacacattcttcccaagccccgagagcagcgactccaccgaccacgtgaagcccaaagagacagagaacaccaagcagcccagcaagagctgccacaagcccaaggccatcgtgcacaccgagaaagtgaacatgatgagcctgaccgtgctgggcctgcggatgctgttcgccaaaaccgtggccgtgaacttcctgctgaccgccaagctgttcttcctccgcgccaagagaagcggatctggcgtgaagcagaccctgaatttcgacctgctgaagctggctggcgacgtggaatccaacccaggccctactagtatggactggatttggcgcatccttttccttgtcggcgctgctaccggcgcgcattccttcgaagaagtgcagctggttgaatcaggcggaggactggttcagcctggcggatctctgagactgtcttgtgccgccagcggctacaccttcagcagctactggatgaactgggtccgacaggcccctggcaaaggactggaatgggtcggaatgatcgaccccagcgacagcgagacacactacaaccacatcttcaaggaccgcttcaccatcagcgccgacaccagcaagaataccgcctacctccagatgaactccctgagagccgaggacaccgccgtgtactactgcgccagaaacctgtatctgtggggccagggaaccctggtcacagtgtcatctacgcgtgaggacctgaagaacgtgttcccacctgaggtggccgtgttcgagcctagcgaggccgagatcagccacacccagaaagccaccctcgtgtgcctggctaccggcttctaccccgaccatgtggaactgtcttggtgggtcaacggcaaagaggtgcacagcggcgtgtgtaccgacccccagccactgaaagaacagcccgccctgaacgacagccggtactgcctgagcagcagactgagagtgtccgccaccttctggcagaacccccggaaccacttcagatgccaggtgcagttctacggcctgagcgagaacgacgagtggacccaggacagagccaagcccgtgacccagatcgtgtctgccgaagcctggggcagagccgatgatgtgattaagatccactggcaggaaaagaagtccaacaccatcctgggcagccaggaaggcaacaccatgaagaccaacgacacctacatgaagttcagctggctgaccgtgcccgagaagtccctggacaaagaacacagatgcatcgtgcggcacgaaaacaacaagaacggcgtggaccaggaaatcatcttcccacccatcaagaccgatgtgattacaatggaccccaaggacaactgctccaaggacgccaacgataccctgctgctccagctgaccaacaccagcgcctactacatgtacttgttgctgctgctgaagtccgtggtgtacttcgccatcatcacatgctgcctgctgcggagaaccgccttctgctgcaacggcgagaagtct

SEQ ID NO: 36942 - DNA, 2568 bp, synthetic construct
  source 1..2568: mol_type = other DNA
atggccttaccagtgaccgccttgctcctgccgctggccttgctgctccacgccgccaggccggaagtgcagctggttgaatctggcggaggactggttcagcctggcggatctctgagactgtcttgtgccgccagcggcttcagcttcagcgacttttggatgagctgggtccgacaggcccctggcaaaggacttgaatgggtcgccacaatcagccaggccggcagcgagaaggactacgtggactctgtgaagggcagattcaccatcagccgggacaacgccaagaagtccctgtacctccagatgaacagcctgagagccgaggacaccgccgtgtactattgtgcctctggcgtgtacagcttcgactacagaggccagggcaccctggtcacagtctcttctggtaccggcggaggcggatctggcggcggaggtagcggtggcggaggatctgaattcgacatccagatgacacagagccctagcagcctgtctgccagcgtgggagacagagtgaccatcacatgcaagagcagccagagcctgctggactccgatggcaagacctacctgaactggtatcagcagaagcccggcaaggcccctaagctgctgatctacctggtgtccaagctggatagcggcgtgcccagcagattttctggcagcggcagcggaaccgacttcaccctgacaatatccagcctccagcctgaggacttcgccacctactactgctggcaaggcacccactttccattcaccttcggccagggcaccaaggtggaaatcaaaagactcgaggacctgaagaacgtgttcccacctgaggtggccgtgttcgagcctagcgaggccgagatcagccacacccagaaagccaccctcgtgtgcctggctaccggcttctaccccgaccatgtggaactgtcttggtgggtcaacggcaaagaggtgcacagcggcgtgtgtaccgacccccagccactgaaagaacagcccgccctgaacgacagccggtactgcctgagcagcagactgagagtgtccgccaccttctggcagaacccccggaaccacttcagatgccaggtgcagttctacggcctgagcgagaacgacgagtggacccaggacagagccaagcccgtgacccagatcgtgtctgccgaagcctggggcagagccgatgatgtgattaagatccactggcaggaaaagaagtccaacaccatcctgggcagccaggaaggcaacaccatgaagaccaacgacacctacatgaagttcagctggctgaccgtgcccgagaagtccctggacaaagaacacagatgcatcgtgcggcacgaaaacaacaagaacggcgtggaccaggaaatcatcttcccacccatcaagaccgatgtgattacaatggaccccaaggacaactgctccaaggacgccaacgataccctgctgctccagctgaccaacaccagcgcctactacatgtacttgttgctgctgctgaagtccgtggtgtacttcgccatcatcacatgctgcctgctgcggagaaccgccttctgctgcaacggcgagaagtctagggccaagcgatctggatctggagcaacaaacttctcactactcaaacaagcaggtgacgtggaggagaatcccgggcctactagtatggactggatttggcgcatccttttccttgtcggcgctgctaccggcgcgcattccttcgaagaagtgcagctggttgaatcaggcggaggactggttcagcctggcggatctctgagactgtcttgtgccgccagcggctacaccttcagcagctactggatgaactgggtccgacaggcccctggcaaaggactggaatgggtcggaatgatcgaccccagcgacagcgagacacactacaaccacatcttcaaggaccgcttcaccatcagcgccgacaccagcaagaataccgcctacctccagatgaactccctgagagccgaggacaccgccgtgtactactgcgccagaaacctgtatctgtggggccagggaaccctggtcacagtgtcatctacgcgtatccagaaccctgatcctgccgtgtaccagctgcgggatagcaagagcagcgacaagagcgtgtgtctgttcaccgacttcgacagccagaccaacgtgtcccagagcaaggactccgacgtgtacatcaccgataagtgcgtgctggacatgcggagcatggacttcaagagcaactccgccgtggcctggtccaacaagtccgatttcgcctgcgccaacgccttcaacaacagcattatccccgaggacacattcttcccaagccccgagagcagcgactccaccgaccacgtgaagcccaaagagacagagaacaccaagcagcccagcaagagctgccacaagcccaaggccatcgtgcacaccgagaaagtgaacatgatgagcctgaccgtgctgggcctgcggatgctgttcgccaaaaccgtggccgtgaacttcctgctgaccgccaagctgttcttcctc

SEQ ID NO: 36943 - DNA, 2979 bp, synthetic construct
  source 1..2979: mol_type = other DNA
atggccttaccagtgaccgccttgctcctgccgctggccttgctgctccacgccgccaggccggaagtgcagctggttgaatctggcggaggactggttcagcctggcggatctctgagactgtcttgtgccgccagcggcttcagcttcagcgacttttggatgagctgggtccgacaggcccctggcaaaggacttgaatgggtcgccacaatcagccaggccggcagcgagaaggactacgtggactctgtgaagggcagattcaccatcagccgggacaacgccaagaagtccctgtacctccagatgaacagcctgagagccgaggacaccgccgtgtactattgtgcctctggcgtgtacagcttcgactacagaggccagggcaccctggtcacagtctcttctggtaccggcggaggcggatctggcggcggaggtagcggtggcggaggatctgaattcgacatccagatgacacagagccctagcagcctgtctgccagcgtgggagacagagtgaccatcacatgcaagagcagccagagcctgctggactccgatggcaagacctacctgaactggtatcagcagaagcccggcaaggcccctaagctgctgatctacctggtgtccaagctggatagcggcgtgcccagcagattttctggcagcggcagcggaaccgacttcaccctgacaatatccagcctccagcctgaggacttcgccacctactactgctggcaaggcacccactttccattcaccttcggccagggcaccaaggtggaaatcaaaagactcgaggacctgaagaacgtgttcccacctgaggtggccgtgttcgagcctagcgaggccgagatcagccacacccagaaagccaccctcgtgtgcctggctaccggcttctaccccgaccatgtggaactgtcttggtgggtcaacggcaaagaggtgcacagcggcgtgtgtaccgacccccagccactgaaagaacagcccgccctgaacgacagccggtactgcctgagcagcagactgagagtgtccgccaccttctggcagaacccccggaaccacttcagatgccaggtgcagttctacggcctgagcgagaacgacgagtggacccaggacagagccaagcccgtgacccagatcgtgtctgccgaagcctggggcagagccgatgatgtgattaagatccactggcaggaaaagaagtccaacaccatcctgggcagccaggaaggcaacaccatgaagaccaacgacacctacatgaagttcagctggctgaccgtgcccgagaagtccctggacaaagaacacagatgcatcgtgcggcacgaaaacaacaagaacggcgtggaccaggaaatcatcttcccacccatcaagaccgatgtgattacaatggaccccaaggacaactgctccaaggacgccaacgataccctgctgctccagctgaccaacaccagcgcctactacatgtacttgttgctgctgctgaagtccgtggtgtacttcgccatcatcacatgctgcctgctgcggagaaccgccttctgctgcaacggcgagaagtctagggccaagcgatctggatctggagcaacaaacttctcactactcaaacaagcaggtgacgtggaggagaatcccgggcctactagtatggactggatttggcgcatccttttccttgtcggcgctgctaccggcgcgcattccgggccccagctccagctgcaagagtctggacctggcctggtcaagcctagcgagacactgagcctgacctgtaccgtgtccggcgatagcatcagcagcggcgattactactggggctggatcagacagcctcctggcaaaggactggaatggatcggccacatctactacagcggcgtgacctactacaaccccagcctgaagtccagagtgaccatcagcgtggacaccagccggaaccagttctccctgaagctgtctagcgtgacagccgccgataccgccgtgtactactgcaccagagaggacagcagcaactggcggagtagaggccagggaacactggtcacagttagctctggatccggcggaggcggaagtggaggcggaggatctggcggcggaggctctttcgaagaagtgcagctggttgaatcaggcggaggactggttcagcctggcggatctctgagactgtcttgtgccgccagcggctacaccttcagcagctactggatgaactgggtccgacaggcccctggcaaaggactggaatgggtcggaatgatcgaccccagcgacagcgagacacactacaaccacatcttcaaggaccgcttcaccatcagcgccgacaccagcaagaataccgcctacctccagatgaactccctgagagccgaggacaccgccgtgtactactgcgccagaaacctgtatctgtggggccagggaaccctggtcacagtgtcatctacgcgtatccagaaccctgatcctgccgtgtaccagctgcgggatagcaagagcagcgacaagagcgtgtgtctgttcaccgacttcgacagccagaccaacgtgtcccagagcaaggactccgacgtgtacatcaccgataagtgcgtgctggacatgcggagcatggacttcaagagcaactccgccgtggcctggtccaacaagtccgatttcgcctgcgccaacgccttcaacaacagcattatccccgaggacacattcttcccaagccccgagagcagcgactccaccgaccacgtgaagcccaaagagacagagaacaccaagcagcccagcaagagctgccacaagcccaaggccatcgtgcacaccgagaaagtgaacatgatgagcctgaccgtgctgggcctgcggatgctgttcgccaaaaccgtggccgtgaacttcctgctgaccgccaagctgttcttcctc

SEQ ID NO: 36944 - DNA, 1857 bp, synthetic construct
  source 1..1857: mol_type = other DNA
atggccttaccagtgaccgccttgctcctgccgctggccttgctgctccacgccgccaggccggacatccagatgacacagagccctagcagcctgtctgccagcgtgggagacagagtgaccatcacatgcaagagcagccagagcctgctggactccgatggcaagacctacctgaactggtatcagcagaagcccggcaaggcccctaagctgctgatctacctggtgtccaagctggatagcggcgtgcccagcagattttctggcagcggcagcggaaccgacttcaccctgacaatatccagcctccagcctgaggacttcgccacctactactgctggcaaggcacccactttccattcaccttcggccagggcaccaaggtggaaatcaaaagactcgaggacctgaagaacgtgttcccacctgaggtggccgtgttcgagcctagcgaggccgagatcagccacacccagaaagccaccctcgtgtgcctggctaccggcttctaccccgaccatgtggaactgtcttggtgggtcaacggcaaagaggtgcacagcggcgtgtctaccgacccccagccactgaaagaacagcccgccctgaacgacagccggtactgcctgagcagcagactgagagtgtccgccaccttctggcagaacccccggaaccacttcagatgccaggtgcagttctacggcctgagcgagaacgacgagtggacccaggacagagccaagcccgtgacccagatcgtgtctgccgaagcctggggcagagccgattgcgacgtgaagctggtggaaaagagcttcgagacagacaccaacctgaacttccagaacctgagcgtgatcggcttcagaatcctgctgctgaaagtggccggctttaacctgctgatgaccctgcggctgtggtccagcagggccaagcgatctggatctggagcaacaaacttctcactactcaaacaagcaggtgacgtggaggagaatcccgggcctactagtatggactggatttggcgcatccttttccttgtcggcgctgctaccggcgcgcattccttcgaagaagtgcagctggttgaatcaggcggaggactggttcagcctggcggatctctgagactgtcttgtgccgccagcggctacaccttcagcagctactggatgaactgggtccgacaggcccctggcaaaggactggaatgggtcggaatgatcgaccccagcgacagcgagacacactacaaccacatcttcaaggaccgcttcaccatcagcgccgacaccagcaagaataccgcctacctccagatgaactccctgagagccgaggacaccgccgtgtactactgcgccagaaacctgtatctgtggggccagggaaccctggtcacagtgtcatctacgcgtatccagaaccctgatcctgccgtgtaccagctgcgggatagcaagagcagcgacaagagcgtgtgtctgttcaccgacttcgacagccagaccaacgtgtcccagagcaaggactccgacgtgtacatcaccgataagaccgtgctggacatgcggagcatggacttcaagagcaactccgccgtggcctggtccaacaagtccgatttcgcctgcgccaacgccttcaacaacagcattatccccgaggacacattcttcccaagccccgagagcagctgcggctttaccagcgagagctaccagcagggcgtgctgagcgccaccatcctgtacgagatcctgctgggcaaggccaccctgtacgccgtgctggtgtctgccctggtgctgatggctatggtcaagcggaaggacagccgggga

SEQ ID NO: 36945 - DNA, 1857 bp, synthetic construct
  source 1..1857: mol_type = other DNA
atggccttaccagtgaccgccttgctcctgccgctggccttgctgctccacgccgccaggccggacatccagatgacacagagccctagcagcctgtctgccagcgtgggagacagagtgaccatcacatgcaagagcagccagagcctgctggactccgatggcaagacctacctgaactggtatcagcagaagcccggcaaggcccctaagctgctgatctacctggtgtccaagctggatagcggcgtgcccagcagattttctggcagcggcagcggaaccgacttcaccctgacaatatccagcctccagcctgaggacttcgccacctactactgctggcaaggcacccactttccattcaccttcggccagggcaccaaggtggaaatcaaaagactcgaggacctgaagaacgtgttcccacctgaggtggccgtgttcgagcctagcgaggccgagatcagccacacccagaaagccaccctcgtgtgcctggctaccggcttctaccccgaccatgtggaactgtcttggtgggtcaacggcaaagaggtgcacagcggcgtgtctaccgacccccagccactgaaagaacagcccgccctgaacgacagccggtactgcctgagcagcagactgagagtgtccgccaccttctggcagaacccccggaaccacttcagatgccaggtgcagttctacggcctgagcgagaacgacgagtggacccaggacagagccaagcccgtgacccagatcgtgtctgccgaagcctggggcagagccgattgcggctttaccagcgagagctaccagcagggcgtgctgagcgccaccaacctgagcgtgatcggcttcagaatcctgctgctgaaagtggccggctttaacctgctgatgaccctgcggctgtggtccagcagggccaagcgatctggatctggagcaacaaacttctcactactcaaacaagcaggtgacgtggaggagaatcccgggcctactagtatggactggatttggcgcatccttttccttgtcggcgctgctaccggcgcgcattccttcgaagaagtgcagctggttgaatcaggcggaggactggttcagcctggcggatctctgagactgtcttgtgccgccagcggctacaccttcagcagctactggatgaactgggtccgacaggcccctggcaaaggactggaatgggtcggaatgatcgaccccagcgacagcgagacacactacaaccacatcttcaaggaccgcttcaccatcagcgccgacaccagcaagaataccgcctacctccagatgaactccctgagagccgaggacaccgccgtgtactactgcgccagaaacctgtatctgtggggccagggaaccctggtcacagtgtcatctacgcgtatccagaaccctgatcctgccgtgtaccagctgcgggatagcaagagcagcgacaagagcgtgtgtctgttcaccgacttcgacagccagaccaacgtgtcccagagcaaggactccgacgtgtacatcaccgataagaccgtgctggacatgcggagcatggacttcaagagcaactccgccgtggcctggtccaacaagtccgatttcgcctgcgccaacgccttcaacaacagcattatccccgaggacacattcttcccaagccccgagagcagctgcgacgtgaagctggtggaaaagagcttcgagacagacaccaacctgaacttccagatcctgtacgagatcctgctgggcaaggccaccctgtacgccgtgctggtgtctgccctggtgctgatggctatggtcaagcggaaggacagccgggga

SEQ ID NO: 36946 - DNA, 2169 bp, synthetic construct
  source 1..2169: mol_type = other DNA
atggccttaccagtgaccgccttgctcctgccgctggccttgctgctccacgccgccaggccggacatccagatgacacagagccctagcagcctgtctgccagcgtgggagacagagtgaccatcacatgcaagagcagccagagcctgctggactccgatggcaagacctacctgaactggtatcagcagaagcccggcaaggcccctaagctgctgatctacctggtgtccaagctggatagcggcgtgcccagcagattttctggcagcggcagcggaaccgacttcaccctgacaatatccagcctccagcctgaggacttcgccacctactactgctggcaaggcacccactttccattcaccttcggccagggcaccaaggtggaaatcaaaagactcgaggacctgaagaacgtgttcccacctgaggtggccgtgttcgagcctagcgaggccgagatcagccacacccagaaagccaccctcgtgtgcctggctaccggcttctaccccgaccatgtggaactgtcttggtgggtcaacggcaaagaggtgcacagcggcgtgtctaccgacccccagccactgaaagaacagcccgccctgaacgacagccggtactgcctgagcagcagactgagagtgtccgccaccttctggcagaacccccggaaccacttcagatgccaggtgcagttctacggcctgagcgagaacgacgagtggacccaggacagagccaagcccgtgacccagatcgtgtctgccgaagcctggggcagagccgatgatgtgattaagatccactggcaggaaaagaagtccaacaccatcctgggcagccaggaaggcaacaccatgaagaccaacgacacctacatgaagttcagctggctgaccgtgcccgagaagtccctggacaaagaacacagatgcatcgtgcggcacgaaaacaacaagaacggcgtggaccaggaaatcatcttcccacccatcaagaccgatgtgattacaatggaccccaaggacaactgctccaaggacgccaacgataccctgctgctccagctgaccaacaccagcgcctactacatgtacttgttgctgctgctgaagtccgtggtgtacttcgccatcatcacatgctgcctgctgatggctatggtcaagcggaaggacagccggggaagggccaagcgatctggatctggagcaacaaacttctcactactcaaacaagcaggtgacgtggaggagaatcccgggcctactagtatggactggatttggcgcatccttttccttgtcggcgctgctaccggcgcgcattccttcgaagaagtgcagctggttgaatcaggcggaggactggttcagcctggcggatctctgagactgtcttgtgccgccagcggctacaccttcagcagctactggatgaactgggtccgacaggcccctggcaaaggactggaatgggtcggaatgatcgaccccagcgacagcgagacacactacaaccacatcttcaaggaccgcttcaccatcagcgccgacaccagcaagaataccgcctacctccagatgaactccctgagagccgaggacaccgccgtgtactactgcgccagaaacctgtatctgtggggccagggaaccctggtcacagtgtcatctacgcgtatccagaaccctgatcctgccgtgtaccagctgcgggatagcaagagcagcgacaagagcgtgtgtctgttcaccgacttcgacagccagaccaacgtgtcccagagcaaggactccgacgtgtacatcaccgataagaccgtgctggacatgcggagcatggacttcaagagcaactccgccgtggcctggtccaacaagtccgatttcgcctgcgccaacgccttcaacaacagcattatccccgaggacacattcttcccaagccccgagagcagcgactccaccgaccacgtgaagcccaaagagacagagaacaccaagcagcccagcaagagctgccacaagcccaaggccatcgtgcacaccgagaaagtgaacatgatgagcctgaccgtgctgggcctgcggatgctgttcgccaaaaccgtggccgtgaacttcctgctgaccgccaagctgttcttcctcctcaccgcc

SEQ ID NO: 36947 - DNA, 2163 bp, synthetic construct
  source 1..2163: mol_type = other DNA
atggccttaccagtgaccgccttgctcctgccgctggccttgctgctccacgccgccaggccggacatccagatgacacagagccctagcagcctgtctgccagcgtgggagacagagtgaccatcacatgcaagagcagccagagcctgctggactccgatggcaagacctacctgaactggtatcagcagaagcccggcaaggcccctaagctgctgatctacctggtgtccaagctggatagcggcgtgcccagcagattttctggcagcggcagcggaaccgacttcaccctgacaatatccagcctccagcctgaggacttcgccacctactactgctggcaaggcacccactttccattcaccttcggccagggcaccaaggtggaaatcaaaagactcgaggacctgaagaacgtgttcccacctgaggtggccgtgttcgagcctagcgaggccgagatcagccacacccagaaagccaccctcgtgtgcctggctaccggcttctaccccgaccatgtggaactgtcttggtgggtcaacggcaaagaggtgcacagcggcgtgtctaccgacccccagccactgaaagaacagcccgccctgaacgacagccggtactgcctgagcagcagactgagagtgtccgccaccttctggcagaacccccggaaccacttcagatgccaggtgcagttctacggcctgagcgagaacgacgagtggacccaggacagagccaagcccgtgacccagatcgtgtctgccgaagcctggggcagagccgatgatgtgattaagatccactggcaggaaaagaagtccaacaccatcctgggcagccaggaaggcaacaccatgaagaccaacgacacctacatgaagttcagctggctgaccgtgcccgagaagtccctggacaaagaacacagatgcatcgtgcggcacgaaaacaacaagaacggcgtggaccaggaaatcatcttcccacccatcaagaccgatgtgattacaatggaccccaaggacaactgctccaaggacgccaacgataccctgctgctccagctgaccaacaccagcgcctactacatgtacttgttgctgctgctgaagtccgtggtgtacttcgccatcatcacatgctgcctgctgcggagaaccgccttctgctgcaacggcgagaagtctagggccaagcgatctggatctggagcaacaaacttctcactactcaaacaagcaggtgacgtggaggagaatcccgggcctactagtatggactggatttggcgcatccttttccttgtcggcgctgctaccggcgcgcattccttcgaagaagtgcagctggttgaatcaggcggaggactggttcagcctggcggatctctgagactgtcttgtgccgccagcggctacaccttcagcagctactggatgaactgggtccgacaggcccctggcaaaggactggaatgggtcggaatgatcgaccccagcgacagcgagacacactacaaccacatcttcaaggaccgcttcaccatcagcgccgacaccagcaagaataccgcctacctccagatgaactccctgagagccgaggacaccgccgtgtactactgcgccagaaacctgtatctgtggggccagggaaccctggtcacagtgtcatctacgcgtatccagaaccctgatcctgccgtgtaccagctgcgggatagcaagagcagcgacaagagcgtgtgtctgttcaccgacttcgacagccagaccaacgtgtcccagagcaaggactccgacgtgtacatcaccgataagaccgtgctggacatgcggagcatggacttcaagagcaactccgccgtggcctggtccaacaagtccgatttcgcctgcgccaacgccttcaacaacagcattatccccgaggacacattcttcccaagccccgagagcagcgactccaccgaccacgtgaagcccaaagagacagagaacaccaagcagcccagcaagagctgccacaagcccaaggccatcgtgcacaccgagaaagtgaacatgatgagcctgaccgtgctgggcctgcggatgctgttcgccaaaaccgtggccgtgaacttcctgctgaccgccaagctgttcttcctc

SEQ ID NO: 36948 - DNA, 2595 bp, synthetic construct
  source 1..2595: mol_type = other DNA
atggccttaccagtgaccgccttgctcctgccgctggccttgctgctccacgccgccaggccgctcgaggaggacctgaagaacgtgttcccacctgaggtggccgtgttcgagcctagcgaggccgagatcagccacacccagaaagccaccctcgtgtgcctggctaccggcttctaccccgaccatgtggaactgtcttggtgggtcaacggcaaagaggtgcacagcggcgtgtgtaccgacccccagccactgaaagaacagcccgccctgaacgacagccggtactgcctgagcagcagactgagagtgtccgccaccttctggcagaacccccggaaccacttcagatgccaggtgcagttctacggcctgagcgagaacgacgagtggacccaggacagagccaagcccgtgacccagatcgtgtctgccgaagcctggggcagagccgattgcggctttaccagcgagagctaccagcagggcgtgctgagcgccaccaacctgagcgtgatcggcttcagaatcctgctgctgaaagtggccggctttaacctgctgatgaccctgcggctgtggtccagcagggccaagcgatctggatctggagcaacaaacttctcactactcaaacaagcaggtgacgtggaggagaatcccgggcctactagcatggccttaccagtgaccgccttgctcctgccgctggccttgctgctccacgccgccaggccggacatccagatgacacagagccctagcagcctgtctgccagcgtgggagacagagtgaccatcacatgcaagagcagccagagcctgctggactccgatggcaagacctacctgaactggtatcagcagaagcccggcaaggcccctaagctgctgatctacctggtgtccaagctggatagcggcgtgcccagcagattttctggcagcggcagcggaaccgacttcaccctgacaatatccagcctccagcctgaggacttcgccacctactactgctggcaaggcacccactttccattcaccttcggccagggcaccaaggtggaaatcaaaagaggcggaggcggaagtggaggcggaggatctggcggcggaggctctgaagtgcagctggttgaatcaggcggaggactggttcagcctggcggatctctgagactgtcttgtgccgccagcggctacaccttcagcagctactggatgaactgggtccgacaggcccctggcaaaggactggaatgggtcggaatgatcgaccccagcgacagcgagacacactacaaccacatcttcaaggaccgcttcaccatcagcgccgacaccagcaagaataccgcctacctccagatgaactccctgagagccgaggacaccgccgtgtactactgcgccagaaacctgtatctgtggggccagggaaccctggtcacagtgtcatctacgcgtatccagaaccctgatcctgccgtgtaccagctgcgggatagcaagagcagcgacaagagcgtgtgtctgttcaccgacttcgacagccagaccaacgtgtcccagagcaaggactccgacgtgtacatcaccgataagtgcgtgctggacatgcggagcatggacttcaagagcaactccgccgtggcctggtccaacaagtccgatttcgcctgcgccaacgccttcaacaacagcattatccccgaggacacattcttcccaagccccgagagcagctgcgacgtgaagctggtggaaaagagcttcgagacagacaccaacctgaacttccagatcctgtacgaggtgatcggcttcagaatcctgctgctgaaagtggccggctttaacctgctgatgaccctgcggctgtggtccagccgcgccaagagaagcggatctggcgtgaagcagaccctgaatttcgacctgctgaagctggctggcgacgtggaatccaacccaggcccttctagaggccatatgaccgagtacaagcccacggtgcgcctcgccacccgcgacgacgtccccagggccgtacgcaccctcgccgccgcgttcgccgactaccccgccacgcgccacaccgtcgatccggaccgccacatcgagcgggtcaccgagctgcaagaactcttcctcacgcgcgtcgggctcgacatcggcaaggtgtgggtcgcggacgacggcgccgcggtggcggtctggaccacgccggagagcgtcgaagcgggggcggtgttcgccgagatcggcccgcgcatggccgagttgagcggttcccggctggccgcgcagcaacagatggaaggcctcctggcgccgcaccggcccaaggagcccgcgtggttcctggccaccgtcggcgtctcgcccgaccaccagggcaagggtctgggcagcgccgtcgtgctccccggagtggaggcggccgagcgcgccggggtgcccgccttcctggagacctccgcgccccgcaacctccccttctacgagcggctcggcttcaccgtcaccgccgacgtcgaggtgcccgaaggaccgcgcacctggtgcatgacccgcaagcccggtgcctga

SEQ ID NO: 36949 - DNA, 2595 bp, synthetic construct
  source 1..2595: mol_type = other DNA
atggccttaccagtgaccgccttgctcctgccgctggccttgctgctccacgccgccaggccgctcgagatccagaaccctgatcctgccgtgtaccagctgcgggatagcaagagcagcgacaagagcgtgtgtctgttcaccgacttcgacagccagaccaacgtgtcccagagcaaggactccgacgtgtacatcaccgataagtgcgtgctggacatgcggagcatggacttcaagagcaactccgccgtggcctggtccaacaagtccgatttcgcctgcgccaacgccttcaacaacagcattatccccgaggacacattcttcccaagccccgagagcagctgcgacgtgaagctggtggaaaagagcttcgagacagacaccaacctgaacttccagatcctgtacgaggtgatcggcttcagaatcctgctgctgaaagtggccggctttaacctgctgatgaccctgcggctgtggtccagcagggccaagcgatctggatctggagcaacaaacttctcactactcaaacaagcaggtgacgtggaggagaatcccgggcctactagcatggccttaccagtgaccgccttgctcctgccgctggccttgctgctccacgccgccaggccggacatccagatgacacagagccctagcagcctgtctgccagcgtgggagacagagtgaccatcacatgcaagagcagccagagcctgctggactccgatggcaagacctacctgaactggtatcagcagaagcccggcaaggcccctaagctgctgatctacctggtgtccaagctggatagcggcgtgcccagcagattttctggcagcggcagcggaaccgacttcaccctgacaatatccagcctccagcctgaggacttcgccacctactactgctggcaaggcacccactttccattcaccttcggccagggcaccaaggtggaaatcaaaagaggcggaggcggaagtggaggcggaggatctggcggcggaggctctgaagtgcagctggttgaatcaggcggaggactggttcagcctggcggatctctgagactgtcttgtgccgccagcggctacaccttcagcagctactggatgaactgggtccgacaggcccctggcaaaggactggaatgggtcggaatgatcgaccccagcgacagcgagacacactacaaccacatcttcaaggaccgcttcaccatcagcgccgacaccagcaagaataccgcctacctccagatgaactccctgagagccgaggacaccgccgtgtactactgcgccagaaacctgtatctgtggggccagggaaccctggtcacagtgtcatctacgcgtgaggacctgaagaacgtgttcccacctgaggtggccgtgttcgagcctagcgaggccgagatcagccacacccagaaagccaccctcgtgtgcctggctaccggcttctaccccgaccatgtggaactgtcttggtgggtcaacggcaaagaggtgcacagcggcgtgtgtaccgacccccagccactgaaagaacagcccgccctgaacgacagccggtactgcctgagcagcagactgagagtgtccgccaccttctggcagaacccccggaaccacttcagatgccaggtgcagttctacggcctgagcgagaacgacgagtggacccaggacagagccaagcccgtgacccagatcgtgtctgccgaagcctggggcagagccgattgcggctttaccagcgagagctaccagcagggcgtgctgagcgccaccaacctgagcgtgatcggcttcagaatcctgctgctgaaagtggccggctttaacctgctgatgaccctgcggctgtggtccagccgcgccaagagaagcggatctggcgtgaagcagaccctgaatttcgacctgctgaagctggctggcgacgtggaatccaacccaggcccttctagaggccatatgaccgagtacaagcccacggtgcgcctcgccacccgcgacgacgtccccagggccgtacgcaccctcgccgccgcgttcgccgactaccccgccacgcgccacaccgtcgatccggaccgccacatcgagcgggtcaccgagctgcaagaactcttcctcacgcgcgtcgggctcgacatcggcaaggtgtgggtcgcggacgacggcgccgcggtggcggtctggaccacgccggagagcgtcgaagcgggggcggtgttcgccgagatcggcccgcgcatggccgagttgagcggttcccggctggccgcgcagcaacagatggaaggcctcctggcgccgcaccggcccaaggagcccgcgtggttcctggccaccgtcggcgtctcgcccgaccaccagggcaagggtctgggcagcgccgtcgtgctccccggagtggaggcggccgagcgcgccggggtgcccgccttcctggagacctccgcgccccgcaacctccccttctacgagcggctcggcttcaccgtcaccgccgacgtcgaggtgcccgaaggaccgcgcacctggtgcatgacccgcaagcccggtgcctga

SEQ ID NO: 36950 - DNA, 2595 bp, synthetic construct; identical to SEQ ID NO: 36948
  source 1..2595: mol_type = other DNA

SEQ ID NO: 36951 - DNA, 2919 bp, synthetic construct
  source 1..2919: mol_type = other DNA
atggccttaccagtgaccgccttgctcctgccgctggccttgctgctccacgccgccaggccgctcgaggaggacctgaagaacgtgttcccacctgaggtggccgtgttcgagcctagcgaggccgagatcagccacacccagaaagccaccctcgtgtgcctggctaccggcttctaccccgaccatgtggaactgtcttggtgggtcaacggcaaagaggtgcacagcggcgtgtctaccgacccccagccactgaaagaacagcccgccctgaacgacagccggtactgcctgagcagcagactgagagtgtccgccaccttctggcagaacccccggaaccacttcagatgccaggtgcagttctacggcctgagcgagaacgacgagtggacccaggacagagccaagcccgtgacccagatcgtgtctgccgaagcctggggcagagccgatgatgtgattaagatccactggcaggaaaagaagtccaacaccatcctgggcagccaggaaggcaacaccatgaagaccaacgacacctacatgaagttcagctggctgaccgtgcccgagaagtccctggacaaagaacacagatgcatcgtgcggcacgaaaacaacaagaacggcgtggaccaggaaatcatcttcccacccatcaagaccgatgtgattacaatggaccccaaggacaactgctccaaggacgccaacgataccctgctgctccagctgaccaacaccagcgcctactacatgtacttgttgctgctgctgaagtccgtggtgtacttcgccatcatcacatgctgcctgctgatggctatggtcaagcggaaggacagccggggaagggccaagcgatctggatctggagcaacaaacttctcactactcaaacaagcaggtgacgtggaggagaatcccgggcctactagcatggccttaccagtgaccgccttgctcctgccgctggccttgctgctccacgccgccaggccggacatccagatgacacagagccctagcagcctgtctgccagcgtgggagacagagtgaccatcacatgcaagagcagccagagcctgctggactccgatggcaagacctacctgaactggtatcagcagaagcccggcaaggcccctaagctgctgatctacctggtgtccaagctggatagcggcgtgcccagcagattttctggcagcggcagcggaaccgacttcaccctgacaatatccagcctccagcctgaggacttcgccacctactactgctggcaaggcacccactttccattcaccttcggccagggcaccaaggtggaaatcaaaagaggcggaggcggaagtggaggcggaggatctggcggcggaggctctgaagtgcagctggttgaatcaggcggaggactggttcagcctggcggatctctgagactgtcttgtgccgccagcggctacaccttcagcagctactggatgaactgggtccgacaggcccctggcaaaggactggaatgggtcggaatgatcgaccccagcgacagcgagacacactacaaccacatcttcaaggaccgcttcaccatcagcgccgacaccagcaagaataccgcctacctccagatgaactccctgagagccgaggacaccgccgtgtactactgcgccagaaacctgtatctgtggggccagggaaccctggtcacagtgtcatctacgcgtatccagaaccctgatcctgccgtgtaccagctgcgggatagcaagagcagcgacaagagcgtgtgtctgttcaccgacttcgacagccagaccaacgtgtcccagagcaaggactccgacgtgtacatcaccgataagaccgtgctggacatgcggagcatggacttcaagagcaactccgccgtggcctggtccaacaagtccgatttcgcctgcgccaacgccttcaacaacagcattatccccgaggacacattcttcccaagccccgagagcagcgactccaccgaccacgtgaagcccaaagagacagagaacaccaagcagcccagcaagagctgccacaagcccaaggccatcgtgcacaccgagaaagtgaacatgatgagcctgaccgtgctgggcctgcggatgctgttcgccaaaaccgtggccgtgaacttcctgctgaccgccaagctgttcttcctcctcaccgcccgcgccaagagaagcggatctggcgtgaagcagaccctgaatttcgacctgctgaagctggctggcgacgtggaatccaacccaggcccttctagaggccatatgaccgagtacaagcccacggtgcgcctcgccacccgcgacgacgtccccagggccgtacgcaccctcgccgccgcgttcgccgactaccccgccacgcgccacaccgtcgatccggaccgccacatcgagcgggtcaccgagctgcaagaactcttcctcacgcgcgtcgggctcgacatcggcaaggtgtgggtcgcggacgacggcgccgcggtggcggtctggaccacgccggagagcgtcgaagcgggggcggtgttcgccgagatcggcccgcgcatggccgagttgagcggttcccggctggccgcgcagcaacagatggaaggcctcctggcgccgcaccggcccaaggagcccgcgtggttcctggccaccgtcggcgtctcgcccgaccaccagggcaagggtctgggcagcgccgtcgtgctccccggagtggaggcggccgagcgcgccggggtgcccgccttcctggagacctccgcgccccgcaacctccccttctacgagcggctcggcttcaccgtcaccgccgacgtcgaggtgcccgaaggaccgcgcacctggtgcatgacccgcaagcccggtgcctga

SEQ ID NO: 36952 - DNA, 2919 bp, synthetic construct
  source 1..2919: mol_type = other DNA
atggccttaccagtgaccgccttgctcctgccgctggccttgctgctccacgccgccaggccgctcgagatccagaaccctgatcctgccgtgtaccagctgcgggatagcaagagcagcgacaagagcgtgtgtctgttcaccgacttcgacagccagaccaacgtgtcccagagcaaggactccgacgtgtacatcaccgataagaccgtgctggacatgcggagcatggacttcaagagcaactccgccgtggcctggtccaacaagtccgatttcgcctgcgccaacgccttcaacaacagcattatccccgaggacacattcttcccaagccccgagagcagcgactccaccgaccacgtgaagcccaaagagacagagaacaccaagcagcccagcaagagctgccacaagcccaaggccatcgtgcacaccgagaaagtgaacatgatgagcctgaccgtgctgggcctgcggatgctgttcgccaaaaccgtggccgtgaacttcctgctgaccgccaagctgttcttcctcctcaccgccagggccaagcgatctggatctggagcaacaaacttctcactactcaaacaagcaggtgacgtggaggagaatcccgggcctactagcatggccttaccagtgaccgccttgctcctgccgctggccttgctgctccacgccgccaggccggacatccagatgacacagagccctagcagcctgtctgccagcgtgggagacagagtgaccatcacatgcaagagcagccagagcctgctggactccgatggcaagacctacctgaactggtatcagcagaagcccggcaaggcccctaagctgctgatctacctggtgtccaagctggatagcggcgtgcccagcagattttctggcagcggcagcggaaccgacttcaccctgacaatatccagcctccagcctgaggacttcgccacctactactgctggcaaggcacccactttccattcaccttcggccagggcaccaaggtggaaatcaaaagaggcggaggcggaagtggaggcggaggatctggcggcggaggctctgaagtgcagctggttgaatcaggcggaggactggttcagcctggcggatctctgagactgtcttgtgccgccagcggctacaccttcagcagctactggatgaactgggtccgacaggcccctggcaaaggactggaatgggtcggaatgatcgaccccagcgacagcgagacacactacaaccacatcttcaaggaccgcttcaccatcagcgccgacaccagcaagaataccgcctacctccagatgaactccctgagagccgaggacaccgccgtgtactactgcgccagaaacctgtatctgtggggccagggaaccctggtcacagtgtcatctacgcgtgaggacctgaagaacgtgttcccacctgaggtggccgtgttcgagcctagcgaggccgagatcagccacacccagaaagccaccctcgtgtgcctggctaccggcttctaccccgaccatgtggaactgtcttggtgggtcaacggcaaagaggtgcacagcggcgtgtctaccgacccccagccactgaaagaacagcccgccctgaacgacagccggtactgcctgagcagcagactgagagtgtccgccaccttctggcagaacccccggaaccacttcagatgccaggtgcagttctacggcctgagcgagaacgacgagtggacccaggacagagccaagcccgtgacccagatcgtgtctgccgaagcctggggcagagccgatgatgtgattaagatccactggcaggaaaagaagtccaacaccatcctgggcagccaggaaggcaacaccatgaagaccaacgacacctacatgaagttcagctggctgaccgtgcccgagaagtccctggacaaagaacacagatgcatcgtgcggcacgaaaacaacaagaacggcgtggaccaggaaatcatcttcccacccatcaagaccgatgtgattacaatggaccccaaggacaactgctccaaggacgccaacgataccctgctgctccagctgaccaacaccagcgcctactacatgtacttgttgctgctgctgaagtccgtggtgtacttcgccatcatcacatgctgcctgctgatggctatggtcaagcggaaggacagccggggacgcgccaagagaagcggatctggcgtgaagcagaccctgaatttcgacctgctgaagctggctggcgacgtggaatccaacccaggcccttctagaggccatatgaccgagtacaagcccacggtgcgcctcgccacccgcgacgacgtccccagggccgtacgcaccctcgccgccgcgttcgccgactaccccgccacgcgccacaccgtcgatccggaccgccacatcgagcgggtcaccgagctgcaagaactcttcctcacgcgcgtcgggctcgacatcggcaaggtgtgggtcgcggacgacggcgccgcggtggcggtctggaccacgccggagagcgtcgaagcgggggcggtgttcgccgagatcggcccgcgcatggccgagttgagcggttcccggctggccgcgcagcaacagatggaaggcctcctggcgccgcaccggcccaaggagcccgcgtggttcctggccaccgtcggcgtctcgcccgaccaccagggcaagggtctgggcagcgccgtcgtgctccccggagtggaggcggccgagcgcgccggggtgcccgccttcctggagacctccgcgccccgcaacctccccttctacgagcggctcggcttcaccgtcaccgccgacgtcgaggtgcccgaaggaccgcgcacctggtgcatgacccgcaagcccggtgcctga

SEQ ID NO: 36953 - DNA, 2913 bp, synthetic construct
  source 1..2913: mol_type = other DNA
atggccttaccagtgaccgccttgctcctgccgctggccttgctgctccacgccgccaggccgctcgaggaggacctgaagaacgtgttcccacctgaggtggccgtgttcgagcctagcgaggccgagatcagccacacccagaaagccaccctcgtgtgcctggctaccggcttctaccccgaccatgtggaactgtcttggtgggtcaacggcaaagaggtgcacagcggcgtgtgtaccgacccccagccactgaaagaacagcccgccctgaacgacagccggtactgcctgagcagcagactgagagtgtccgccaccttctggcagaacccccggaaccacttcagatgccaggtgcagttctacggcctgagcgagaacgacgagtggacccaggacagagccaagcccgtgacccagatcgtgtctgccgaagcctggggcagagccgatgatgtgattaagatccactggcaggaaaagaagtccaacaccatcctgggcagccaggaaggcaacaccatgaagaccaacgacacctacatgaagttcagctggctgaccgtgcccgagaagtccctggacaaagaacacagatgcatcgtgcggcacgaaaacaacaagaacggcgtggaccaggaaatcatcttcccacccatcaagaccgatgtgattacaatggaccccaaggacaactgctccaaggacgccaacgataccctgctgctccagctgaccaacaccagcgcctactacatgtacttgttgctgctgctgaagtccgtggtgtacttcgccatcatcacatgctgcctgctgcggagaaccgccttctgctgcaacggcgagaagtctagggccaagcgatctggatctggagcaacaaacttctcactactcaaacaagcaggtgacgtggaggagaatcccgggcctactagcatggccttaccagtgaccgccttgctcctgccgctggccttgctgctccacgccgccaggccggacatccagatgacacagagccctagcagcctgtctgccagcgtgggagacagagtgaccatcacatgcaagagcagccagagcctgctggactccgatggcaagacctacctgaactggtatcagcagaagcccggcaaggcccctaagctgctgatctacctggtgtccaagctggatagcggcgtgcccagcagattttctggcagcggcagcggaaccgacttcaccctgacaatatccagcctccagcctgaggacttcgccacctactactgctggcaaggcacccactttccattcaccttcggccagggcaccaaggtggaaatcaaaagaggcggaggcggaagtggaggcggaggatctggcggcggaggctctgaagtgcagctggttgaatcaggcggaggactggttcagcctggcggatctctgagactgtcttgtgccgccagcggctacaccttcagcagctactggatgaactgggtccgacaggcccctggcaaaggactggaatgggtcggaatgatcgaccccagcgacagcgagacacactacaaccacatcttcaaggaccgcttcaccatcagcgccgacaccagcaagaataccgcctacctccagatgaactccctgagagccgaggacaccgccgtgtactactgcgccagaaacctgtatctgtggggccagggaaccctggtcacagtgtcatctacgcgtatccagaaccctgatcctgccgtgtaccagctgcgggatagcaagagcagcgacaagagcgtgtgtctgttcaccgacttcgacagccagaccaacgtgtcccagagcaaggactccgacgtgtacatcaccgataagtgcgtgctggacatgcggagcatggacttcaagagcaactccgccgtggcctggtccaacaagtccgatttcgcctgcgccaacgccttcaacaacagcattatccccgaggacacattcttcccaagccccgagagcagcgactccaccgaccacgtgaagcccaaagagacagagaacaccaagcagcccagcaagagctgccacaagcccaaggccatcgtgcacaccgagaaagtgaacatgatgagcctgaccgtgctgggcctgcggatgctgttcgccaaaaccgtggccgtgaacttcctgctgaccgccaagctgttcttcctccgcgccaagagaagcggatctggcgtgaagcagaccctgaatttcgacctgctgaagctggctggcgacgtggaatccaacccaggcccttctagaggccatatgaccgagtacaagcccacggtgcgcctcgccacccgcgacgacgtccccagggccgtacgcaccctcgccgccgcgttcgccgactaccccgccacgcgccacaccgtcgatccggaccgccacatcgagcgggtcaccgagctgcaagaactcttcctcacgcgcgtcgggctcgacatcggcaaggtgtgggtcgcggacgacggcgccgcggtggcggtctggaccacgccggagagcgtcgaagcgggggcggtgttcgccgagatcggcccgcgcatggccgagttgagcggttcccggctggccgcgcagcaacagatggaaggcctcctggcgccgcaccggcccaaggagcccgcgtggttcctggccaccgtcggcgtctcgcccgaccaccagggcaagggtctgggcagcgccgtcgtgctccccggagtggaggcggccgagcgcgccggggtgcccgccttcctggagacctccgcgccccgcaacctccccttctacgagcggctcggcttcaccgtcaccgccgacgtcgaggtgcccgaaggaccgcgcacctggtgcatgacccgcaagcccggtgcctga

SEQ ID NO: 36954 - DNA, 2913 bp, synthetic construct
  source 1..2913: mol_type = other DNA
atggccttaccagtgaccgccttgctcctgccgctggccttgctgctccacgccgccaggccgctcgagatccagaaccctgatcctgccgtgtaccagctgcgggatagcaagagcagcgacaagagcgtgtgtctgttcaccgacttcgacagccagaccaacgtgtcccagagcaaggactccgacgtgtacatcaccgataagtgcgtgctggacatgcggagcatggacttcaagagcaactccgccgtggcctggtccaacaagtccgatttcgcctgcgccaacgccttcaacaacagcattatccccgaggacacattcttcccaagccccgagagcagcgactccaccgaccacgtgaagcccaaagagacagagaacaccaagcagcccagcaagagctgccacaagcccaaggccatcgtgcacaccgagaaagtgaacatgatgagcctgaccgtgctgggcctgcggatgctgttcgccaaaaccgtggccgtgaacttcctgctgaccgccaagctgttcttcctcagggccaagcgatctggatctggagcaacaaacttctcactactcaaacaagcaggtgacgtggaggagaatcccgggcctactagcatggccttaccagtgaccgccttgctcctgccgctggccttgctgctccacgccgccaggccggacatccagatgacacagagccctagcagcctgtctgccagcgtgggagacagagtgaccatcacatgcaagagcagccagagcctgctggactccgatggcaagacctacctgaactggtatcagcagaagcccggcaaggcccctaagctgctgatctacctggtgtccaagctggatagcggcgtgcccagcagattttctggcagcggcagcggaaccgacttcaccctgacaatatccagcctccagcctgaggacttcgccacctactactgctggcaaggcacccactttccattcaccttcggccagggcaccaaggtggaaatcaaaagaggcggaggcggaagtggaggcggaggatctggcggcggaggctctgaagtgcagctggttgaatcaggcggaggactggttcagcctggcggatctctgagactgtcttgtgccgccagcggctacaccttcagcagctactggatgaactgggtccgacaggcccctggcaaaggactggaatgggtcggaatgatcgaccccagcgacagcgagacacactacaaccacatcttcaaggaccgcttcaccatcagcgccgacaccagcaagaataccgcctacctccagatgaactccctgagagccgaggacaccgccgtgtactactgcgccagaaacctgtatctgtggggccagggaaccctggtcacagtgtcatctacgcgtgaggacctgaagaacgtgttcccacctgaggtggccgtgttcgagcctagcgaggccgagatcagccacacccagaaagccaccctcgtgtgcctggctaccggcttctaccccgaccatgtggaactgtcttggtgggtcaacggcaaagaggtgcacagcggcgtgtgtaccgacccccagccactgaaagaacagcccgccctgaacgacagccggtactgcctgagcagcagactgagagtgtccgccaccttctggcagaacccccggaaccacttcagatgccaggtgcagttctacggcctgagcgagaacgacgagtggacccaggacagagccaagcccgtgacccagatcgtgtctgccgaagcctggggcagagccgatgatgtgattaagatccactggcaggaaaagaagtccaacaccatcctgggcagccaggaaggcaacaccatgaagaccaacgacacctacatgaagttcagctggctgaccgtgcccgagaagtccctggacaaagaacacagatgcatcgtgcggcacgaaaacaacaagaacggcgtggaccaggaaatcatcttcccacccatcaagaccgatgtgattacaatggaccccaaggacaactgctccaaggacgccaacgataccctgctgctccagctgaccaacaccagcgcctactacatgtacttgttgctgctgctgaagtccgtggtgtacttcgccatcatcacatgctgcctgctgcggagaaccgccttctgctgcaacggcgagaagtctcgcgccaagagaagcggatctggcgtgaagcagaccctgaatttcgacctgctgaagctggctggcgacgtggaatccaacccaggcccttctagaggccatatgaccgagtacaagcccacggtgcgcctcgccacccgcgacgacgtccccagggccgtacgcaccctcgccgccgcgttcgccgactaccccgccacgcgccacaccgtcgatccggaccgccacatcgagcgggtcaccgagctgcaagaactcttcctcacgcgcgtcgggctcgacatcggcaaggtgtgggtcgcggacgacggcgccgcggtggcggtctggaccacgccggagagcgtcgaagcgggggcggtgttcgccgagatcggcccgcgcatggccgagttgagcggttcccggctggccgcgcagcaacagatggaaggcctcctggcgccgcaccggcccaaggagcccgcgtggttcctggccaccgtcggcgtctcgcccgaccaccagggcaagggtctgggcagcgccgtcgtgctccccggagtggaggcggccgagcgcgccggggtgcccgccttcctggagacctccgcgccccgcaacctccccttctacgagcggctcggcttcaccgtcaccgccgacgtcgaggtgcccgaaggaccgcgcacctggtgcatgacccgcaagcccggtgcctga

SEQ ID NO: 36955 - DNA, 2913 bp, synthetic construct
  source 1..2913: mol_type = other DNA
atggccttaccagtgaccgccttgctcctgccgctggccttgctgctccacgccgccaggccgctcgaggaggacctgaagaacgtgttcccacctgaggtggccgtgttcgagcctagcgaggccgagatcagccacacccagaaagccaccctcgtgtgcctggctaccggcttctaccccgaccatgtggaactgtcttggtgggtcaacggcaaagaggtgcacagcggcgtgtctaccgacccccagccactgaaagaacagcccgccctgaacgacagccggtactgcctgagcagcagactgagagtgtccgccaccttctggcagaacccccggaaccacttcagatgccaggtgcagttctacggcctgagcgagaacgacgagtggacccaggacagagccaagcccgtgacccagatcgtgtctgccgaagcctggggcagagccgatgatgtgattaagatccactggcaggaaaagaagtccaacaccatcctgggcagccaggaaggcaacaccatgaagaccaacgacacctacatgaagttcagctggctgaccgtgcccgagaagtccctggacaaagaacacagatgcatcgtgcggcacgaaaacaacaagaacggcgtggaccaggaaatcatcttcccacccatcaagaccgatgtgattacaatggaccccaaggacaactgctccaaggacgccaacgataccctgctgctccagctgaccaacaccagcgcctactacatgtacttgttgctgctgctgaagtccgtggtgtacttcgccatcatcacatgctgcctgctgcggagaaccgccttctgctgcaacggcgagaagtctagggccaagcgatctggatctggagcaacaaacttctcactactcaaacaagcaggtgacgtggaggagaatcccgggcctactagcatggccttaccagtgaccgccttgctcctgccgctggccttgctgctccacgccgccaggccggacatccagatgacacagagccctagcagcctgtctgccagcgtgggagacagagtgaccatcacatgcaagagcagccagagcctgctggactccgatggcaagacctacctgaactggtatcagcagaagcccggcaaggcccctaagctgctgatctacctggtgtccaagctggatagcggcgtgcccagcagattttctggcagcggcagcggaaccgacttcaccctgacaatatccagcctccagcctgaggacttcgccacctactactgctggcaaggcacccactttccattcaccttcggccagggcaccaaggtggaaatcaaaagaggcggaggcggaagtggaggcggaggatctggcggcggaggctctgaagtgcagctggttgaatcaggcggaggactggttcagcctggcggatctctgagactgtcttgtgccgccagcggctacaccttcagcagctactggatgaactgggtccgacaggcccctggcaaaggactggaatgggtcggaatgatcgaccccagcgacagcgagacacactacaaccacatcttcaaggaccgcttcaccatcagcgccgacaccagcaagaataccgcctacctccagatgaactccctgagagccgaggacaccgccgtgtactactgcgccagaaacctgtatctgtggggccagggaaccctggtcacagtgtcatctacgcgtatccagaaccctgatcctgccgtgtaccagctgcgggatagcaagagcagcgacaagagcgtgtgtctgttcaccgacttcgacagccagaccaacgtgtcccagagcaaggactccgacgtgtacatcaccgataagaccgtgctggacatgcggagcatggacttcaagagcaactccgccgtggcctggtccaacaagtccgatttcgcctgcgccaacgccttcaacaacagcattatccccgaggacacattcttcccaagccccgagagcagcgactccaccgaccacgtgaagcccaaagagacagagaacaccaagcagcccagcaagagctgccacaagcccaaggccatcgtgcacaccgagaaagtgaacatgatgagcctgaccgtgctgggcctgcggatgctgttcgccaaaaccgtggccgtgaacttcctgctgaccgccaagctgttcttcctccgcgccaagagaagcggatctggcgtgaagcagaccctgaatttcgacctgctgaagctggctggcgacgtggaatccaacccaggcccttctagaggccatatgaccgagtacaagcccacggtgcgcctcgccacccgcgacgacgtccccagggccgtacgcaccctcgccgccgcgttcgccgactaccccgccacgcgccacaccgtcgatccggaccgccacatcgagcgggtcaccgagctgcaagaactcttcctcacgcgcgtcgggctcgacatcggcaaggtgtgggtcgcggacgacggcgccgcggtggcggtctggaccacgccggagagcgtcgaagcgggggcggtgttcgccgagatcggcccgcgcatggccgagttgagcggttcccggctggccgcgcagcaacagatggaaggcctcctggcgccgcaccggcccaaggagcccgcgtggttcctggccaccgtcggcgtctcgcccgaccaccagggcaagggtctgggcagcgccgtcgtgctccccggagtggaggcggccgagcgcgccggggtgcccgccttcctggagacctccgcgccccgcaacctccccttctacgagcggctcggcttcaccgtcaccgccgacgtcgaggtgcccgaaggaccgcgcacctggtgcatgacccgcaagcccggtgcctga

SEQ ID NO: 36956 - DNA, 2913 bp, synthetic construct
  source 1..2913: mol_type = other DNA
atggccttaccagtgaccgccttgctcctgccgctggccttgctgctccacgccgccaggccgctcgagatccagaaccctgatcctgccgtgtaccagctgcgggatagcaagagcagcgacaagagcgtgtgtctgttcaccgacttcgacagccagaccaacgtgtcccagagcaaggactccgacgtgtacatcaccgataagaccgtgctggacatgcggagcatggacttcaagagcaactccgccgtggcctggtccaacaagtccgatttcgcctgcgccaacgccttcaacaacagcattatccccgaggacacattcttcccaagccccgagagcagcgactccaccgaccacgtgaagcccaaagagacagagaacaccaagcagcccagcaagagctgccacaagcccaaggccatcgtgcacaccgagaaagtgaacatgatgagcctgaccgtgctgggcctgcggatgctgttcgccaaaaccgtggccgtgaacttcctgctgaccgccaagctgttcttcctcagggccaagcgatctggatctggagcaacaaacttctcactactcaaacaagcaggtgacgtggaggagaatcccgggcctactagcatggccttaccagtgaccgccttgctcctgccgctggccttgctgctccacgccgccaggccggacatccagatgacacagagccctagcagcctgtctgccagcgtgggagacagagtgaccatcacatgcaagagcagccagagcctgctggactccgatggcaagacctacctgaactggtatcagcagaagcccggcaaggcccctaagctgctgatctacctggtgtccaagctggatagcggcgtgcccagcagattttctggcagcggcagcggaaccgacttcaccctgacaatatccagcctccagcctgaggacttcgccacctactactgctggcaaggcacccactttccattcaccttcggccagggcaccaaggtggaaatcaaaagaggcggaggcggaagtggaggcggaggatctggcggcggaggctctgaagtgcagctggttgaatcaggcggaggactggttcagcctggcggatctctgagactgtcttgtgccgccagcggctacaccttcagcagctactggatgaactgggtccgacaggcccctggcaaaggactggaatgggtcggaatgatcgaccccagcgacagcgagacacactacaaccacatcttcaaggaccgcttcaccatcagcgccgacaccagcaagaataccgcctacctccagatgaactccctgagagccgaggacaccgccgtgtactactgcgccagaaacctgtatctgtggggccagggaaccctggtcacagtgtcatctacgcgtgaggacctgaagaacgtgttcccacctgaggtggccgtgttcgagcctagcgaggccgagatcagccacacccagaaagccaccctcgtgtgcctggctaccggcttctaccccgaccatgtggaactgtcttggtgggtcaacggcaaagaggtgcacagcggcgtgtctaccgacccccagccactgaaagaacagcccgccctgaacgacagccggtactgcctgagcagcagactgagagtgtccgccaccttctggcagaacccccggaaccacttcagatgccaggtgcagttctacggcctgagcgagaacgacgagtggacccaggacagagccaagcccgtgacccagatcgtgtctgccgaagcctggggcagagccgatgatgtgattaagatccactggcaggaaaagaagtccaacaccatcctgggcagccaggaaggcaacaccatgaagaccaacgacacctacatgaagttcagctggctgaccgtgcccgagaagtccctggacaaagaacacagatgcatcgtgcggcacgaaaacaacaagaacggcgtggaccaggaaatcatcttcccacccatcaagaccgatgtgattacaatggaccccaaggacaactgctccaaggacgccaacgataccctgctgctccagctgaccaacaccagcgcctactacatgtacttgttgctgctgctgaagtccgtggtgtacttcgccatcatcacatgctgcctgctgcggagaaccgccttctgctgcaacggcgagaagtctcgcgccaagagaagcggatctggcgtgaagcagaccctgaatttcgacctgctgaagctggctggcgacgtggaatccaacccaggcccttctagaggccatatgaccgagtacaagcccacggtgcgcctcgccacccgcgacgacgtccccagggccgtacgcaccctcgccgccgcgttcgccgactaccccgccacgcgccacaccgtcgatccggaccgccacatcgagcgggtcaccgagctgcaagaactcttcctcacgcgcgtcgggctcgacatcggcaaggtgtgggtcgcggacgacggcgccgcggtggcggtctggaccacgccggagagcgtcgaagcgggggcggtgttcgccgagatcggcccgcgcatggccgagttgagcggttcccggctggccgcgcagcaacagatggaaggcctcctggcgccgcaccggcccaaggagcccgcgtggttcctggccaccgtcggcgtctcgcccgaccaccagggcaagggtctgggcagcgccgtcgtgctccccggagtggaggcggccgagcgcgccggggtgcccgccttcctggagacctccgcgccccgcaacctccccttctacgagcggctcggcttcaccgtcaccgccgacgtcgaggtgcccgaaggaccgcgcacctggtgcatgacccgcaagcccggtgcctga

SEQ ID NO: 36957 - DNA, 2607 bp, synthetic construct
  source 1..2607: mol_type = other DNA
atggccttaccagtgaccgccttgctcctgccgctggccttgctgctccacgccgccaggccgctcgaggaggacctgaagaacgtgttcccacctgaggtggccgtgttcgagcctagcaaggccgagatcgcccacacccagaaagccaccctcgtgtgcctggctaccggcttctaccccgaccatgtggaactgtcttggtgggtcaacggcaaagaggtgcacagcggcgtgtgtaccgacccccagccactgaaagaacagcccgccctgaacgacagccggtactgcctgagcagcagactgagagtgtccgccaccttctggcagaacccccggaaccacttcagatgccaggtgcagttctacggcctgagcgagaacgacgagtggacccaggacagagccaagcccgtgacccagatcgtgtctgccgaagcctggggcagagccgattgcggcatcaccagcgccagctaccaccagggcgtgctgagcgccaccatcctgtacgagatcctgctgggcaaggccaccctgtacgccgtgctggtgtctgccctggtgctgatggctatggtcaagcggaaggacagccggggaagggccaagcgatctggatctggagcaacaaacttctcactactcaaacaagcaggtgacgtggaggagaatcccgggcctactagcatggccttaccagtgaccgccttgctcctgccgctggccttgctgctccacgccgccaggccggacatccagatgacacagagccctagcagcctgtctgccagcgtgggagacagagtgaccatcacatgcaagagcagccagagcctgctggactccgatggcaagacctacctgaactggtatcagcagaagcccggcaaggcccctaagctgctgatctacctggtgtccaagctggatagcggcgtgcccagcagattttctggcagcggcagcggaaccgacttcaccctgacaatatccagcctccagcctgaggacttcgccacctactactgctggcaaggcacccactttccattcaccttcggccagggcaccaaggtggaaatcaaaagaggcggaggcggaagtggaggcggaggatctggcggcggaggctctgaagtgcagctggttgaatcaggcggaggactggttcagcctggcggatctctgagactgtcttgtgccgccagcggctacaccttcagcagctactggatgaactgggtccgacaggcccctggcaaaggactggaatgggtcggaatgatcgaccccagcgacagcgagacacactacaaccacatcttcaaggaccgcttcaccatcagcgccgacaccagcaagaataccgcctacctccagatgaactccctgagagccgaggacaccgccgtgtactactgcgccagaaacctgtatctgtggggccagggaaccctggtcacagtgtcatctacgcgtatccagaaccctgatcctgccgtgtaccagctgcgggatagcaagagcagcgacaagagcgtgtgtctgttcaccgacttcgacagccagaccaacgtgtcccagagcaaggactccgacgtgtacatcaccgataagtgcgtgctggacatgcggagcatggacttcaagagcaactccgccgtggcctggtccaacaagtccgatttcgcctgcgccaacgccttcaacaacagcattatccccgaggacacattcttcccaagcagcgacgtgccctgcgacgtgaagctggtggaaaagagcttcgagacagacaccaacctgaacttccagaacctgagcgtgatcggcttcagaatcctgctgctgaaagtggccggctttaacctgctgatgaccctgcggctgtggtccagccgcgccaagagaagcggatctggcgtgaagcagaccctgaatttcgacctgctgaagctggctggcgacgtggaatccaacccaggcccttctagaggccatatgaccgagtacaagcccacggtgcgcctcgccacccgcgacgacgtccccagggccgtacgcaccctcgccgccgcgttcgccgactaccccgccacgcgccacaccgtcgatccggaccgccacatcgagcgggtcaccgagctgcaagaactcttcctcacgcgcgtcgggctcgacatcggcaaggtgtgggtcgcggacgacggcgccgcggtggcggtctggaccacgccggagagcgtcgaagcgggggcggtgttcgccgagatcggcccgcgcatggccgagttgagcggttcccggctggccgcgcagcaacagatggaaggcctcctggcgccgcaccggcccaaggagcccgcgtggttcctggccaccgtcggcgtctcgcccgaccaccagggcaagggtctgggcagcgccgtcgtgctccccggagtggaggcggccgagcgcgccggggtgcccgccttcctggagacctccgcgccccgcaacctccccttctacgagcggctcggcttcaccgtcaccgccgacgtcgaggtgcccgaaggaccgcgcacctggtgcatgacccgcaagcccggtgcctga

SEQ ID NO: 36958 - DNA, 2607 bp, synthetic construct
  source 1..2607: mol_type = other DNA
atggccttaccagtgaccgccttgctcctgccgctggccttgctgctccacgccgccaggccgctcgagatccagaaccctgatcctgccgtgtaccagctgcgggatagcaagagcagcgacaagagcgtgtgtctgttcaccgacttcgacagccagaccaacgtgtcccagagcaaggactccgacgtgtacatcaccgataagtgcgtgctggacatgcggagcatggacttcaagagcaactccgccgtggcctggtccaacaagtccgatttcgcctgcgccaacgccttcaacaacagcattatccccgaggacacattcttcccaagcagcgacgtgccctgcgacgtgaagctggtggaaaagagcttcgagacagacaccaacctgaacttccagaacctgagcgtgatcggcttcagaatcctgctgctgaaagtggccggctttaacctgctgatgaccctgcggctgtggtccagcagggccaagcgatctggatctggagcaacaaacttctcactactcaaacaagcaggtgacgtggaggagaatcccgggcctactagcatggccttaccagtgaccgccttgctcctgccgctggccttgctgctccacgccgccaggccggacatccagatgacacagagccctagcagcctgtctgccagcgtgggagacagagtgaccatcacatgcaagagcagccagagcctgctggactccgatggcaagacctacctgaactggtatcagcagaagcccggcaaggcccctaagctgctgatctacctggtgtccaagctggatagcggcgtgcccagcagattttctggcagcggcagcggaaccgacttcaccctgacaatatccagcctccagcctgaggacttcgccacctactactgctggcaaggcacccactttccattcaccttcggccagggcaccaaggtggaaatcaaaagaggcggaggcggaagtggaggcggaggatctggcggcggaggctctgaagtgcagctggttgaatcaggcggaggactggttcagcctggcggatctctgagactgtcttgtgccgccagcggctacaccttcagcagctactggatgaactgggtccgacaggcccctggcaaaggactggaatgggtcggaatgatcgaccccagcgacagcgagacacactacaaccacatcttcaaggaccgcttcaccatcagcgccgacaccagcaagaataccgcctacctccagatgaactccctgagagccgaggacaccgccgtgtactactgcgccagaaacctgtatctgtggggccagggaaccctggtcacagtgtcatctacgcgtgaggacctgaagaacgtgttcccacctgaggtggccgtgttcgagcctagcaaggccgagatcgcccacacccagaaagccaccctcgtgtgcctggctaccggcttctaccccgaccatgtggaactgtcttggtgggtcaacggcaaagaggtgcacagcggcgtgtgtaccgacccccagccactgaaagaacagcccgccctgaacgacagccggtactgcctgagcagcagactgagagtgtccgccaccttctggcagaacccccggaaccacttcagatgccaggtgcagttctacggcctgagcgagaacgacgagtggacccaggacagagccaagcccgtgacccagatcgtgtctgccgaagcctggggcagagccgattgcggcatcaccagcgccagctaccaccagggcgtgctgagcgccaccatcctgtacgagatcctgctgggcaaggccaccctgtacgccgtgctggtgtctgccctggtgctgatggctatggtcaagcggaaggacagccggggacgcgccaagagaagcggatctggcgtgaagcagaccctgaatttcgacctgctgaagctggctggcgacgtggaatccaacccaggcccttctagaggccatatgaccgagtacaagcccacggtgcgcctcgccacccgcgacgacgtccccagggccgtacgcaccctcgccgccgcgttcgccgactaccccgccacgcgccacaccgtcgatccggaccgccacatcgagcgggtcaccgagctgcaagaactcttcctcacgcgcgtcgggctcgacatcggcaaggtgtgggtcgcggacgacggcgccgcggtggcggtctggaccacgccggagagcgtcgaagcgggggcggtgttcgccgagatcggcccgcgcatggccgagttgagcggttcccggctggccgcgcagcaacagatggaaggcctcctggcgccgcaccggcccaaggagcccgcgtggttcctggccaccgtcggcgtctcgcccgaccaccagggcaagggtctgggcagcgccgtcgtgctccccggagtggaggcggccgagcgcgccggggtgcccgccttcctggagacctccgcgccccgcaacctccccttctacgagcggctcggcttcaccgtcaccgccgacgtcgaggtgcccgaaggaccgcgcacctggtgcatgacccgcaagcccggtgcctga

SEQ ID NO: 36959 - DNA, 2286 bp, synthetic construct
  source 1..2286: mol_type = other DNA
atggccttaccagtgaccgccttgctcctgccgctggccttgctgctccacgccgccaggccgctcgagcagagttttgggttgttggaccctaaattgtgctatctgttggacggaatcctgttcatttacggagtgatcctgaccgcattgttcctgcgggttaagttttccagatccgcagacgcacccgcttaccaacaagggcagaaccaactctacaatgaacttaatttggggcggagggaagagtacgacgttctggacaaaaggaggggacgagatcccgagatgggcggaaagcctcagcgaaggaagaatccgcaagaggggctttataacgaactccagaaagataaaatggcagaagcctatagtgagattgggatgaagggagaaaggaggaggggtaaaggtcacgatgggttgtaccaaggattgagcacagccactaaagatacctatgatgcgctccacatgcaggccctgccgccaagaagggccaagcgatctggatctggagcaacaaacttctcactactcaaacaagcaggtgacgtggaggagaatcccgggcctactagcatggccttaccagtgaccgccttgctcctgccgctggccttgctgctccacgccgccaggccggacatccagatgacacagagccctagcagcctgtctgccagcgtgggagacagagtgaccatcacatgcaagagcagccagagcctgctggactccgatggcaagacctacctgaactggtatcagcagaagcccggcaaggcccctaagctgctgatctacctggtgtccaagctggatagcggcgtgcccagcagattttctggcagcggcagcggaaccgacttcaccctgacaatatccagcctccagcctgaggacttcgccacctactactgctggcaaggcacccactttccattcaccttcggccagggcaccaaggtggaaatcaaaagaggcggaggcggaagtggaggcggaggatctggcggcggaggctctgaagtgcagctggttgaatcaggcggaggactggttcagcctggcggatctctgagactgtcttgtgccgccagcggctacaccttcagcagctactggatgaactgggtccgacaggcccctggcaaaggactggaatgggtcggaatgatcgaccccagcgacagcgagacacactacaaccacatcttcaaggaccgcttcaccatcagcgccgacaccagcaagaataccgcctacctccagatgaactccctgagagccgaggacaccgccgtgtactactgcgccagaaacctgtatctgtggggccagggaaccctggtcacagtgtcatctacgcgtgagctgggagagcctcagctgtgctatatcctggacgccatcctgtttctgtacggcatcgtgctgaccctgctgtactgccggctgaagatccaagtgcggaaggccgccatcaccagctacgagaaatccgacggcgtgtacaccggcctgagcaccagaaatcaagagacatacgagacactgaagcacgaaaagcctccacaacgcgccaagagaagcggatctggcgtgaagcagaccctgaatttcgacctgctgaagctggctggcgacgtggaatccaacccaggcccttctagaggccatatgaccgagtacaagcccacggtgcgcctcgccacccgcgacgacgtccccagggccgtacgcaccctcgccgccgcgttcgccgactaccccgccacgcgccacaccgtcgatccggaccgccacatcgagcgggtcaccgagctgcaagaactcttcctcacgcgcgtcgggctcgacatcggcaaggtgtgggtcgcggacgacggcgccgcggtggcggtctggaccacgccggagagcgtcgaagcgggggcggtgttcgccgagatcggcccgcgcatggccgagttgagcggttcccggctggccgcgcagcaacagatggaaggcctcctggcgccgcaccggcccaaggagcccgcgtggttcctggccaccgtcggcgtctcgcccgaccaccagggcaagggtctgggcagcgccgtcgtgctccccggagtggaggcggccgagcgcgccggggtgcccgccttcctggagacctccgcgccccgcaacctccccttctacgagcggctcggcttcaccgtcaccgccgacgtcgaggtgcccgaaggaccgcgcacctggtgcatgacccgcaagcccggtgcctga

SEQ ID NO: 36960 - DNA, 2919 bp, synthetic construct; identical to SEQ ID NO: 36951
  source 1..2919: mol_type = other DNA

SEQ ID NO: 36961 - DNA, 2919 bp, synthetic construct; identical to SEQ ID NO: 36952
  source 1..2919: mol_type = other DNA

SEQ ID NO: 36962 - DNA, 2916 bp, synthetic construct
  source 1..2916: mol_type = other DNA
atggccttaccagtgaccgccttgctcctgccgctggccttgctgctccacgccgccaggccgctcgaggaggaggacctgaagaacgtgttcccacctgaggtggccgtgttcgagcctagcgaggccgagatcagccacacccagaaagccaccctcgtgtgcctggctaccggcttctaccccgaccatgtggaactgtcttggtgggtcaacggcaaagaggtgcacagcggcgtgtgtaccgacccccagccactgaaagaacagcccgccctgaacgacagccggtactgcctgagcagcagactgagagtgtccgccaccttctggcagaacccccggaaccacttcagatgccaggtgcagttctacggcctgagcgagaacgacgagtggacccaggacagagccaagcccgtgacccagatcgtgtctgccgaagcctggggcagagccgatgatgtgattaagatccactggcaggaaaagaagtccaacaccatcctgggcagccaggaaggcaacaccatgaagaccaacgacacctacatgaagttcagctggctgaccgtgcccgagaagtccctggacaaagaacacagatgcatcgtgcggcacgaaaacaacaagaacggcgtggaccaggaaatcatcttcccacccatcaagaccgatgtgattacaatggaccccaaggacaactgctccaaggacgccaacgataccctgctgctccagctgaccaacaccagcgcctactacatgtacttgttgctgctgctgaagtccgtggtgtacttcgccatcatcacatgctgcctgctgcggagaaccgccttctgctgcaacggcgagaagtctagggccaagcgatctggatctggagcaacaaacttctcactactcaaacaagcaggtgacgtggaggagaatcccgggcctactagcatggccttaccagtgaccgccttgctcctgccgctggccttgctgctccacgccgccaggccggacatccagatgacacagagccctagcagcctgtctgccagcgtgggagacagagtgaccatcacatgcaagagcagccagagcctgctggactccgatggcaagacctacctgaactggtatcagcagaagcccggcaaggcccctaagctgctgatctacctggtgtccaagctggatagcggcgtgcccagcagattttctggcagcggcagcggaaccgacttcaccctgacaatatccagcctccagcctgaggacttcgccacctactactgctggcaaggcacccactttccattcaccttcggccagggcaccaaggtggaaatcaaaagaggcggaggcggaagtggaggcggaggatctggcggcggaggctctgaagtgcagctggttgaatcaggcggaggactggttcagcctggcggatctctgagactgtcttgtgccgccagcggctacaccttcagcagctactggatgaactgggtccgacaggcccctggcaaaggactggaatgggtcggaatgatcgaccccagcgacagcgagacacactacaaccacatcttcaaggaccgcttcaccatcagcgccgacaccagcaagaataccgcctacctccagatgaactccctgagagccgaggacaccgccgtgtactactgcgccagaaacctgtatctgtggggccagggaaccctggtcacagtgtcatctacgcgtatccagaaccctgatcctgccgtgtaccagctgcgggatagcaagagcagcgacaagagcgtgtgtctgttcaccgacttcgacagccagaccaacgtgtcccagagcaaggactccgacgtgtacatcaccgataagtgcgtgctggacatgcggagcatggacttcaagagcaactccgccgtggcctggtccaacaagtccgatttcgcctgcgccaacgccttcaacaacagcattatccccgaggacacattcttcccaagccccgagagcagcgactccaccgaccacgtgaagcccaaagagacagagaacaccaagcagcccagcaagagctgccacaagcccaaggccatcgtgcacaccgagaaagtgaacatgatgagcctgaccgtgctgggcctgcggatgctgttcgccaaaaccgtggccgtgaacttcctgctgaccgccaagctgttcttcctccgcgccaagagaagcggatctggcgtgaagcagaccctgaatttcgacctgctgaagctggctggcgacgtggaatccaacccaggcccttctagaggccatatgaccgagtacaagcccacggtgcgcctcgccacccgcgacgacgtccccagggccgtacgcaccctcgccgccgcgttcgccgactaccccgccacgcgccacaccgtcgatccggaccgccacatcgagcgggtcaccgagctgcaagaactcttcctcacgcgcgtcgggctcgacatcggcaaggtgtgggtcgcggacgacggcgccgcggtggcggtctggaccacgccggagagcgtcgaagcgggggcggtgttcgccgagatcggcccgcgcatggccgagttgagcggttcccggctggccgcgcagcaacagatggaaggcctcctggcgccgcaccggcccaaggagcccgcgtggttcctggccaccgtcggcgtctcgcccgaccaccagggcaagggtctgggcagcgccgtcgtgctccccggagtggaggcggccgagcgcgccggggtgcccgccttcctggagacctccgcgccccgcaacctccccttctacgagcggctcggcttcaccgtcaccgccgacgtcgaggtgcccgaaggaccgcgcacctggtgcatgacccgcaagcccggtgcctga

SEQ ID NO: 36963 - DNA, 2916 bp, synthetic construct
  source 1..2916: mol_type = other DNA
atggccttaccagtgaccgccttgctcctgccgctggccttgctgctccacgccgccaggccgctcgagatccagaaccctgatcctgccgtgtaccagctgcgggatagcaagagcagcgacaagagcgtgtgtctgttcaccgacttcgacagccagaccaacgtgtcccagagcaaggactccgacgtgtacatcaccgataagtgcgtgctggacatgcggagcatggacttcaagagcaactccgccgtggcctggtccaacaagtccgatttcgcctgcgccaacgccttcaacaacagcattatccccgaggacacattcttcccaagccccgagagcagcgactccaccgaccacgtgaagcccaaagagacagagaacaccaagcagcccagcaagagctgccacaagcccaaggccatcgtgcacaccgagaaagtgaacatgatgagcctgaccgtgctgggcctgcggatgctgttcgccaaaaccgtggccgtgaacttcctgctgaccgccaagctgttcttcctcagggccaagcgatctggatctggagcaacaaacttctcactactcaaacaagcaggtgacgtggaggagaatcccgggcctactagcatggccttaccagtgaccgccttgctcctgccgctggccttgctgctccacgccgccaggccggacatccagatgacacagagccctagcagcctgtctgccagcgtgggagacagagtgaccatcacatgcaagagcagccagagcctgctggactccgatggcaagacctacctgaactggtatcagcagaagcccggcaaggcccctaagctgctgatctacctggtgtccaagctggatagcggcgtgcccagcagattttctggcagcggcagcggaaccgacttcaccctgacaatatccagcctccagcctgaggacttcgccacctactactgctggcaaggcacccactttccattcaccttcggccagggcaccaaggtggaaatcaaaagaggcggaggcggaagtggaggcggaggatctggcggcggaggctctgaagtgcagctggttgaatcaggcggaggactggttcagcctggcggatctctgagactgtcttgtgccgccagcggctacaccttcagcagctactggatgaactgggtccgacaggcccctggcaaaggactggaatgggtcggaatgatcgaccccagcgacagcgagacacactacaaccacatcttcaaggaccgcttcaccatcagcgccgacaccagcaagaataccgcctacctccagatgaactccctgagagccgaggacaccgccgtgtactactgcgccagaaacctgtatctgtggggccagggaaccctggtcacagtgtcatctacgcgtgaggaggacctgaagaacgtgttcccacctgaggtggccgtgttcgagcctagcgaggccgagatcagccacacccagaaagccaccctcgtgtgcctggctaccggcttctaccccgaccatgtggaactgtcttggtgggtcaacggcaaagaggtgcacagcggcgtgtgtaccgacccccagccactgaaagaacagcccgccctgaacgacagccggtactgcctgagcagcagactgagagtgtccgccaccttctggcagaacccccggaaccacttcagatgccaggtgcagttctacggcctgagcgagaacgacgagtggacccaggacagagccaagcccgtgacccagatcgtgtctgccgaagcctggggcagagccgatgatgtgattaagatccactggcaggaaaagaagtccaacaccatcctgggcagccaggaaggcaacaccatgaagaccaacgacacctacatgaagttcagctggctgaccgtgcccgagaagtccctggacaaagaacacagatgcatcgtgcggcacgaaaacaacaagaacggcgtggaccaggaaatcatcttcccacccatcaagaccgatgtgattacaatggaccccaaggacaactgctccaaggacgccaacgataccctgctgctccagctgaccaacaccagcgcctactacatgtacttgttgctgctgctgaagtccgtggtgtacttcgccatcatcacatgctgcctgctgcggagaaccgccttctgctgcaacggcgagaagtctcgcgccaagagaagcggatctggcgtgaagcagaccctgaatttcgacctgctgaagctggctggcgacgtggaatccaacccaggcccttctagaggccatatgaccgagtacaagcccacggtgcgcctcgccacccgcgacgacgtccccagggccgtacgcaccctcgccgccgcgttcgccgactaccccgccacgcgccacaccgtcgatccggaccgccacatcgagcgggtcaccgagctgcaagaactcttcctcacgcgcgtcgggctcgacatcggcaaggtgtgggtcgcggacgacggcgccgcggtggcggtctggaccacgccggagagcgtcgaagcgggggcggtgttcgccgagatcggcccgcgcatggccgagttgagcggttcccggctggccgcgcagcaacagatggaaggcctcctggcgccgcaccggcccaaggagcccgcgtggttcctggccaccgtcggcgtctcgcccgaccaccagggcaagggtctgggcagcgccgtcgtgctccccggagtggaggcggccgagcgcgccggggtgcccgccttcctggagacctccgcgccccgcaacctccccttctacgagcggctcggcttcaccgtcaccgccgacgtcgaggtgcccgaaggaccgcgcacctggtgcatgacccgcaagcccggtgcctga

SEQ ID NO: 36964 - DNA, 2607 bp, synthetic construct
  source 1..2607: mol_type = other DNA
atggccttaccagtgaccgccttgctcctgccgctggccttgctgctccacgccgccaggccgctcgaggaggacctgaagaacgtgttcccacctgaggtggccgtgttcgagcctagcgaggccgagatcagccacacccagaaagccaccctcgtgtgcctggctaccggcttctaccccgaccatgtggaactgtcttggtgggtcaacggcaaagaggtgcacagcggcgtgtctaccgacccccagccactgaaagaacagcccgccctgaacgacagccggtactgcctgagcagcagactgagagtgtccgccaccttctggcagaacccccggaaccacttcagatgccaggtgcagttctacggcctgagcgagaacgacgagtggacccaggacagagccaagcccgtgacccagatcgtgtctgccgaagcctggggcagagccgattgcggctttaccagcgagagctaccagcagggcgtgctgagcgccaccaacctgagcgtgatcggcttcagaatcctgctgctgaaagtggccggctttaacctgctgatgaccctgcggctgtggtccagcagggccaagcgatctggatctggagcaacaaacttctcactactcaaacaagcaggtgacgtggaggagaatcccgggcctactagcatggccttaccagtgaccgccttgctcctgccgctggccttgctgctccacgccgccaggccggacatccagatgacacagagccctagcagcctgtctgccagcgtgggagacagagtgaccatcacatgcaagagcagccagagcctgctggactccgatggcaagacctacctgaactggtatcagcagaagcccggcaaggcccctaagctgctgatctacctggtgtccaagctggatagcggcgtgcccagcagattttctggcagcggcagcggaaccgacttcaccctgacaatatccagcctccagcctgaggacttcgccacctactactgctggcaaggcacccactttccattcaccttcggccagggcaccaaggtggaaatcaaaagaggcggaggcggaagtggaggcggaggatctggcggcggaggctctgaagtgcagctggttgaatcaggcggaggactggttcagcctggcggatctctgagactgtcttgtgccgccagcggctacaccttcagcagctactggatgaactgggtccgacaggcccctggcaaaggactggaatgggtcggaatgatcgaccccagcgacagcgagacacactacaaccacatcttcaaggaccgcttcaccatcagcgccgacaccagcaagaataccgcctacctccagatgaactccctgagagccgaggacaccgccgtgtactactgcgccagaaacctgtatctgtggggccagggaaccctggtcacagtgtcatctacgcgtatccagaaccctgatcctgccgtgtaccagctgcgggatagcaagagcagcgacaagagcgtgtgtctgttcaccgacttcgacagccagaccaacgtgtcccagagcaaggactccgacgtgtacatcaccgataagaccgtgctggacatgcggagcatggacttcaagagcaactccgccgtggcctggtccaacaagtccgatttcgcctgcgccaacgccttcaacaacagcattatccccgaggacacattcttcccaagccccgagagcagctgcgacgtgaagctggtggaaaagagcttcgagacagacaccaacctgaacttccagatcctgtacgagatcctgctgggcaaggccaccctgtacgccgtgctggtgtctgccctggtgctgatggctatggtcaagcggaaggacagccggggacgcgccaagagaagcggatctggcgtgaagcagaccctgaatttcgacctgctgaagctggctggcgacgtggaatccaacccaggcccttctagaggccatatgaccgagtacaagcccacggtgcgcctcgccacccgcgacgacgtccccagggccgtacgcaccctcgccgccgcgttcgccgactaccccgccacgcgccacaccgtcgatccggaccgccacatcgagcgggtcaccgagctgcaagaactcttcctcacgcgcgtcgggctcgacatcggcaaggtgtgggtcgcggacgacggcgccgcggtggcggtctggaccacgccggagagcgtcgaagcgggggcggtgttcgccgagatcggcccgcgcatggccgagttgagcggttcccggctggccgcgcagcaacagatggaaggcctcctggcgccgcaccggcccaaggagcccgcgtggttcctggccaccgtcggcgtctcgcccgaccaccagggcaagggtctgggcagcgccgtcgtgctccccggagtggaggcggccgagcgcgccggggtgcccgccttcctggagacctccgcgccccgcaacctccccttctacgagcggctcggcttcaccgtcaccgccgacgtcgaggtgcccgaaggaccgcgcacctggtgcatgacccgcaagcccggtgcctga

SEQ ID NO: 36965 - DNA, 2607 bp, synthetic construct
  source 1..2607: mol_type = other DNA
atggccttaccagtgaccgccttgctcctgccgctggccttgctgctccacgccgccaggccgctcgagatccagaaccctgatcctgccgtgtaccagctgcgggatagcaagagcagcgacaagagcgtgtgtctgttcaccgacttcgacagccagaccaacgtgtcccagagcaaggactccgacgtgtacatcaccgataagaccgtgctggacatgcggagcatggacttcaagagcaactccgccgtggcctggtccaacaagtccgatttcgcctgcgccaacgccttcaacaacagcattatccccgaggacacattcttcccaagccccgagagcagctgcgacgtgaagctggtggaaaagagcttcgagacagacaccaacctgaacttccagatcctgtacgagatcctgctgggcaaggccaccctgtacgccgtgctggtgtctgccctggtgctgatggctatggtcaagcggaaggacagccggggaagggccaagcgatctggatctggagcaacaaacttctcactactcaaacaagcaggtgacgtggaggagaatcccgggcctactagcatggccttaccagtgaccgccttgctcctgccgctggccttgctgctccacgccgccaggccggacatccagatgacacagagccctagcagcctgtctgccagcgtgggagacagagtgaccatcacatgcaagagcagccagagcctgctggactccgatggcaagacctacctgaactggtatcagcagaagcccggcaaggcccctaagctgctgatctacctggtgtccaagctggatagcggcgtgcccagcagattttctggcagcggcagcggaaccgacttcaccctgacaatatccagcctccagcctgaggacttcgccacctactactgctggcaaggcacccactttccattcaccttcggccagggcaccaaggtggaaatcaaaagaggcggaggcggaagtggaggcggaggatctggcggcggaggctctgaagtgcagctggttgaatcaggcggaggactggttcagcctggcggatctctgagactgtcttgtgccgccagcggctacaccttcagcagctactggatgaactgggtccgacaggcccctggcaaaggactggaatgggtcggaatgatcgaccccagcgacagcgagacacactacaaccacatcttcaaggaccgcttcaccatcagcgccgacaccagcaagaataccgcctacctccagatgaactccctgagagccgaggacaccgccgtgtactactgcgccagaaacctgtatctgtggggccagggaaccctggtcacagtgtcatctacgcgtgaggacctgaagaacgtgttcccacctgaggtggccgtgttcgagcctagcgaggccgagatcagccacacccagaaagccaccctcgtgtgcctggctaccggcttctaccccgaccatgtggaactgtcttggtgggtcaacggcaaagaggtgcacagcggcgtgtctaccgacccccagccactgaaagaacagcccgccctgaacgacagccggtactgcctgagcagcagactgagagtgtccgccaccttctggcagaacccccggaaccacttcagatgccaggtgcagttctacggcctgagcgagaacgacgagtggacccaggacagagccaagcccgtgacccagatcgtgtctgccgaagcctggggcagagccgattgcggctttaccagcgagagctaccagcagggcgtgctgagcgccaccaacctgagcgtgatcggcttcagaatcctgctgctgaaagtggccggctttaacctgctgatgaccctgcggctgtggtccagccgcgccaagagaagcggatctggcgtgaagcagaccctgaatttcgacctgctgaagctggctggcgacgtggaatccaacccaggcccttctagaggccatatgaccgagtacaagcccacggtgcgcctcgccacccgcgacgacgtccccagggccgtacgcaccctcgccgccgcgttcgccgactaccccgccacgcgccacaccgtcgatccggaccgccacatcgagcgggtcaccgagctgcaagaactcttcctcacgcgcgtcgggctcgacatcggcaaggtgtgggtcgcggacgacggcgccgcggtggcggtctggaccacgccggagagcgtcgaagcgggggcggtgttcgccgagatcggcccgcgcatggccgagttgagcggttcccggctggccgcgcagcaacagatggaaggcctcctggcgccgcaccggcccaaggagcccgcgtggttcctggccaccgtcggcgtctcgcccgaccaccagggcaagggtctgggcagcgccgtcgtgctccccggagtggaggcggccgagcgcgccggggtgcccgccttcctggagacctccgcgccccgcaacctccccttctacgagcggctcggcttcaccgtcaccgccgacgtcgaggtgcccgaaggaccgcgcacctggtgcatgacccgcaagcccggtgcctga

SEQ ID NO: 36966 - DNA, 2607 bp, synthetic construct
  source 1..2607: mol_type = other DNA
atggccttaccagtgaccgccttgctcctgccgctggccttgctgctccacgccgccaggccgctcgaggaggacctgaagaacgtgttcccacctgaggtggccgtgttcgagcctagcgaggccgagatcagccacacccagaaagccaccctcgtgtgcctggctaccggcttctaccccgaccatgtggaactgtcttggtgggtcaacggcaaagaggtgcacagcggcgtgtgtaccgacccccagccactgaaagaacagcccgccctgaacgacagccggtactgcctgagcagcagactgagagtgtccgccaccttctggcagaacccccggaaccacttcagatgccaggtgcagttctacggcctgagcgagaacgacgagtggacccaggacagagccaagcccgtgacccagatcgtgtctgccgaagcctggggcagagccgattgcgacgtgaagctggtggaaaagagcttcgagacagacaccaacctgaacttccagaacctgagcgtgatcggcttcagaatcctgctgctgaaagtggccggctttaacctgctgatgaccctgcggctgtggtccagcagggccaagcgatctggatctggagcaacaaacttctcactactcaaacaagcaggtgacgtggaggagaatcccgggcctactagcatggccttaccagtgaccgccttgctcctgccgctggccttgctgctccacgccgccaggccggacatccagatgacacagagccctagcagcctgtctgccagcgtgggagacagagtgaccatcacatgcaagagcagccagagcctgctggactccgatggcaagacctacctgaactggtatcagcagaagcccggcaaggcccctaagctgctgatctacctggtgtccaagctggatagcggcgtgcccagcagattttctggcagcggcagcggaaccgacttcaccctgacaatatccagcctccagcctgaggacttcgccacctactactgctggcaaggcacccactttccattcaccttcggccagggcaccaaggtggaaatcaaaagaggcggaggcggaagtggaggcggaggatctggcggcggaggctctgaagtgcagctggttgaatcaggcggaggactggttcagcctggcggatctctgagactgtcttgtgccgccagcggctacaccttcagcagctactggatgaactgggtccgacaggcccctggcaaaggactggaatgggtcggaatgatcgaccccagcgacagcgagacacactacaaccacatcttcaaggaccgcttcaccatcagcgccgacaccagcaagaataccgcctacctccagatgaactccctgagagccgaggacaccgccgtgtactactgcgccagaaacctgtatctgtggggccagggaaccctggtcacagtgtcatctacgcgtatccagaaccctgatcctgccgtgtaccagctgcgggatagcaagagcagcgacaagagcgtgtgtctgttcaccgacttcgacagccagaccaacgtgtcccagagcaaggactccgacgtgtacatcaccgataagtgcgtgctggacatgcggagcatggacttcaagagcaactccgccgtggcctggtccaacaagtccgatttcgcctgcgccaacgccttcaacaacagcattatccccgaggacacattcttcccaagccccgagagcagctgcggctttaccagcgagagctaccagcagggcgtgctgagcgccaccatcctgtacgagatcctgctgggcaaggccaccctgtacgccgtgctggtgtctgccctggtgctgatggctatggtcaagcggaaggacagccggggacgcgccaagagaagcggatctggcgtgaagcagaccctgaatttcgacctgctgaagctggctggcgacgtggaatccaacccaggcccttctagaggccatatgaccgagtacaagcccacggtgcgcctcgccacccgcgacgacgtccccagggccgtacgcaccctcgccgccgcgttcgccgactaccccgccacgcgccacaccgtcgatccggaccgccacatcgagcgggtcaccgagctgcaagaactcttcctcacgcgcgtcgggctcgacatcggcaaggtgtgggtcgcggacgacggcgccgcggtggcggtctggaccacgccggagagcgtcgaagcgggggcggtgttcgccgagatcggcccgcgcatggccgagttgagcggttcccggctggccgcgcagcaacagatggaaggcctcctggcgccgcaccggcccaaggagcccgcgtggttcctggccaccgtcggcgtctcgcccgaccaccagggcaagggtctgggcagcgccgtcgtgctccccggagtggaggcggccgagcgcgccggggtgcccgccttcctggagacctccgcgccccgcaacctccccttctacgagcggctcggcttcaccgtcaccgccgacgtcgaggtgcccgaaggaccgcgcacctggtgcatgacccgcaagcccggtgcctga

SEQ ID NO: 36967 - DNA, 2607 bp, synthetic construct
  source 1..2607: mol_type = other DNA
atggccttaccagtgaccgccttgctcctgccgctggccttgctgctccacgccgccaggccgctcgaggaggacctgaagaacgtgttcccacctgaggtggccgtgttcgagcctagcgaggccgagatcagccacacccagaaagccaccctcgtgtgcctggctaccggcttctaccccgaccatgtggaactgtcttggtgggtcaacggcaaagaggtgcacagcggcgtgtctaccgacccccagccactgaaagaacagcccgccctgaacgacagccggtactgcctgagcagcagactgagagtgtccgccaccttctggcagaacccccggaaccacttcagatgccaggtgcagttctacggcctgagcgagaacgacgagtggacccaggacagagccaagcccgtgacccagatcgtgtctgccgaagcctggggcagagccgattgcgacgtgaagctggtggaaaagagcttcgagacagacaccaacctgaacttccagaacctgagcgtgatcggcttcagaatcctgctgctgaaagtggccggctttaacctgctgatgaccctgcggctgtggtccagcagggccaagcgatctggatctggagcaacaaacttctcactactcaaacaagcaggtgacgtggaggagaatcccgggcctactagcatggccttaccagtgaccgccttgctcctgccgctggccttgctgctccacgccgccaggccggacatccagatgacacagagccctagcagcctgtctgccagcgtgggagacagagtgaccatcacatgcaagagcagccagagcctgctggactccgatggcaagacctacctgaactggtatcagcagaagcccggcaaggcccctaagctgctgatctacctggtgtccaagctggatagcggcgtgcccagcagattttctggcagcggcagcggaaccgacttcaccctgacaatatccagcctccagcctgaggacttcgccacctactactgctggcaaggcacccactttccattcaccttcggccagggcaccaaggtggaaatcaaaagaggcggaggcggaagtggaggcggaggatctggcggcggaggctctgaagtgcagctggttgaatcaggcggaggactggttcagcctggcggatctctgagactgtcttgtgccgccagcggctacaccttcagcagctactggatgaactgggtccgacaggcccctggcaaaggactggaatgggtcggaatgatcgaccccagcgacagcgagacacactacaaccacatcttcaaggaccgcttcaccatcagcgccgacaccagcaagaataccgcctacctccagatgaactccctgagagccgaggacaccgccgtgtactactgcgccagaaacctgtatctgtggggccagggaaccctggtcacagtgtcatctacgcgtatccagaaccctgatcctgccgtgtaccagctgcgggatagcaagagcagcgacaagagcgtgtgtctgttcaccgacttcgacagccagaccaacgtgtcccagagcaaggactccgacgtgtacatcaccgataagaccgtgctggacatgcggagcatggacttcaagagcaactccgccgtggcctggtccaacaagtccgatttcgcctgcgccaacgccttcaacaacagcattatccccgaggacacattcttcccaagccccgagagcagctgcggctttaccagcgagagctaccagcagggcgtgctgagcgccaccatcctgtacgagatcctgctgggcaaggccaccctgtacgccgtgctggtgtctgccctggtgctgatggctatggtcaagcggaaggacagccggggacgcgccaagagaagcggatctggcgtgaagcagaccctgaatttcgacctgctgaagctggctggcgacgtggaatccaacccaggcccttctagaggccatatgaccgagtacaagcccacggtgcgcctcgccacccgcgacgacgtccccagggccgtacgcaccctcgccgccgcgttcgccgactaccccgccacgcgccacaccgtcgatccggaccgccacatcgagcgggtcaccgagctgcaagaactcttcctcacgcgcgtcgggctcgacatcggcaaggtgtgggtcgcggacgacggcgccgcggtggcggtctggaccacgccggagagcgtcgaagcgggggcggtgttcgccgagatcggcccgcgcatggccgagttgagcggttcccggctggccgcgcagcaacagatggaaggcctcctggcgccgcaccggcccaaggagcccgcgtggttcctggccaccgtcggcgtctcgcccgaccaccagggcaagggtctgggcagcgccgtcgtgctccccggagtggaggcggccgagcgcgccggggtgcccgccttcctggagacctccgcgccccgcaacctccccttctacgagcggctcggcttcaccgtcaccgccgacgtcgaggtgcccgaaggaccgcgcacctggtgcatgacccgcaagcccggtgcctga

SEQ ID NO: 36968 - DNA, 2916 bp, synthetic construct
  source 1..2916: mol_type = other DNA
atggccttaccagtgaccgccttgctcctgccgctggccttgctgctccacgccgccaggccgctcgaggaggaggacctgaagaacgtgttcccacctgaggtggccgtgttcgagcctagcgaggccgagatcagccacacccagaaagccaccctcgtgtgcctggctaccggcttctaccccgaccatgtggaactgtcttggtgggtcaacggcaaagaggtgcacagcggcgtgtctaccgacccccagccactgaaagaacagcccgccctgaacgacagccggtactgcctgagcagcagactgagagtgtccgccaccttctggcagaacccccggaaccacttcagatgccaggtgcagttctacggcctgagcgagaacgacgagtggacccaggacagagccaagcccgtgacccagatcgtgtctgccgaagcctggggcagagccgatgatgtgattaagatccactggcaggaaaagaagtccaacaccatcctgggcagccaggaaggcaacaccatgaagaccaacgacacctacatgaagttcagctggctgaccgtgcccgagaagtccctggacaaagaacacagatgcatcgtgcggcacgaaaacaacaagaacggcgtggaccaggaaatcatcttcccacccatcaagaccgatgtgattacaatggaccccaaggacaactgctccaaggacgccaacgataccctgctgctccagctgaccaacaccagcgcctactacatgtacttgttgctgctgctgaagtccgtggtgtacttcgccatcatcacatgctgcctgctgcggagaaccgccttctgctgcaacggcgagaagtctagggccaagcgatctggatctggagcaacaaacttctcactactcaaacaagcaggtgacgtggaggagaatcccgggcctactagcatggccttaccagtgaccgccttgctcctgccgctggccttgctgctccacgccgccaggccggacatccagatgacacagagccctagcagcctgtctgccagcgtgggagacagagtgaccatcacatgcaagagcagccagagcctgctggactccgatggcaagacctacctgaactggtatcagcagaagcccggcaaggcccctaagctgctgatctacctggtgtccaagctggatagcggcgtgcccagcagattttctggcagcggcagcggaaccgacttcaccctgacaatatccagcctccagcctgaggacttcgccacctactactgctggcaaggcacccactttccattcaccttcggccagggcaccaaggtggaaatcaaaagaggcggaggcggaagtggaggcggaggatctggcggcggaggctctgaagtgcagctggttgaatcaggcggaggactggttcagcctggcggatctctgagactgtcttgtgccgccagcggctacaccttcagcagctactggatgaactgggtccgacaggcccctggcaaaggactggaatgggtcggaatgatcgaccccagcgacagcgagacacactacaaccacatcttcaaggaccgcttcaccatcagcgccgacaccagcaagaataccgcctacctccagatgaactccctgagagccgaggacaccgccgtgtactactgcgccagaaacctgtatctgtggggccagggaaccctggtcacagtgtcatctacgcgtatccagaaccctgatcctgccgtgtaccagctgcgggatagcaagagcagcgacaagagcgtgtgtctgttcaccgacttcgacagccagaccaacgtgtcccagagcaaggactccgacgtgtacatcaccgataagaccgtgctggacatgcggagcatggacttcaagagcaactccgccgtggcctggtccaacaagtccgatttcgcctgcgccaacgccttcaacaacagcattatccccgaggacacattcttcccaagccccgagagcagcgactccaccgaccacgtgaagcccaaagagacagagaacaccaagcagcccagcaagagctgccacaagcccaaggccatcgtgcacaccgagaaagtgaacatgatgagcctgaccgtgctgggcctgcggatgctgttcgccaaaaccgtggccgtgaacttcctgctgaccgccaagctgttcttcctccgcgccaagagaagcggatctggcgtgaagcagaccctgaatttcgacctgctgaagctggctggcgacgtggaatccaacccaggcccttctagaggccatatgaccgagtacaagcccacggtgcgcctcgccacccgcgacgacgtccccagggccgtacgcaccctcgccgccgcgttcgccgactaccccgccacgcgccacaccgtcgatccggaccgccacatcgagcgggtcaccgagctgcaagaactcttcctcacgcgcgtcgggctcgacatcggcaaggtgtgggtcgcggacgacggcgccgcggtggcggtctggaccacgccggagagcgtcgaagcgggggcggtgttcgccgagatcggcccgcgcatggccgagttgagcggttcccggctggccgcgcagcaacagatggaaggcctcctggcgccgcaccggcccaaggagcccgcgtggttcctggccaccgtcggcgtctcgcccgaccaccagggcaagggtctgggcagcgccgtcgtgctccccggagtggaggcggccgagcgcgccggggtgcccgccttcctggagacctccgcgccccgcaacctccccttctacgagcggctcggcttcaccgtcaccgccgacgtcgaggtgcccgaaggaccgcgcacctggtgcatgacccgcaagcccggtgcctga

SEQ ID NO: 36969 - DNA, 2607 bp, synthetic construct
  source 1..2607: mol_type = other DNA
atggccttaccagtgaccgccttgctcctgccgctggccttgctgctccacgccgccaggccgctcgaggaggacctgaagaacgtgttcccacctgaggtggccgtgttcgagcctagcgaggccgagatcagccacacccagaaagccaccctcgtgtgcctggctaccggcttctaccccgaccatgtggaactgtcttggtgggtcaacggcaaagaggtgcacagcggcgtgtgtaccgacccccagccactgaaagaacagcccgccctgaacgacagccggtactgcctgagcagcagactgagagtgtccgccaccttctggcagaacccccggaaccacttcagatgccaggtgcagttctacggcctgagcgagaacgacgagtggacccaggacagagccaagcccgtgacccagatcgtgtctgccgaagcctggggcagagccgattgcggctttaccagcgagagctaccagcagggcgtgctgagcgccaccaacctgagcgtgatcggcttcagaatcctgctgctgaaagtggccggctttaacctgctgatgaccctgcggctgtggtccagcagggccaagcgatctggatctggagcaacaaacttctcactactcaaacaagcaggtgacgtggaggagaatcccgggcctactagcatggccttaccagtgaccgccttgctcctgccgctggccttgctgctccacgccgccaggccggacatccagatgacacagagccctagcagcctgtctgccagcgtgggagacagagtgaccatcacatgcaagagcagccagagcctgctggactccgatggcaagacctacctgaactggtatcagcagaagcccggcaaggcccctaagctgctgatctacctggtgtccaagctggatagcggcgtgcccagcagattttctggcagcggcagcggaaccgacttcaccctgacaatatccagcctccagcctgaggacttcgccacctactactgctggcaaggcacccactttccattcaccttcggccagggcaccaaggtggaaatcaaaagaggcggaggcggaagtggaggcggaggatctggcggcggaggctctgaagtgcagctggttgaatcaggcggaggactggttcagcctggcggatctctgagactgtcttgtgccgccagcggctacaccttcagcagctactggatgaactgggtccgacaggcccctggcaaaggactggaatgggtcggaatgatcgaccccagcgacagcgagacacactacaaccacatcttcaaggaccgcttcaccatcagcgccgacaccagcaagaataccgcctacctccagatgaactccctgagagccgaggacaccgccgtgtactactgcgccagaaacctgtatctgtggggccagggaaccctggtcacagtgtcatctacgcgtatccagaaccctgatcctgccgtgtaccagctgcgggatagcaagagcagcgacaagagcgtgtgtctgttcaccgacttcgacagccagaccaacgtgtcccagagcaaggactccgacgtgtacatcaccgataagtgcgtgctggacatgcggagcatggacttcaagagcaactccgccgtggcctggtccaacaagtccgatttcgcctgcgccaacgccttcaacaacagcattatccccgaggacacattcttcccaagccccgagagcagctgcgacgtgaagctggtggaaaagagcttcgagacagacaccaacctgaacttccagatcctgtacgagatcctgctgggcaaggccaccctgtacgccgtgctggtgtctgccctggtgctgatggctatggtcaagcggaaggacagccggggacgcgccaagagaagcggatctggcgtgaagcagaccctgaatttcgacctgctgaagctggctggcgacgtggaatccaacccaggcccttctagaggccatatgaccgagtacaagcccacggtgcgcctcgccacccgcgacgacgtccccagggccgtacgcaccctcgccgccgcgttcgccgactaccccgccacgcgccacaccgtcgatccggaccgccacatcgagcgggtcaccgagctgcaagaactcttcctcacgcgcgtcgggctcgacatcggcaaggtgtgggtcgcggacgacggcgccgcggtggcggtctggaccacgccggagagcgtcgaagcgggggcggtgttcgccgagatcggcccgcgcatggccgagttgagcggttcccggctggccgcgcagcaacagatggaaggcctcctggcgccgcaccggcccaaggagcccgcgtggttcctggccaccgtcggcgtctcgcccgaccaccagggcaagggtctgggcagcgccgtcgtgctccccggagtggaggcggccgagcgcgccggggtgcccgccttcctggagacctccgcgccccgcaacctccccttctacgagcggctcggcttcaccgtcaccgccgacgtcgaggtgcccgaaggaccgcgcacctggtgcatgacccgcaagcccggtgcctga

SEQ ID NO: 36970 - DNA, 2694 bp, synthetic construct
  source 1..2694: mol_type = other DNA
atggccttaccagtgaccgccttgctcctgccgctggccttgctgctccacgccgccaggccgctcgaggaggaggacctgaagaacgtgttcccacctgaggtggccgtgttcgagcctagcgaggccgagatcagccacacccagaaagccaccctcgtgtgcctggctaccggcttctaccccgaccatgtggaactgtcttggtgggtcaacggcaaagaggtgcacagcggcgtgtgtaccgacccccagccactgaaagaacagcccgccctgaacgacagccggtactgcctgagcagcagactgagagtgtccgccaccttctggcagaacccccggaaccacttcagatgccaggtgcagttctacggcctgagcgagaacgacgagtggacccaggacagagccaagcccgtgacccagatcgtgtctgccgaagcctggggcagagccgattgcggctttaccagcgagagctaccagcagggcgtgctgagcgccaccaacctgagcgtgatcggcttcagaatcctgctgctgaaagtggccggctttaacctgctgatgaccctgcggctgtggtccagcagggccaagcgatctggatctggagcaacaaacttctcactactcaaacaagcaggtgacgtggaggagaatcccgggcctactagcatggccttaccagtgaccgccttgctcctgccgctggccttgctgctccacgccgccaggccggacatccagatgacacagagccctagcagcctgtctgccagcgtgggagacagagtgaccatcacatgcaagagcagccagagcctgctggactccgatggcaagacctacctgaactggtatcagcagaagcccggcaaggcccctaagctgctgatctacctggtgtccaagctggatagcggcgtgcccagcagattttctggcagcggcagcggaaccgacttcaccctgacaatatccagcctccagcctgaggacttcgccacctactactgctggcaaggcacccactttccattcaccttcggccagggcaccaaggtggaaatcaaaagaggcggaggcggaagtggaggcggaggatctggcggcggaggctctgaagtgcagctggttgaatcaggcggaggactggttcagcctggcggatctctgagactgtcttgtgccgccagcggctacaccttcagcagctactggatgaactgggtccgacaggcccctggcaaaggactggaatgggtcggaatgatcgaccccagcgacagcgagacacactacaaccacatcttcaaggaccgcttcaccatcagcgccgacaccagcaagaataccgcctacctccagatgaactccctgagagccgaggacaccgccgtgtactactgcgccagaaacctgtatctgtggggccagggaaccctggtcacagtgtcatctacgcgtggacagcctaaggccaatcctaccgtgacactgttccctccaagcagcgaagaactccaggccaacaaggccacacttgtgtgcctgatctccgacttctaccctggggctgtgacagtggcttggaaggccgatggatctcctgtgaaagccggcgtggaaaccaccaagccatccaagcagagcaacaacaaatacgccgccagctcctacctgagcctgacacctgagcagtggaagtcccacagatcctacagctgccaagtgacccacgaaggcagcaccgtggaaaagacagtggcccctacagagtgcagccccatcaagaccgatgtgattacaatggaccccaaggacaactgctccaaggacgccaacgataccctgctgctccagctgaccaacaccagcgcctactacatgtacttgttgctgctgctgaagtccgtggtgtacttcgccatcatcacatgctgcctgctgcggagaaccgccttctgctgcaacggcgagaagtctcgcgccaagagaagcggatctggcgtgaagcagaccctgaatttcgacctgctgaagctggctggcgacgtggaatccaacccaggcccttctagaggccatatgaccgagtacaagcccacggtgcgcctcgccacccgcgacgacgtccccagggccgtacgcaccctcgccgccgcgttcgccgactaccccgccacgcgccacaccgtcgatccggaccgccacatcgagcgggtcaccgagctgcaagaactcttcctcacgcgcgtcgggctcgacatcggcaaggtgtgggtcgcggacgacggcgccgcggtggcggtctggaccacgccggagagcgtcgaagcgggggcggtgttcgccgagatcggcccgcgcatggccgagttgagcggttcccggctggccgcgcagcaacagatggaaggcctcctggcgccgcaccggcccaaggagcccgcgtggttcctggccaccgtcggcgtctcgcccgaccaccagggcaagggtctgggcagcgccgtcgtgctccccggagtggaggcggccgagcgcgccggggtgcccgccttcctggagacctccgcgccccgcaacctccccttctacgagcggctcggcttcaccgtcaccgccgacgtcgaggtgcccgaaggaccgcgcacctggtgcatgacccgcaagcccggtgcctga

SEQ ID NO: 36971 - DNA, 2694 bp, synthetic construct
  source 1..2694: mol_type = other DNA
atggccttaccagtgaccgccttgctcctgccgctggccttgctgctccacgccgccaggccgctcgagggacagcctaaggccaatcctaccgtgacactgttccctccaagcagcgaagaactccaggccaacaaggccacacttgtgtgcctgatctccgacttctaccctggggctgtgacagtggcttggaaggccgatggatctcctgtgaaagccggcgtggaaaccaccaagccatccaagcagagcaacaacaaatacgccgccagctcctacctgagcctgacacctgagcagtggaagtcccacagatcctacagctgccaagtgacccacgaaggcagcaccgtggaaaagacagtggcccctacagagtgcagccccatcaagaccgatgtgattacaatggaccccaaggacaactgctccaaggacgccaacgataccctgctgctccagctgaccaacaccagcgcctactacatgtacttgttgctgctgctgaagtccgtggtgtacttcgccatcatcacatgctgcctgctgcggagaaccgccttctgctgcaacggcgagaagtctagggccaagcgatctggatctggagcaacaaacttctcactactcaaacaagcaggtgacgtggaggagaatcccgggcctactagcatggccttaccagtgaccgccttgctcctgccgctggccttgctgctccacgccgccaggccggacatccagatgacacagagccctagcagcctgtctgccagcgtgggagacagagtgaccatcacatgcaagagcagccagagcctgctggactccgatggcaagacctacctgaactggtatcagcagaagcccggcaaggcccctaagctgctgatctacctggtgtccaagctggatagcggcgtgcccagcagattttctggcagcggcagcggaaccgacttcaccctgacaatatccagcctccagcctgaggacttcgccacctactactgctggcaaggcacccactttccattcaccttcggccagggcaccaaggtggaaatcaaaagaggcggaggcggaagtggaggcggaggatctggcggcggaggctctgaagtgcagctggttgaatcaggcggaggactggttcagcctggcggatctctgagactgtcttgtgccgccagcggctacaccttcagcagctactggatgaactgggtccgacaggcccctggcaaaggactggaatgggtcggaatgatcgaccccagcgacagcgagacacactacaaccacatcttcaaggaccgcttcaccatcagcgccgacaccagcaagaataccgcctacctccagatgaactccctgagagccgaggacaccgccgtgtactactgcgccagaaacctgtatctgtggggccagggaaccctggtcacagtgtcatctacgcgtgaggaggacctgaagaacgtgttcccacctgaggtggccgtgttcgagcctagcgaggccgagatcagccacacccagaaagccaccctcgtgtgcctggctaccggcttctaccccgaccatgtggaactgtcttggtgggtcaacggcaaagaggtgcacagcggcgtgtgtaccgacccccagccactgaaagaacagcccgccctgaacgacagccggtactgcctgagcagcagactgagagtgtccgccaccttctggcagaacccccggaaccacttcagatgccaggtgcagttctacggcctgagcgagaacgacgagtggacccaggacagagccaagcccgtgacccagatcgtgtctgccgaagcctggggcagagccgattgcggctttaccagcgagagctaccagcagggcgtgctgagcgccaccaacctgagcgtgatcggcttcagaatcctgctgctgaaagtggccggctttaacctgctgatgaccctgcggctgtggtccagccgcgccaagagaagcggatctggcgtgaagcagaccctgaatttcgacctgctgaagctggctggcgacgtggaatccaacccaggcccttctagaggccatatgaccgagtacaagcccacggtgcgcctcgccacccgcgacgacgtccccagggccgtacgcaccctcgccgccgcgttcgccgactaccccgccacgcgccacaccgtcgatccggaccgccacatcgagcgggtcaccgagctgcaagaactcttcctcacgcgcgtcgggctcgacatcggcaaggtgtgggtcgcggacgacggcgccgcggtggcggtctggaccacgccggagagcgtcgaagcgggggcggtgttcgccgagatcggcccgcgcatggccgagttgagcggttcccggctggccgcgcagcaacagatggaaggcctcctggcgccgcaccggcccaaggagcccgcgtggttcctggccaccgtcggcgtctcgcccgaccaccagggcaagggtctgggcagcgccgtcgtgctccccggagtggaggcggccgagcgcgccggggtgcccgccttcctggagacctccgcgccccgcaacctccccttctacgagcggctcggcttcaccgtcaccgccgacgtcgaggtgcccgaaggaccgcgcacctggtgcatgacccgcaagcccggtgcctga

SEQ ID NO: 36972 - DNA, 2685 bp, synthetic construct
  source 1..2685: mol_type = other DNA
atggccttaccagtgaccgccttgctcctgccgctggccttgctgctccacgccgccaggccgctcgaggaggcctctacaaagggaccctccgtgtttcctctggctcccagcagcaagtctacaagcggaggaacagccgctctgggctgcctggtcaaggattactttcccgagcctgtgaccgtgtcctggaatagcggagcactgacaagcggcgtgcacacctttccagccgtgctgcaaagcagcggcctgtactctctgagcagcgtggtcacagtgcctagctctagcctgggcacccagacctacatctgcaatgtgaaccacaagcctagcaacaccaaggtggacaagagagtggaacccaagagctgtcccatcaagaccgatgtgattacaatggaccccaaggacaactgctccaaggacgccaacgataccctgctgctccagctgaccaacaccagcgcctactacatgtacttgttgctgctgctgaagtccgtggtgtacttcgccatcatcacatgctgcctgctgcggagaaccgccttctgctgcaacggcgagaagtctagggccaagcgatctggatctggagcaacaaacttctcactactcaaacaagcaggtgacgtggaggagaatcccgggcctactagcatggccttaccagtgaccgccttgctcctgccgctggccttgctgctccacgccgccaggccggacatccagatgacacagagccctagcagcctgtctgccagcgtgggagacagagtgaccatcacatgcaagagcagccagagcctgctggactccgatggcaagacctacctgaactggtatcagcagaagcccggcaaggcccctaagctgctgatctacctggtgtccaagctggatagcggcgtgcccagcagattttctggcagcggcagcggaaccgacttcaccctgacaatatccagcctccagcctgaggacttcgccacctactactgctggcaaggcacccactttccattcaccttcggccagggcaccaaggtggaaatcaaaagaggcggaggcggaagtggaggcggaggatctggcggcggaggctctgaagtgcagctggttgaatcaggcggaggactggttcagcctggcggatctctgagactgtcttgtgccgccagcggctacaccttcagcagctactggatgaactgggtccgacaggcccctggcaaaggactggaatgggtcggaatgatcgaccccagcgacagcgagacacactacaaccacatcttcaaggaccgcttcaccatcagcgccgacaccagcaagaataccgcctacctccagatgaactccctgagagccgaggacaccgccgtgtactactgcgccagaaacctgtatctgtggggccagggaaccctggtcacagtgtcatctacgcgtggacagcctaaggccaatcctaccgtgacactgttccctccaagcagcgaagaactccaggccaacaaggccacacttgtgtgcctgatctccgacttctaccctggggctgtgacagtggcttggaaggccgatggatctcctgtgaaagccggcgtggaaaccaccaagccatccaagcagagcaacaacaaatacgccgccagctcctacctgagcctgacacctgagcagtggaagtcccacagatcctacagctgccaagtgacccacgaaggcagcaccgtggaaaagacagtggcccctacagagtgcagcgaagtgaaaaccgactccaccgaccacgtgaagcccaaagagacagagaacaccaagcagcccagcaagagctgccacaagcccaaggccatcgtgcacaccgagaaagtgaacatgatgagcctgaccgtgctgggcctgcggatgctgttcgccaaaaccgtggccgtgaacttcctgctgaccgccaagctgttcttcctccgcgccaagagaagcggatctggcgtgaagcagaccctgaatttcgacctgctgaagctggctggcgacgtggaatccaacccaggcccttctagaggccatatgaccgagtacaagcccacggtgcgcctcgccacccgcgacgacgtccccagggccgtacgcaccctcgccgccgcgttcgccgactaccccgccacgcgccacaccgtcgatccggaccgccacatcgagcgggtcaccgagctgcaagaactcttcctcacgcgcgtcgggctcgacatcggcaaggtgtgggtcgcggacgacggcgccgcggtggcggtctggaccacgccggagagcgtcgaagcgggggcggtgttcgccgagatcggcccgcgcatggccgagttgagcggttcccggctggccgcgcagcaacagatggaaggcctcctggcgccgcaccggcccaaggagcccgcgtggttcctggccaccgtcggcgtctcgcccgaccaccagggcaagggtctgggcagcgccgtcgtgctccccggagtggaggcggccgagcgcgccggggtgcccgccttcctggagacctccgcgccccgcaacctccccttctacgagcggctcggcttcaccgtcaccgccgacgtcgaggtgcccgaaggaccgcgcacctggtgcatgacccgcaagcccggtgcctga

SEQ ID NO: 36973 - DNA, 2619 bp, synthetic construct
  source 1..2619: mol_type = other DNA
atggccttaccagtgaccgccttgctcctgccgctggccttgctgctccacgccgccaggccgctcgaggaggcctctacaaagggaccctccgtgtttcctctggctcccagcagcaagtctacaagcggaggaacagccgctctgggctgcctggtcaaggattactttcccgagcctgtgaccgtgtcctggaatagcggagcactgacaagcggcgtgcacacctttccagccgtgctgcaaagcagcggcctgtactctctgagcagcgtggtcacagtgcctagctctagcctgggcacccagacctacatctgcaatgtgaaccacaagcctagcaacaccaaggtggacaagagagtggaacccaagagctgtggcagagccgattgcggctttaccagcgagagctaccagcagggcgtgctgagcgccaccatcctgtacgagatcctgctgggcaaggccaccctgtacgccgtgctggtgtctgccctggtgctgatggctatggtcaagcggaaggacagccggggaagggccaagcgatctggatctggagcaacaaacttctcactactcaaacaagcaggtgacgtggaggagaatcccgggcctactagcatggccttaccagtgaccgccttgctcctgccgctggccttgctgctccacgccgccaggccggacatccagatgacacagagccctagcagcctgtctgccagcgtgggagacagagtgaccatcacatgcaagagcagccagagcctgctggactccgatggcaagacctacctgaactggtatcagcagaagcccggcaaggcccctaagctgctgatctacctggtgtccaagctggatagcggcgtgcccagcagattttctggcagcggcagcggaaccgacttcaccctgacaatatccagcctccagcctgaggacttcgccacctactactgctggcaaggcacccactttccattcaccttcggccagggcaccaaggtggaaatcaaaagaggcggaggcggaagtggaggcggaggatctggcggcggaggctctgaagtgcagctggttgaatcaggcggaggactggttcagcctggcggatctctgagactgtcttgtgccgccagcggctacaccttcagcagctactggatgaactgggtccgacaggcccctggcaaaggactggaatgggtcggaatgatcgaccccagcgacagcgagacacactacaaccacatcttcaaggaccgcttcaccatcagcgccgacaccagcaagaataccgcctacctccagatgaactccctgagagccgaggacaccgccgtgtactactgcgccagaaacctgtatctgtggggccagggaaccctggtcacagtgtcatctacgcgtggacagcctaaggccaatcctaccgtgacactgttccctccaagcagcgaagaactccaggccaacaaggccacacttgtgtgcctgatctccgacttctaccctggggctgtgacagtggcttggaaggccgatggatctcctgtgaaagccggcgtggaaaccaccaagccatccaagcagagcaacaacaaatacgccgccagctcctacctgagcctgacacctgagcagtggaagtcccacagatcctacagctgccaagtgacccacgaaggcagcaccgtggaaaagacagtggcccctacagagtgcagcatccccgaggacacattcttcccaagccccgagagcagctgcgacgtgaagctggtggaaaagagcttcgagacagacaccaacctgaacttccagaacctgagcgtgatcggcttcagaatcctgctgctgaaagtggccggctttaacctgctgatgaccctgcggctgtggtccagccgcgccaagagaagcggatctggcgtgaagcagaccctgaatttcgacctgctgaagctggctggcgacgtggaatccaacccaggcccttctagaggccatatgaccgagtacaagcccacggtgcgcctcgccacccgcgacgacgtccccagggccgtacgcaccctcgccgccgcgttcgccgactaccccgccacgcgccacaccgtcgatccggaccgccacatcgagcgggtcaccgagctgcaagaactcttcctcacgcgcgtcgggctcgacatcggcaaggtgtgggtcgcggacgacggcgccgcggtggcggtctggaccacgccggagagcgtcgaagcgggggcggtgttcgccgagatcggcccgcgcatggccgagttgagcggttcccggctggccgcgcagcaacagatggaaggcctcctggcgccgcaccggcccaaggagcccgcgtggttcctggccaccgtcggcgtctcgcccgaccaccagggcaagggtctgggcagcgccgtcgtgctccccggagtggaggcggccgagcgcgccggggtgcccgccttcctggagacctccgcgccccgcaacctccccttctacgagcggctcggcttcaccgtcaccgccgacgtcgaggtgcccgaaggaccgcgcacctggtgcatgacccgcaagcccggtgcctga

SEQ ID NO: 36974 - DNA, 2619 bp, synthetic construct
  source 1..2619: mol_type = other DNA
atggccttaccagtgaccgccttgctcctgccgctggccttgctgctccacgccgccaggccgctcgaggaggcctctacaaagggaccctccgtgtttcctctggctcccagcagcaagtctacaagcggaggaacagccgctctgggctgcctggtcaaggattactttcccgagcctgtgaccgtgtcctggaatagcggagcactgacaagcggcgtgcacacctttccagccgtgctgcaaagcagcggcctgtactctctgagcagcgtggtcacagtgcctagctctagcctgggcacccagacctacatctgcaatgtgaaccacaagcctagcaacaccaaggtggacaagagagtggaacccaagagctgtatccccgaggacacattcttcccaagccccgagagcagctgcgacgtgaagctggtggaaaagagcttcgagacagacaccaacctgaacttccagaacctgagcgtgatcggcttcagaatcctgctgctgaaagtggccggctttaacctgctgatgaccctgcggctgtggtccagcagggccaagcgatctggatctggagcaacaaacttctcactactcaaacaagcaggtgacgtggaggagaatcccgggcctactagcatggccttaccagtgaccgccttgctcctgccgctggccttgctgctccacgccgccaggccggacatccagatgacacagagccctagcagcctgtctgccagcgtgggagacagagtgaccatcacatgcaagagcagccagagcctgctggactccgatggcaagacctacctgaactggtatcagcagaagcccggcaaggcccctaagctgctgatctacctggtgtccaagctggatagcggcgtgcccagcagattttctggcagcggcagcggaaccgacttcaccctgacaatatccagcctccagcctgaggacttcgccacctactactgctggcaaggcacccactttccattcaccttcggccagggcaccaaggtggaaatcaaaagaggcggaggcggaagtggaggcggaggatctggcggcggaggctctgaagtgcagctggttgaatcaggcggaggactggttcagcctggcggatctctgagactgtcttgtgccgccagcggctacaccttcagcagctactggatgaactgggtccgacaggcccctggcaaaggactggaatgggtcggaatgatcgaccccagcgacagcgagacacactacaaccacatcttcaaggaccgcttcaccatcagcgccgacaccagcaagaataccgcctacctccagatgaactccctgagagccgaggacaccgccgtgtactactgcgccagaaacctgtatctgtggggccagggaaccctggtcacagtgtcatctacgcgtggacagcctaaggccaatcctaccgtgacactgttccctccaagcagcgaagaactccaggccaacaaggccacacttgtgtgcctgatctccgacttctaccctggggctgtgacagtggcttggaaggccgatggatctcctgtgaaagccggcgtggaaaccaccaagccatccaagcagagcaacaacaaatacgccgccagctcctacctgagcctgacacctgagcagtggaagtcccacagatcctacagctgccaagtgacccacgaaggcagcaccgtggaaaagacagtggcccctacagagtgcagcggcagagccgattgcggctttaccagcgagagctaccagcagggcgtgctgagcgccaccatcctgtacgagatcctgctgggcaaggccaccctgtacgccgtgctggtgtctgccctggtgctgatggctatggtcaagcggaaggacagccggggacgcgccaagagaagcggatctggcgtgaagcagaccctgaatttcgacctgctgaagctggctggcgacgtggaatccaacccaggcccttctagaggccatatgaccgagtacaagcccacggtgcgcctcgccacccgcgacgacgtccccagggccgtacgcaccctcgccgccgcgttcgccgactaccccgccacgcgccacaccgtcgatccggaccgccacatcgagcgggtcaccgagctgcaagaactcttcctcacgcgcgtcgggctcgacatcggcaaggtgtgggtcgcggacgacggcgccgcggtggcggtctggaccacgccggagagcgtcgaagcgggggcggtgttcgccgagatcggcccgcgcatggccgagttgagcggttcccggctggccgcgcagcaacagatggaaggcctcctggcgccgcaccggcccaaggagcccgcgtggttcctggccaccgtcggcgtctcgcccgaccaccagggcaagggtctgggcagcgccgtcgtgctccccggagtggaggcggccgagcgcgccggggtgcccgccttcctggagacctccgcgccccgcaacctccccttctacgagcggctcggcttcaccgtcaccgccgacgtcgaggtgcccgaaggaccgcgcacctggtgcatgacccgcaagcccggtgcctga

SEQ ID NO: 36975 - DNA, 1857 bp, synthetic construct
  source 1..1857: mol_type = other DNA
atggccttaccagtgaccgccttgctcctgccgctggccttgctgctccacgccgccaggccggacatccagatgacacagagccctagcagcctgtctgccagcgtgggagacagagtgaccatcacatgcaagagcagccagagcctgctggactccgatggcaagacctacctgaactggtatcagcagaagcccggcaaggcccctaagctgctgatctacctggtgtccaagctggatagcggcgtgcccagcagattttctggcagcggcagcggaaccgacttcaccctgacaatatccagcctccagcctgaggacttcgccacctactactgctggcaaggcacccactttccattcaccttcggccagggcaccaaggtggaaatcaaaagactcgaggacctgaagaacgtgttcccacctgaggtggccgtgttcgagcctagcgaggccgagatcagccacacccagaaagccaccctcgtgtgcctggctaccggcttctaccccgaccatgtggaactgtcttggtgggtcaacggcaaagaggtgcacagcggcgtgtgtaccgacccccagccactgaaagaacagcccgccctgaacgacagccggtactgcctgagcagcagactgagagtgtccgccaccttctggcagaacccccggaaccacttcagatgccaggtgcagttctacggcctgagcgagaacgacgagtggacccaggacagagccaagcccgtgacccagatcgtgtctgccgaagcctggggcagagccgatagcggctttaccagcgagagctaccagcagggcgtgctgagcgccaccatcctgtacgagatcctgctgggcaaggccaccctgtacgccgtgctggtgtctgccctggtgctgatggctatggtcaagcggaaggacagccggggaagggccaagcgatctggatctggagcaacaaacttctcactactcaaacaagcaggtgacgtggaggagaatcccgggcctactagtatggactggatttggcgcatccttttccttgtcggcgctgctaccggcgcgcattccttcgaagaagtgcagctggttgaatcaggcggaggactggttcagcctggcggatctctgagactgtcttgtgccgccagcggctacaccttcagcagctactggatgaactgggtccgacaggcccctggcaaaggactggaatgggtcggaatgatcgaccccagcgacagcgagacacactacaaccacatcttcaaggaccgcttcaccatcagcgccgacaccagcaagaataccgcctacctccagatgaactccctgagagccgaggacaccgccgtgtactactgcgccagaaacctgtatctgtggggccagggaaccctggtcacagtgtcatctacgcgtatccagaaccctgatcctgccgtgtaccagctgcgggatagcaagagcagcgacaagagcgtgtgtctgttcaccgacttcgacagccagaccaacgtgtcccagagcaaggactccgacgtgtacatcaccgataagtgcgtgctggacatgcggagcatggacttcaagagcaactccgccgtggcctggtccaacaagtccgatttcgcctgcgccaacgccttcaacaacagcattatccccgaggacacattcttcccaagccccgagagcagcagcgacgtgaagctggtggaaaagagcttcgagacagacaccaacctgaacttccagaacctgagcgtgatcggcttcagaatcctgctgctgaaagtggccggctttaacctgctgatgaccctgcggctgtggtccagc

SEQ ID NO: 36976 - DNA, 2697 bp, synthetic construct
  source 1..2697: mol_type = other DNA
atggccttaccagtgaccgccttgctcctgccgctggccttgctgctccacgccgccaggccggaggttcagctgcttgagtctggcggaggactggttcaacctggcggaagcctgagactgtcttgtgccgcctctggcagaaccttcagcatgggctggtatagacaggcccctggcaagggcctcgaatttgtgtctgccatcacatacagcggcggcagcccttactacgccgattctgtgaagggcagattcaccatcagccgggacaacagcaagaacaccgtgtacctccagatgaacagcctgagagccgaggacaccgccgtgtactactgtgccgccaatccaacctacggcagcgactggaatgccgagaattggggccagggcacactggtcacagtgtctagtggtaccggcggaggcggatctggcggcggaggtagcggtggcggaggatctgaattcgacatccagatgacacagagccctagcagcctgtctgccagcgtgggagacagagtgaccatcacatgcaagagcagccagagcctgctggactccgatggcaagacctacctgaactggtatcagcagaagcccggcaaggcccctaagctgctgatctacctggtgtccaagctggatagcggcgtgcccagcagattttctggcagcggcagcggaaccgacttcaccctgacaatatccagcctccagcctgaggacttcgccacctactactgctggcaaggcacccactttccattcaccttcggccagggcaccaaggtggaaatcaaaagactcgagatccagaaccctgatcctgccgtgtaccagctgcgggatagcaagagcagcgacaagagcgtgtgtctgttcaccgacttcgacagccagaccaacgtgtcccagagcaaggactccgacgtgtacatcaccgataagtgcgtgctggacatgcggagcatggacttcaagagcaactccgccgtggcctggtccaacaagtccgatttcgcctgcgccaacgccttcaacaacagcattatccccgaggacacattcttcccaagcagcgacgtgccctgcgacgtgaagctggtggaaaagagcttcgagacagacaccaacctgaacttccagaacctgagcgtgatcggcttcagaatcctgctgctgaaagtggccggctttaacctgctgatgaccctgcggctgtggtccagccgcgccaagagaagcggatctggcgtgaagcagaccctgaatttcgacctgctgaagctggctggcgacgtggaatccaacccaggccctactagtaccatggactggatttggcgcatccttttccttgtcggcgctgctaccggcacccattccgggcccgaagtgcaactggttgaatccggtggcggcctggtgcaacccggcggatctctcagacttagctgtgccgcctccggcagaaccttcacaatgggatggtacaggcaggctccagggaaagagagagagttcgtcgccgccatctctctgtctcccacactggcctactacgccgactctgtgaaaggccggttcaccatctccagagataatagcaagaacaccgtggtgctgcaaatgaactctctgagagccgaggatacagccctgtactattgtgccgctgaccggaagtccgtgatgagcatcagacccgattactggggacagggcacactggtcacagtgtctagtggatccggcggcggaggatctggcggaggcggatctgggggcggaggctctttcgaagaagtgcagctggttgaatcaggcggaggactggttcagcctggcggatctctgagactgtcttgtgccgccagcggctacaccttcagcagctactggatgaactgggtccgacaggcccctggcaaaggactggaatgggtcggaatgatcgaccccagcgacagcgagacacactacaaccacatcttcaaggaccgcttcaccatcagcgccgacaccagcaagaataccgcctacctccagatgaactccctgagagccgaggacaccgccgtgtactactgcgccagaaacctgtatctgtggggccagggaaccctggtcacagtgtcatctacgcgtgaggacctgaagaacgtgttcccacctgaggtggccgtgttcgagcctagcaaggccgagatcgcccacacccagaaagccaccctcgtgtgcctggctaccggcttctaccccgaccatgtggaactgtcttggtgggtcaacggcaaagaggtgcacagcggcgtgtgtaccgacccccagccactgaaagaacagcccgccctgaacgacagccggtactgcctgagcagcagactgagagtgtccgccaccttctggcagaacccccggaaccacttcagatgccaggtgcagttctacggcctgagcgagaacgacgagtggacccaggacagagccaagcccgtgacccagatcgtgtctgccgaagcctggggcagagccgattgcggcatcaccagcgccagctaccaccagggcgtgctgagcgccaccatcctgtacgagatcctgctgggcaaggccaccctgtacgccgtgctggtgtctgccctggtgctgatggctatggtcaagcggaaggacagccggggataa

SEQ ID NO: 36977 - DNA, 2697 bp, synthetic construct
  source 1..2697: mol_type = other DNA
atggccttaccagtgaccgccttgctcctgccgctggccttgctgctccacgccgccaggccggaagtgcagctggttgaatctggcggaggactggttcaggctggcggatctctgagactgtcttgtgccgccagcggcagaacctttagcatgggctggtttagacaggcccctggcaaagagagagagttcgtcgccgccatcacatactctggcggcagcccttactacgccgactctgtgaagggcagattcaccatcagccgggacaacgccaagaacaccgtgtacctccagatgaacagcctgaagcctgaggacaccgccgtgtactactgcgccgccaatccaacatacggcagcgactggaacgccgagaattggggccagggaacccaagtgacagtgtctagcggtaccggcggaggcggatctggcggcggaggtagcggtggcggaggatctgaattcgacatccagatgacacagagccctagcagcctgtctgccagcgtgggagacagagtgaccatcacatgcaagagcagccagagcctgctggactccgatggcaagacctacctgaactggtatcagcagaagcccggcaaggcccctaagctgctgatctacctggtgtccaagctggatagcggcgtgcccagcagattttctggcagcggcagcggaaccgacttcaccctgacaatatccagcctccagcctgaggacttcgccacctactactgctggcaaggcacccactttccattcaccttcggccagggcaccaaggtggaaatcaaaagactcgagatccagaaccctgatcctgccgtgtaccagctgcgggatagcaagagcagcgacaagagcgtgtgtctgttcaccgacttcgacagccagaccaacgtgtcccagagcaaggactccgacgtgtacatcaccgataagtgcgtgctggacatgcggagcatggacttcaagagcaactccgccgtggcctggtccaacaagtccgatttcgcctgcgccaacgccttcaacaacagcattatccccgaggacacattcttcccaagcagcgacgtgccctgcgacgtgaagctggtggaaaagagcttcgagacagacaccaacctgaacttccagaacctgagcgtgatcggcttcagaatcctgctgctgaaagtggccggctttaacctgctgatgaccctgcggctgtggtccagccgcgccaagagaagcggatctggcgtgaagcagaccctgaatttcgacctgctgaagctggctggcgacgtggaatccaacccaggccctactagtaccatggactggatttggcgcatccttttccttgtcggcgctgctaccggcgcccattccgggcccgaagtgcaactggttgaatccggtggcggcctggtgcaacccggcggatctctcagacttagctgtgccgcctccggcagaaccttcacaatgggatggtacaggcaggctccagggaaagagagagagttcgtcgccgccatctctctgtctcccacactggcctactacgccgactctgtgaaaggccggttcaccatctccagagataatagcaagaacaccgtggtgctgcaaatgaactctctgagagccgaggatacagccctgtactattgtgccgctgaccggaagtccgtgatgagcatcagacccgattactggggacagggcacactggtcacagtgtctagtggatccggcggcggaggatctggcggaggcggatctgggggcggaggctctttcgaagaagtgcagctggttgaatcaggcggaggactggttcagcctggcggatctctgagactgtcttgtgccgccagcggctacaccttcagcagctactggatgaactgggtccgacaggcccctggcaaaggactggaatgggtcggaatgatcgaccccagcgacagcgagacacactacaaccacatcttcaaggaccgcttcaccatcagcgccgacaccagcaagaataccgcctacctccagatgaactccctgagagccgaggacaccgccgtgtactactgcgccagaaacctgtatctgtggggccagggaaccctggtcacagtgtcatctacgcgtgaggacctgaagaacgtgttcccacctgaggtggccgtgttcgagcctagcaaggccgagatcgcccacacccagaaagccaccctcgtgtgcctggctaccggcttctaccccgaccatgtggaactgtcttggtgggtcaacggcaaagaggtgcacagcggcgtgtgtaccgacccccagccactgaaagaacagcccgccctgaacgacagccggtactgcctgagcagcagactgagagtgtccgccaccttctggcagaacccccggaaccacttcagatgccaggtgcagttctacggcctgagcgagaacgacgagtggacccaggacagagccaagcccgtgacccagatcgtgtctgccgaagcctggggcagagccgattgcggcatcaccagcgccagctaccaccagggcgtgctgagcgccaccatcctgtacgagatcctgctgggcaaggccaccctgtacgccgtgctggtgtctgccctggtgctgatggctatggtcaagcggaaggacagccggggataa

SEQ ID NO: 36978 - DNA, 2688 bp, synthetic construct
  source 1..2688: mol_type = other DNA
atggccttaccagtgaccgccttgctcctgccgctggccttgctgctccacgccgccaggccggaagtgcagctggttgaatctggcggaggactggttcaggctggcggatctctgagactgtcttgtgccgccagcggcagaacctttagcatgggctggtttagacaggcccctggcaaagagagagagttcgtcgccgccatcacatactctggcggcagcccttactacgccgactctgtgaagggcagattcaccatcagccgggacaacgccaagaacaccgtgtacctccagatgaacagcctgaagcctgaggacaccgccgtgtactactgcgccgccaatccaacatacggcagcgactggaacgccgagaattggggccagggaacccaagtgacagtgtctagcggtaccggcggaggcggatctggcggcggaggtagcggtggcggaggatctgaattcgacatccagatgacacagagccctagcagcctgtctgccagcgtgggagacagagtgaccatcacatgcaagagcagccagagcctgctggactccgatggcaagacctacctgaactggtatcagcagaagcccggcaaggcccctaagctgctgatctacctggtgtccaagctggatagcggcgtgcccagcagattttctggcagcggcagcggaaccgacttcaccctgacaatatccagcctccagcctgaggacttcgccacctactactgctggcaaggcacccactttccattcaccttcggccagggcaccaaggtggaaatcaaaagactcgaggacctgaagaacgtgttcccacctgaggtggccgtgttcgagcctagcgaggccgagatcagccacacccagaaagccaccctcgtgtgcctggctaccggcttctaccccgaccatgtggaactgtcttggtgggtcaacggcaaagaggtgcacagcggcgtgtgtaccgacccccagccactgaaagaacagcccgccctgaacgacagccggtactgcctgagcagcagactgagagtgtccgccaccttctggcagaacccccggaaccacttcagatgccaggtgcagttctacggcctgagcgagaacgacgagtggacccaggacagagccaagcccgtgacccagatcgtgtctgccgaagcctggggcagagccgattgcggctttaccagcgagagctaccagcagggcgtgctgagcgccaccatcctgtacgagatcctgctgggcaaggccaccctgtacgccgtgctggtgtctgccctggtgctgatggctatggtcaagcggaaggacagccggggaagggccaagcgatctggatctggagcaacaaacttctcactactcaaacaagcaggtgacgtggaggagaatcccgggcctactagtgccaccatggactggatttggcgcatccttttccttgtcggcgctgctaccggcgcccattccgggcccgaagtgcaactggttgaatccggtggcggcctggtgcaagcaggcggatctctcagacttagctgtgccgcctccggcagaaccttcacaatgggatggtttaggcaggctccagggaaagagagagagttcgtcgccgccatctctctgtctcccacactggcctactacgccgactctgtgaaaggccggttcaccatctccagagataatgccaagaacaccgtggtgctgcaaatgaactctctgaaacccgaggatacagccctgtactattgtgccgctgaccggaagtccgtgatgagcatcagacccgattactggggacagggcacacaagtcacagtgtcctctggatccggcggcggaggatctggcggaggcggatctgggggcggaggctctttcgaagaagtgcagctggttgaatcaggcggaggactggttcagcctggcggatctctgagactgtcttgtgccgccagcggctacaccttcagcagctactggatgaactgggtccgacaggcccctggcaaaggactggaatgggtcggaatgatcgaccccagcgacagcgagacacactacaaccacatcttcaaggaccgcttcaccatcagcgccgacaccagcaagaataccgcctacctccagatgaactccctgagagccgaggacaccgccgtgtactactgcgccagaaacctgtatctgtggggccagggaaccctggtcacagtgtcatctacgcgtatccagaaccctgatcctgccgtgtaccagctgcgggatagcaagagcagcgacaagagcgtgtgtctgttcaccgacttcgacagccagaccaacgtgtcccagagcaaggactccgacgtgtacatcaccgataagtgcgtgctggacatgcggagcatggacttcaagagcaactccgccgtggcctggtccaacaagtccgatttcgcctgcgccaacgccttcaacaacagcattatccccgaggacacattcttcccaagccccgagagcagctgcgacgtgaagctggtggaaaagagcttcgagacagacaccaacctgaacttccagaacctgagcgtgatcggcttcagaatcctgctgctgaaagtggccggctttaacctgctgatgaccctgcggctgtggtccagctaa

SEQ ID NO: 36979 - DNA, 2301 bp, synthetic construct
  source 1..2301: mol_type = other DNA
atggccttaccagtgaccgccttgctcctgccgctggccttgctgctccacgccgccaggccggaagtgcagctggttgaatctggcggaggactggttcagcctggcggatctctgagactgagctgtgaagccagcggcttcgccagcgacgattacatcatcggctggttcagacaggcccctggcaaagagagagagggcgtcagctgcatcagctctaagtacgccaacaccgtgtacaccgacagcgtgaagggcagattcagactgagcagaggcaccgccaagaataccgtgtacctccagatgagcgccctgaagcctgaggataccgccgtgtactactgcgctatggacagccgcagagtgacatgccctgagatcagcaccatgcaccggaacttcgattcttggggccagggcacactggtcacagtgtcatctggtaccggcggaggcggatctggcggcggaggtagcggtggcggaggatctgaattcgacatccagatgacacagagccctagcagcctgtctgccagcgtgggagacagagtgaccatcacatgcaagagcagccagagcctgctggactccgatggcaagacctacctgaactggtatcagcagaagcccggcaaggcccctaagctgctgatctacctggtgtccaagctggatagcggcgtgcccagcagattttctggcagcggcagcggaaccgacttcaccctgacaatatccagcctccagcctgaggacttcgccacctactactgctggcaaggcacccactttccattcaccttcggccagggcaccaaggtggaaatcaaaagactcgaggacctgaagaacgtgttcccacctgaggtggccgtgttcgagcctagcaaggccgagatcgcccacacccagaaagccaccctcgtgtgcctggctaccggcttctaccccgaccatgtggaactgtcttggtgggtcaacggcaaagaggtgcacagcggcgtgtgtaccgacccccagccactgaaagaacagcccgccctgaacgacagccggtactgcctgagcagcagactgagagtgtccgccaccttctggcagaacccccggaaccacttcagatgccaggtgcagttctacggcctgagcgagaacgacgagtggacccaggacagagccaagcccgtgacccagatcgtgtctgccgaagcctggggcagagccgattgcggcatcaccagcgccagctaccaccagggcgtgctgagcgccaccatcctgtacgagatcctgctgggcaaggccaccctgtacgccgtgctggtgtctgccctggtgctgatggctatggtcaagcggaaggacagccggggaagggccaagcgatctggatctggagcaacaaacttctcactactcaaacaagcaggtgacgtggaggagaatcccgggcctactagtatggactggatttggcgcatccttttccttgtcggcgctgctaccggcgcgcattccttcgaagaagtgcagctggttgaatcaggcggaggactggttcagcctggcggatctctgagactgtcttgtgccgccagcggctacaccttcagcagctactggatgaactgggtccgacaggcccctggcaaaggactggaatgggtcggaatgatcgaccccagcgacagcgagacacactacaaccacatcttcaaggaccgcttcaccatcagcgccgacaccagcaagaataccgcctacctccagatgaactccctgagagccgaggacaccgccgtgtactactgcgccagaaacctgtatctgtggggccagggaaccctggtcacagtgtcatctacgcgtatccagaaccctgatcctgccgtgtaccagctgcgggatagcaagagcagcgacaagagcgtgtgtctgttcaccgacttcgacagccagaccaacgtgtcccagagcaaggactccgacgtgtacatcaccgataagtgcgtgctggacatgcggagcatggacttcaagagcaactccgccgtggcctggtccaacaagtccgatttcgcctgcgccaacgccttcaacaacagcattatccccgaggacacattcttcccaagcagcgacgtgccctgcgacgtgaagctggtggaaaagagcttcgagacagacaccaacctgaacttccagaacctgagcgtgatcggcttcagaatcctgctgctgaaagtggccggctttaacctgctgatgaccctgcggctgtggtccagctaa

SEQ ID NO: 36980 - DNA, 2274 bp, synthetic construct
  source 1..2274: mol_type = other DNA
atggccttaccagtgaccgccttgctcctgccgctggccttgctgctccacgccgccaggccggacatccagatgacacagagccctagcagcctgtctgccagcgtgggagacagagtgaccatcacatgcaagagcagccagagcctgctggactccgatggcaagacctacctgaactggtatcagcagaagcccggcaaggcccctaagctgctgatctacctggtgtccaagctggatagcggcgtgcccagcagattttctggcagcggcagcggaaccgacttcaccctgacaatatccagcctccagcctgaggacttcgccacctactactgctggcaaggcacccactttccattcaccttcggccagggcaccaaggtggaaatcaaaagactcgaggacctgaagaacgtgttcccacctgaggtggccgtgttcgagcctagcgaggccgagatcagccacacccagaaagccaccctcgtgtgcctggctaccggcttctaccccgaccatgtggaactgtcttggtgggtcaacggcaaagaggtgcacagcggcgtgtgtaccgacccccagccactgaaagaacagcccgccctgaacgacagccggtactgcctgagcagcagactgagagtgtccgccaccttctggcagaacccccggaaccacttcagatgccaggtgcagttctacggcctgagcgagaacgacgagtggacccaggacagagccaagcccgtgacccagatcgtgtctgccgaagcctggggcagagccgattgcggctttaccagcgagagctaccagcagggcgtgctgagcgccaccatcctgtacgagatcctgctgggcaaggccaccctgtacgccgtgctggtgtctgccctggtgctgatggctatggtcaagcggaaggacagccggggaagggccaagcgatctggatctggagcaacaaacttctcactactcaaacaagcaggtgacgtggaggagaatcccgggcctactagtaccatggactggatttggcgcatccttttccttgtcggcgctgctaccggcgcccattccgggcccgaagtgcaactggttgaatccggtggcggcctggtgcaacccggcggatctctcagacttagctgtgccgcctccggcagaaccttcacaatgggatggtacaggcaggctccagggaaagagagagagttcgtcgccgccatctctctgtctcccacactggcctactacgccgactctgtgaaaggccggttcaccatctccagagataatagcaagaacaccgtggtgctgcaaatgaactctctgagagccgaggatacagccctgtactattgtgccgctgaccggaagtccgtgatgagcatcagacccgattactggggacagggcacactggtcacagtgtctagtggatccggcggcggaggatctggcggaggcggatctgggggcggaggctctttcgaagaagtgcagctggttgaatcaggcggaggactggttcagcctggcggatctctgagactgtcttgtgccgccagcggctacaccttcagcagctactggatgaactgggtccgacaggcccctggcaaaggactggaatgggtcggaatgatcgaccccagcgacagcgagacacactacaaccacatcttcaaggaccgcttcaccatcagcgccgacaccagcaagaataccgcctacctccagatgaactccctgagagccgaggacaccgccgtgtactactgcgccagaaacctgtatctgtggggccagggaaccctggtcacagtgtcatctacgcgtatccagaaccctgatcctgccgtgtaccagctgcgggatagcaagagcagcgacaagagcgtgtgtctgttcaccgacttcgacagccagaccaacgtgtcccagagcaaggactccgacgtgtacatcaccgataagtgcgtgctggacatgcggagcatggacttcaagagcaactccgccgtggcctggtccaacaagtccgatttcgcctgcgccaacgccttcaacaacagcattatccccgaggacacattcttcccaagccccgagagcagctgcgacgtgaagctggtggaaaagagcttcgagacagacaccaacctgaacttccagaacctgagcgtgatcggcttcagaatcctgctgctgaaagtggccggctttaacctgctgatgaccctgcggctgtggtccagctaa

SEQ ID NO: 36981 - DNA, 2292 bp, synthetic construct
  source 1..2292: mol_type = other DNA
atggccttaccagtgaccgccttgctcctgccgctggccttgctgctccacgccgccaggccggacatccagatgacacagagccctagcagcctgtctgccagcgtgggagacagagtgaccatcacatgcaagagcagccagagcctgctggactccgatggcaagacctacctgaactggtatcagcagaagcccggcaaggcccctaagctgctgatctacctggtgtccaagctggatagcggcgtgcccagcagattttctggcagcggcagcggaaccgacttcaccctgacaatatccagcctccagcctgaggacttcgccacctactactgctggcaaggcacccactttccattcaccttcggccagggcaccaaggtggaaatcaaaagactcgaggacctgaagaacgtgttcccacctgaggtggccgtgttcgagcctagcgaggccgagatcagccacacccagaaagccaccctcgtgtgcctggctaccggcttctaccccgaccatgtggaactgtcttggtgggtcaacggcaaagaggtgcacagcggcgtgtgtaccgacccccagccactgaaagaacagcccgccctgaacgacagccggtactgcctgagcagcagactgagagtgtccgccaccttctggcagaacccccggaaccacttcagatgccaggtgcagttctacggcctgagcgagaacgacgagtggacccaggacagagccaagcccgtgacccagatcgtgtctgccgaagcctggggcagagccgattgcggctttaccagcgagagctaccagcagggcgtgctgagcgccaccatcctgtacgagatcctgctgggcaaggccaccctgtacgccgtgctggtgtctgccctggtgctgatggctatggtcaagcggaaggacagccggggaagggccaagcgatctggatctggagcaacaaacttctcactactcaaacaagcaggtgacgtggaggagaatcccgggcctactagtaccatggactggatttggcgcatccttttccttgtcggcgctgctaccggcgcccattccgggccccaggtgcagctggttgaatctggcggaggactggttcagcctggcggatctctgagactgtcttgtgccgccagcggcaacatcaacagcagaaactgcatgggctggttcagacaggcccctggcaagggaagagaaggcgtggcagctatcggccaagtgaccggcagaacctactacgtggacagcgtgaagggcagattcaccatcagcctggacaacagcaagaacaccctgtacctccagatgaacagcctgagagccgaggacaccgccgtgtactattgtgctgctgcccctggctgtctgctgtctgcacttagaagcgccgactacagaaactggggccagggcacactggtcaccgtttcttctggatccggcggcggaggatctggcggaggcggatctgggggcggaggctctttcgaagaagtgcagctggttgaatcaggcggaggactggttcagcctggcggatctctgagactgtcttgtgccgccagcggctacaccttcagcagctactggatgaactgggtccgacaggcccctggcaaaggactggaatgggtcggaatgatcgaccccagcgacagcgagacacactacaaccacatcttcaaggaccgcttcaccatcagcgccgacaccagcaagaataccgcctacctccagatgaactccctgagagccgaggacaccgccgtgtactactgcgccagaaacctgtatctgtggggccagggaaccctggtcacagtgtcatctacgcgtatccagaaccctgatcctgccgtgtaccagctgcgggatagcaagagcagcgacaagagcgtgtgtctgttcaccgacttcgacagccagaccaacgtgtcccagagcaaggactccgacgtgtacatcaccgataagtgcgtgctggacatgcggagcatggacttcaagagcaactccgccgtggcctggtccaacaagtccgatttcgcctgcgccaacgccttcaacaacagcattatccccgaggacacattcttcccaagccccgagagcagctgcgacgtgaagctggtggaaaagagcttcgagacagacaccaacctgaacttccagaacctgagcgtgatcggcttcagaatcctgctgctgaaagtggccggctttaacctgctgatgaccctgcggctgtggtccagc

SEQ ID NO: 36982 - DNA, 2295 bp, synthetic construct
  source 1..2295: mol_type = other DNA
atggccttaccagtgaccgccttgctcctgccgctggccttgctgctccacgccgccaggccggacatccagatgacacagagccctagcagcctgtctgccagcgtgggagacagagtgaccatcacatgcaagagcagccagagcctgctggactccgatggcaagacctacctgaactggtatcagcagaagcccggcaaggcccctaagctgctgatctacctggtgtccaagctggatagcggcgtgcccagcagattttctggcagcggcagcggaaccgacttcaccctgacaatatccagcctccagcctgaggacttcgccacctactactgctggcaaggcacccactttccattcaccttcggccagggcaccaaggtggaaatcaaaagactcgaggacctgaagaacgtgttcccacctgaggtggccgtgttcgagcctagcgaggccgagatcagccacacccagaaagccaccctcgtgtgcctggctaccggcttctaccccgaccatgtggaactgtcttggtgggtcaacggcaaagaggtgcacagcggcgtgtgtaccgacccccagccactgaaagaacagcccgccctgaacgacagccggtactgcctgagcagcagactgagagtgtccgccaccttctggcagaacccccggaaccacttcagatgccaggtgcagttctacggcctgagcgagaacgacgagtggacccaggacagagccaagcccgtgacccagatcgtgtctgccgaagcctggggcagagccgattgcggctttaccagcgagagctaccagcagggcgtgctgagcgccaccatcctgtacgagatcctgctgggcaaggccaccctgtacgccgtgctggtgtctgccctggtgctgatggctatggtcaagcggaaggacagccggggaagggccaagcgatctggatctggagcaacaaacttctcactactcaaacaagcaggtgacgtggaggagaatcccgggcctactagtaccatggactggatttggcgcatccttttccttgtcggcgctgctaccggcgcccattccgggccccaggtgcagctggttgaatctggcggaggatctgttcaggctggcggctctctgagactgtcttgtggcgcttccggcaacatcagcagcagaaactgcatgggctggttcagacaggcccctggcaaagagagagaaggcgttgccgccatcggacaagtgaccggcagatcctactacgtggacagcgtgaagggcagattcaccatcagcctggacaacgccaagaacaccctgtacctccagatgaacacactgaagcccgaggacaccgccatgtactactgtgctgctgcccctggctgtctgctgtctgcacttagaagcgccgactacagaaactggggccagggaacccaagtgacagtgtctagtggatccggcggcggaggatctggcggaggcggatctgggggcggaggctctttcgaagaagtgcagctggttgaatcaggcggaggactggttcagcctggcggatctctgagactgtcttgtgccgccagcggctacaccttcagcagctactggatgaactgggtccgacaggcccctggcaaaggactggaatgggtcggaatgatcgaccccagcgacagcgagacacactacaaccacatcttcaaggaccgcttcaccatcagcgccgacaccagcaagaataccgcctacctccagatgaactccctgagagccgaggacaccgccgtgtactactgcgccagaaacctgtatctgtggggccagggaaccctggtcacagtgtcatctacgcgtatccagaaccctgatcctgccgtgtaccagctgcgggatagcaagagcagcgacaagagcgtgtgtctgttcaccgacttcgacagccagaccaacgtgtcccagagcaaggactccgacgtgtacatcaccgataagtgcgtgctggacatgcggagcatggacttcaagagcaactccgccgtggcctggtccaacaagtccgatttcgcctgcgccaacgccttcaacaacagcattatccccgaggacacattcttcccaagccccgagagcagctgcgacgtgaagctggtggaaaagagcttcgagacagacaccaacctgaacttccagaacctgagcgtgatcggcttcagaatcctgctgctgaaagtggccggctttaacctgctgatgaccctgcggctgtggtccagctaa

SEQ ID NO: 36983 - DNA, 2718 bp, synthetic construct
  source 1..2718: mol_type = other DNA
atggccttaccagtgaccgccttgctcctgccgctggccttgctgctccacgccgccaggccggaagtgcagctggttgaatctggcggaggactggttcaggctggcggatctctgagactgtcttgtgccgccagcggcagaacctttagcatgggctggtttagacaggcccctggcaaagagagagagttcgtcgccgccatcacatactctggcggcagcccttactacgccgactctgtgaagggcagattcaccatcagccgggacaacgccaagaacaccgtgtacctccagatgaacagcctgaagcctgaggacaccgccgtgtactactgcgccgccaatccaacatacggcagcgactggaacgccgagaattggggccagggaacccaagtgacagtgtctagcggtaccggcggaggcggatctggcggcggaggtagcggtggcggaggatctgaattcgacatccagatgacacagagccctagcagcctgtctgccagcgtgggagacagagtgaccatcacatgcaagagcagccagagcctgctggactccgatggcaagacctacctgaactggtatcagcagaagcccggcaaggcccctaagctgctgatctacctggtgtccaagctggatagcggcgtgcccagcagattttctggcagcggcagcggaaccgacttcaccctgacaatatccagcctccagcctgaggacttcgccacctactactgctggcaaggcacccactttccattcaccttcggccagggcaccaaggtggaaatcaaaagactcgagatccagaaccctgatcctgccgtgtaccagctgcgggatagcaagagcagcgacaagagcgtgtgtctgttcaccgacttcgacagccagaccaacgtgtcccagagcaaggactccgacgtgtacatcaccgataagtgcgtgctggacatgcggagcatggacttcaagagcaactccgccgtggcctggtccaacaagtccgatttcgcctgcgccaacgccttcaacaacagcattatccccgaggacacattcttcccaagcagcgacgtgccctgcgacgtgaagctggtggaaaagagcttcgagacagacaccaacctgaacttccagaacctgagcgtgatcggcttcagaatcctgctgctgaaagtggccggctttaacctgctgatgaccctgcggctgtggtccagccgcgccaagagaagcggatctggcgtgaagcagaccctgaatttcgacctgctgaagctggctggcgacgtggaatccaacccaggccctactagtaccatggactggatttggcgcatccttttccttgtcggcgctgctaccggcgcccattccgggccccaggtgcagctggttgaatctggcggaggatctgttcaggctggcggctctctgagactgtcttgtggcgcttccggcaacatcagcagcagaaactgcatgggctggttcagacaggcccctggcaaagagagagaaggcgttgccgccatcggacaagtgaccggcagatcctactacgtggacagcgtgaagggcagattcaccatcagcctggacaacgccaagaacaccctgtacctccagatgaacacactgaagcccgaggacaccgccatgtactactgtgctgctgcccctggctgtctgctgtctgcacttagaagcgccgactacagaaactggggccagggaacccaagtgacagtgtctagtggatccggcggcggaggatctggcggaggcggatctgggggcggaggctctttcgaagaagtgcagctggttgaatcaggcggaggactggttcagcctggcggatctctgagactgtcttgtgccgccagcggctacaccttcagcagctactggatgaactgggtccgacaggcccctggcaaaggactggaatgggtcggaatgatcgaccccagcgacagcgagacacactacaaccacatcttcaaggaccgcttcaccatcagcgccgacaccagcaagaataccgcctacctccagatgaactccctgagagccgaggacaccgccgtgtactactgcgccagaaacctgtatctgtggggccagggaaccctggtcacagtgtcatctacgcgtgaggacctgaagaacgtgttcccacctgaggtggccgtgttcgagcctagcaaggccgagatcgcccacacccagaaagccaccctcgtgtgcctggctaccggcttctaccccgaccatgtggaactgtcttggtgggtcaacggcaaagaggtgcacagcggcgtgtgtaccgacccccagccactgaaagaacagcccgccctgaacgacagccggtactgcctgagcagcagactgagagtgtccgccaccttctggcagaacccccggaaccacttcagatgccaggtgcagttctacggcctgagcgagaacgacgagtggacccaggacagagccaagcccgtgacccagatcgtgtctgccgaagcctggggcagagccgattgcggcatcaccagcgccagctaccaccagggcgtgctgagcgccaccatcctgtacgagatcctgctgggcaaggccaccctgtacgccgtgctggtgtctgccctggtgctgatggctatggtcaagcggaaggacagccggggataa

SEQ ID NO: 36984 - DNA, 2709 bp, synthetic construct
  source 1..2709: mol_type = other DNA
atggccttaccagtgaccgccttgctcctgccgctggccttgctgctccacgccgccaggccgcaggtgcagctggttgaatctggcggaggatctgttcaggctggcggctctctgagactgtcttgtggcgcttccggcaacatcagcagcagaaactgcatgggctggttcagacaggcccctggcaaagagagagaaggcgttgccgccatcggacaagtgaccggcagatcctactacgtggacagcgtgaagggcagattcaccatcagcctggacaacgccaagaacaccctgtacctccagatgaacacactgaagcccgaggacaccgccatgtactactgtgctgctgcccctggctgtctgctgtctgcacttagaagcgccgactacagaaactggggccagggaacccaagtgacagtgtctagtggtaccggcggaggcggatctggcggcggaggtagcggtggcggaggatctgaattcgacatccagatgacacagagccctagcagcctgtctgccagcgtgggagacagagtgaccatcacatgcaagagcagccagagcctgctggactccgatggcaagacctacctgaactggtatcagcagaagcccggcaaggcccctaagctgctgatctacctggtgtccaagctggatagcggcgtgcccagcagattttctggcagcggcagcggaaccgacttcaccctgacaatatccagcctccagcctgaggacttcgccacctactactgctggcaaggcacccactttccattcaccttcggccagggcaccaaggtggaaatcaaaagactcgaggacctgaagaacgtgttcccacctgaggtggccgtgttcgagcctagcgaggccgagatcagccacacccagaaagccaccctcgtgtgcctggctaccggcttctaccccgaccatgtggaactgtcttggtgggtcaacggcaaagaggtgcacagcggcgtgtgtaccgacccccagccactgaaagaacagcccgccctgaacgacagccggtactgcctgagcagcagactgagagtgtccgccaccttctggcagaacccccggaaccacttcagatgccaggtgcagttctacggcctgagcgagaacgacgagtggacccaggacagagccaagcccgtgacccagatcgtgtctgccgaagcctggggcagagccgattgcggctttaccagcgagagctaccagcagggcgtgctgagcgccaccatcctgtacgagatcctgctgggcaaggccaccctgtacgccgtgctggtgtctgccctggtgctgatggctatggtcaagcggaaggacagccggggaagggccaagcgatctggatctggagcaacaaacttctcactactcaaacaagcaggtgacgtggaggagaatcccgggcctactagtgccaccatggactggatttggcgcatccttttccttgtcggcgctgctaccggcgcccattccgggcccgaagtgcaactggttgaatccggtggcggcctggtgcaagcaggcggatctctcagacttagctgtgccgcctccggcagaaccttcacaatgggatggtttaggcaggctccagggaaagagagagagttcgtcgccgccatctctctgtctcccacactggcctactacgccgactctgtgaaaggccggttcaccatctccagagataatgccaagaacaccgtggtgctgcaaatgaactctctgaaacccgaggatacagccctgtactattgtgccgctgaccggaagtccgtgatgagcatcagacccgattactggggacagggcacacaagtcacagtgtcctctggatccggcggcggaggatctggcggaggcggatctgggggcggaggctctttcgaagaagtgcagctggttgaatcaggcggaggactggttcagcctggcggatctctgagactgtcttgtgccgccagcggctacaccttcagcagctactggatgaactgggtccgacaggcccctggcaaaggactggaatgggtcggaatgatcgaccccagcgacagcgagacacactacaaccacatcttcaaggaccgcttcaccatcagcgccgacaccagcaagaataccgcctacctccagatgaactccctgagagccgaggacaccgccgtgtactactgcgccagaaacctgtatctgtggggccagggaaccctggtcacagtgtcatctacgcgtatccagaaccctgatcctgccgtgtaccagctgcgggatagcaagagcagcgacaagagcgtgtgtctgttcaccgacttcgacagccagaccaacgtgtcccagagcaaggactccgacgtgtacatcaccgataagtgcgtgctggacatgcggagcatggacttcaagagcaactccgccgtggcctggtccaacaagtccgatttcgcctgcgccaacgccttcaacaacagcattatccccgaggacacattcttcccaagccccgagagcagctgcgacgtgaagctggtggaaaagagcttcgagacagacaccaacctgaacttccagaacctgagcgtgatcggcttcagaatcctgctgctgaaagtggccggctttaacctgctgatgaccctgcggctgtggtccagctaa

SEQ ID NO: 36985 - DNA, 2298 bp, synthetic construct
  source 1..2298: mol_type = other DNA
atggccttaccagtgaccgccttgctcctgccgctggccttgctgctccacgccgccaggccgcaggtgcagctggttgaatctggcggaggatctgttcaggctggcggctctctgagactgtcttgtggcgcttccggcaacatcagcagcagaaactgcatgggctggttcagacaggcccctggcaaagagagagaaggcgttgccgccatcggacaagtgaccggcagatcctactacgtggacagcgtgaagggcagattcaccatcagcctggacaacgccaagaacaccctgtacctccagatgaacacactgaagcccgaggacaccgccatgtactactgtgctgctgcccctggctgtctgctgtctgcacttagaagcgccgactacagaaactggggccagggaacccaagtgacagtgtctagtggtaccggcggaggcggatctggcggcggaggtagcggtggcggaggatctgaattcgacatccagatgacacagagccctagcagcctgtctgccagcgtgggagacagagtgaccatcacatgcaagagcagccagagcctgctggactccgatggcaagacctacctgaactggtatcagcagaagcccggcaaggcccctaagctgctgatctacctggtgtccaagctggatagcggcgtgcccagcagattttctggcagcggcagcggaaccgacttcaccctgacaatatccagcctccagcctgaggacttcgccacctactactgctggcaaggcacccactttccattcaccttcggccagggcaccaaggtggaaatcaaaagactcgaggacctgaagaacgtgttcccacctgaggtggccgtgttcgagcctagcgaggccgagatcagccacacccagaaagccaccctcgtgtgcctggctaccggcttctaccccgaccatgtggaactgtcttggtgggtcaacggcaaagaggtgcacagcggcgtgtgtaccgacccccagccactgaaagaacagcccgccctgaacgacagccggtactgcctgagcagcagactgagagtgtccgccaccttctggcagaacccccggaaccacttcagatgccaggtgcagttctacggcctgagcgagaacgacgagtggacccaggacagagccaagcccgtgacccagatcgtgtctgccgaagcctggggcagagccgattgcggctttaccagcgagagctaccagcagggcgtgctgagcgccaccatcctgtacgagatcctgctgggcaaggccaccctgtacgccgtgctggtgtctgccctggtgctgatggctatggtcaagcggaaggacagccggggaagggccaagcgatctggatctggagcaacaaacttctcactactcaaacaagcaggtgacgtggaggagaatcccgggcctactagtgccaccatggactggatttggcgcatccttttccttgtcggcgctgctaccggcgcccattccttcgaagaagtgcagctggttgaatcaggcggaggactggttcagcctggcggatctctgagactgtcttgtgccgccagcggctacaccttcagcagctactggatgaactgggtccgacaggcccctggcaaaggactggaatgggtcggaatgatcgaccccagcgacagcgagacacactacaaccacatcttcaaggaccgcttcaccatcagcgccgacaccagcaagaataccgcctacctccagatgaactccctgagagccgaggacaccgccgtgtactactgcgccagaaacctgtatctgtggggccagggaaccctggtcacagtgtcatctacgcgtatccagaaccctgatcctgccgtgtaccagctgcgggatagcaagagcagcgacaagagcgtgtgtctgttcaccgacttcgacagccagaccaacgtgtcccagagcaaggactccgacgtgtacatcaccgataagtgcgtgctggacatgcggagcatggacttcaagagcaactccgccgtggcctggtccaacaagtccgatttcgcctgcgccaacgccttcaacaacagcattatccccgaggacacattcttcccaagccccgagagcagctgcgacgtgaagctggtggaaaagagcttcgagacagacaccaacctgaacttccagaacctgagcgtgatcggcttcagaatcctgctgctgaaagtggccggctttaacctgctgatgaccctgcggctgtggtccagctaa

SEQ ID NO: 36986 - DNA, 2298 bp, synthetic construct
  source 1..2298: mol_type = other DNA
atggccttaccagtgaccgccttgctcctgccgctggccttgctgctccacgccgccaggccgcaagttcagctggtggaaagcggtggtggcgttgtgcaacctggtggaagtctgaggctgagctgtgccgcttctggcctgagctttagcacctacactgtggcctggttcaggcaggctcccggaaagggtcttgaaggcgtggccgccattccttacaccagccagcacatggtgtacacagacagcgtcagaggccggttcaccatcagcagagacaactccaagaatacgctctatctccagatgaactctctgcgcgccgaagatacagccgtgtattactgcgccaccgacagacggcctggcacctctatgctggctatcaacggctacaacagatggggacagggaaccaccgtgaccgtgtcatctggtaccggcggaggcggatctggcggcggaggtagcggtggcggaggatctgaattcgacatccagatgacacagagccctagcagcctgtctgccagcgtgggagacagagtgaccatcacatgcaagagcagccagagcctgctggactccgatggcaagacctacctgaactggtatcagcagaagcccggcaaggcccctaagctgctgatctacctggtgtccaagctggatagcggcgtgcccagcagattttctggcagcggcagcggaaccgacttcaccctgacaatatccagcctccagcctgaggacttcgccacctactactgctggcaaggcacccactttccattcaccttcggccagggcaccaaggtggaaatcaaaagactcgaggacctgaagaacgtgttcccacctgaggtggccgtgttcgagcctagcgaggccgagatcagccacacccagaaagccaccctcgtgtgcctggctaccggcttctaccccgaccatgtggaactgtcttggtgggtcaacggcaaagaggtgcacagcggcgtgtgtaccgacccccagccactgaaagaacagcccgccctgaacgacagccggtactgcctgagcagcagactgagagtgtccgccaccttctggcagaacccccggaaccacttcagatgccaggtgcagttctacggcctgagcgagaacgacgagtggacccaggacagagccaagcccgtgacccagatcgtgtctgccgaagcctggggcagagccgattgcggctttaccagcgagagctaccagcagggcgtgctgagcgccaccatcctgtacgagatcctgctgggcaaggccaccctgtacgccgtgctggtgtctgccctggtgctgatggctatggtcaagcggaaggacagccggggaagggccaagcgatctggatctggagcaacaaacttctcactactcaaacaagcaggtgacgtggaggagaatcccgggcctactagtgccaccatggactggatttggcgcatccttttccttgtcggcgctgctaccggcgcccattccttcgaagaagtgcagctggttgaatcaggcggaggactggttcagcctggcggatctctgagactgtcttgtgccgccagcggctacaccttcagcagctactggatgaactgggtccgacaggcccctggcaaaggactggaatgggtcggaatgatcgaccccagcgacagcgagacacactacaaccacatcttcaaggaccgcttcaccatcagcgccgacaccagcaagaataccgcctacctccagatgaactccctgagagccgaggacaccgccgtgtactactgcgccagaaacctgtatctgtggggccagggaaccctggtcacagtgtcatctacgcgtatccagaaccctgatcctgccgtgtaccagctgcgggatagcaagagcagcgacaagagcgtgtgtctgttcaccgacttcgacagccagaccaacgtgtcccagagcaaggactccgacgtgtacatcaccgataagtgcgtgctggacatgcggagcatggacttcaagagcaactccgccgtggcctggtccaacaagtccgatttcgcctgcgccaacgccttcaacaacagcattatccccgaggacacattcttcccaagccccgagagcagctgcgacgtgaagctggtggaaaagagcttcgagacagacaccaacctgaacttccagaacctgagcgtgatcggcttcagaatcctgctgctgaaagtggccggctttaacctgctgatgaccctgcggctgtggtccagctaa

SEQ ID NO: 36987 - DNA, 2295 bp, synthetic construct
  source 1..2295: mol_type = other DNA
atggccttaccagtgaccgccttgctcctgccgctggccttgctgctccacgccgccaggccggacatccagatgacacagagccctagcagcctgtctgccagcgtgggagacagagtgaccatcacatgcaagagcagccagagcctgctggactccgatggcaagacctacctgaactggtatcagcagaagcccggcaaggcccctaagctgctgatctacctggtgtccaagctggatagcggcgtgcccagcagattttctggcagcggcagcggaaccgacttcaccctgacaatatccagcctccagcctgaggacttcgccacctactactgctggcaaggcacccactttccattcaccttcggccagggcaccaaggtggaaatcaaaagactcgaggacctgaagaacgtgttcccacctgaggtggccgtgttcgagcctagcgaggccgagatcagccacacccagaaagccaccctcgtgtgcctggctaccggcttctaccccgaccatgtggaactgtcttggtgggtcaacggcaaagaggtgcacagcggcgtgtgtaccgacccccagccactgaaagaacagcccgccctgaacgacagccggtactgcctgagcagcagactgagagtgtccgccaccttctggcagaacccccggaaccacttcagatgccaggtgcagttctacggcctgagcgagaacgacgagtggacccaggacagagccaagcccgtgacccagatcgtgtctgccgaagcctggggcagagccgattgcggctttaccagcgagagctaccagcagggcgtgctgagcgccaccatcctgtacgagatcctgctgggcaaggccaccctgtacgccgtgctggtgtctgccctggtgctgatggctatggtcaagcggaaggacagccggggaagggccaagcgatctggatctggagcaacaaacttctcactactcaaacaagcaggtgacgtggaggagaatcccgggcctactagtaccatggactggatttggcgcatccttttccttgtcggcgctgctaccggcgcccattccgggccccaagttcagctggtggaaagcggtggtggcgttgtgcaacctggtggaagtctgaggctgagctgtgccgcttctggcctgagctttagcacctacactgtggcctggttcaggcaggctcccggaaagggtcttgaaggcgtggccgccattccttacaccagccagcacatggtgtacacagacagcgtcagaggccggttcaccatcagcagagacaactccaagaatacgctctatctccagatgaactctctgcgcgccgaagatacagccgtgtattactgcgccaccgacagacggcctggcacctctatgctggctatcaacggctacaacagatggggacagggaaccaccgtgaccgtgtcatctggatccggcggcggaggatctggcggaggcggatctgggggcggaggctctttcgaagaagtgcagctggttgaatcaggcggaggactggttcagcctggcggatctctgagactgtcttgtgccgccagcggctacaccttcagcagctactggatgaactgggtccgacaggcccctggcaaaggactggaatgggtcggaatgatcgaccccagcgacagcgagacacactacaaccacatcttcaaggaccgcttcaccatcagcgccgacaccagcaagaataccgcctacctccagatgaactccctgagagccgaggacaccgccgtgtactactgcgccagaaacctgtatctgtggggccagggaaccctggtcacagtgtcatctacgcgtatccagaaccctgatcctgccgtgtaccagctgcgggatagcaagagcagcgacaagagcgtgtgtctgttcaccgacttcgacagccagaccaacgtgtcccagagcaaggactccgacgtgtacatcaccgataagtgcgtgctggacatgcggagcatggacttcaagagcaactccgccgtggcctggtccaacaagtccgatttcgcctgcgccaacgccttcaacaacagcattatccccgaggacacattcttcccaagccccgagagcagctgcgacgtgaagctggtggaaaagagcttcgagacagacaccaacctgaacttccagaacctgagcgtgatcggcttcagaatcctgctgctgaaagtggccggctttaacctgctgatgaccctgcggctgtggtccagctaa

SEQ ID NO: 36988 - DNA, 2301 bp, synthetic construct
  source 1..2301: mol_type = other DNA
atggccttaccagtgaccgccttgctcctgccgctggccttgctgctccacgccgccaggccggacatccagatgacacagagccctagcagcctgtctgccagcgtgggagacagagtgaccatcacatgcaagagcagccagagcctgctggactccgatggcaagacctacctgaactggtatcagcagaagcccggcaaggcccctaagctgctgatctacctggtgtccaagctggatagcggcgtgcccagcagattttctggcagcggcagcggaaccgacttcaccctgacaatatccagcctccagcctgaggacttcgccacctactactgctggcaaggcacccactttccattcaccttcggccagggcaccaaggtggaaatcaaaagactcgaggacctgaagaacgtgttcccacctgaggtggccgtgttcgagcctagcgaggccgagatcagccacacccagaaagccaccctcgtgtgcctggctaccggcttctaccccgaccatgtggaactgtcttggtgggtcaacggcaaagaggtgcacagcggcgtgtgtaccgacccccagccactgaaagaacagcccgccctgaacgacagccggtactgcctgagcagcagactgagagtgtccgccaccttctggcagaacccccggaaccacttcagatgccaggtgcagttctacggcctgagcgagaacgacgagtggacccaggacagagccaagcccgtgacccagatcgtgtctgccgaagcctggggcagagccgattgcggctttaccagcgagagctaccagcagggcgtgctgagcgccaccatcctgtacgagatcctgctgggcaaggccaccctgtacgccgtgctggtgtctgccctggtgctgatggctatggtcaagcggaaggacagccggggaagggccaagcgatctggatctggagcaacaaacttctcactactcaaacaagcaggtgacgtggaggagaatcccgggcctactagtaccatggactggatttggcgcatccttttccttgtcggcgctgctaccggcgcccattccgggcccgaggtgcagctggttgaatctggcggaggatctgttcaggctggcggctctctgagactgtcttgtgccgccagcggctacacctacagcatcaactgcatgggctggttcagacaggcccctggcaaagagagagaaggcgttgccgccatctctaccggcggaggcagaaccgattaccgggattctgtgaagggcagattcaccatcagccaggacaacgccaagaacaccgtgtacctccagatgaacagcctgaagcctgaggacaccgccatgtactactgtgccggcaagaccacctatcctggctacggatgtggcctgggcagaagcgcctacaattattggggccagggcacccaagtgaccgtgtcatctggatccggcggcggaggatctggcggaggcggatctgggggcggaggctctttcgaagaagtgcagctggttgaatcaggcggaggactggttcagcctggcggatctctgagactgtcttgtgccgccagcggctacaccttcagcagctactggatgaactgggtccgacaggcccctggcaaaggactggaatgggtcggaatgatcgaccccagcgacagcgagacacactacaaccacatcttcaaggaccgcttcaccatcagcgccgacaccagcaagaataccgcctacctccagatgaactccctgagagccgaggacaccgccgtgtactactgcgccagaaacctgtatctgtggggccagggaaccctggtcacagtgtcatctacgcgtatccagaaccctgatcctgccgtgtaccagctgcgggatagcaagagcagcgacaagagcgtgtgtctgttcaccgacttcgacagccagaccaacgtgtcccagagcaaggactccgacgtgtacatcaccgataagtgcgtgctggacatgcggagcatggacttcaagagcaactccgccgtggcctggtccaacaagtccgatttcgcctgcgccaacgccttcaacaacagcattatccccgaggacacattcttcccaagccccgagagcagctgcgacgtgaagctggtggaaaagagcttcgagacagacaccaacctgaacttccagaacctgagcgtgatcggcttcagaatcctgctgctgaaagtggccggctttaacctgctgatgaccctgcggctgtggtccagctaa

SEQ ID NO: 36989 - DNA, 1857 bp, synthetic construct
  source 1..1857: mol_type = other DNA
atggccttaccagtgaccgccttgctcctgccgctggccttgctgctccacgccgccaggccggacatccagatgacacagagccctagcagcctgtctgccagcgtgggagacagagtgaccatcacatgcaagagcagccagagcctgctggactccgatggcaagacctacctgaactggtatcagcagaagcccggcaaggcccctaagctgctgatctacctggtgtccaagctggatagcggcgtgcccagcagattttctggcagcggcagcggaaccgacttcaccctgacaatatccagcctccagcctgaggacttcgccacctactactgctggcaaggcacccactttccattcaccttcggccagggcaccaaggtggaaatcaaaagactcgaggacctgaagcacgtgttcccacctgaggtggccgtgttcgagcctagcgacgccgagatctggcacacccagaaagccaccctcgtgtgcctggctaccggcttctaccccgaccatgtggaactgtcttggtgggtcaacggcaaagaggtgcacagcggcgtgtctaccgacccccagccactgaaagaacagcccgccctgaacgacagccggtactgcctgagcagcagactgagagtgtccgccaccttctggcagaacccccggaaccacttcagatgccaggtgcagttctacggcctgagcgagaacgacgagtggacccaggacagagccaagcccgtgacccagatcgtgtctgccgaagcctggggcagagccgattgcggctttaccagcgagagctaccagcagggcgtgctgagcgccaccatcctgtacgagatcctgctgggcaaggccaccctgtacgccgtgctggtgtctgccctggtgctgatggctatggtcaagcggaaggacagccggggaagggccaagcgatctggatctggagcaacaaacttctcactactcaaacaagcaggtgacgtggaggagaatcccgggcctactagtatggactggatttggcgcatccttttccttgtcggcgctgctaccggcgcgcattccttcgaagaagtgcagctggttgaatcaggcggaggactggttcagcctggcggatctctgagactgtcttgtgccgccagcggctacaccttcagcagctactggatgaactgggtccgacaggcccctggcaaaggactggaatgggtcggaatgatcgaccccagcgacagcgagacacactacaaccacatcttcaaggaccgcttcaccatcagcgccgacaccagcaagaataccgcctacctccagatgaactccctgagagccgaggacaccgccgtgtactactgcgccagaaacctgtatctgtggggccagggaaccctggtcacagtgtcatctacgcgtatccagaaccctgatcctgccgtgtaccagctgcgggatagcaagagcagcgacaagagcgtgtgtctgttcaccgacttcgacagccagaccaacgtgtcccagagcaaggactccgacgtgtacatcaccgataagaccgtgctggacatgcggagcatggacttcaagagcaactccgccgtggcctggtccagcaagtccgatttcgcctgcgccaacgccttcaacaacagcattatccccgaggacacattcttcccaagccccgagatggcctgcgacgtgaagctggtggaaaagagcttcgagacagacaccaacctgaacttccagaacctgctcgtgatctggctgagaatcctgctgctgaaagtggccggctttaacctgctgatgaccctgcggctgtggtccagc

SEQ ID NO: 36990 - DNA, 1857 bp, synthetic construct
  source 1..1857: mol_type = other DNA
atggccttaccagtgaccgccttgctcctgccgctggccttgctgctccacgccgccaggccggacatccagatgacacagagccctagcagcctgtctgccagcgtgggagacagagtgaccatcacatgcaagagcagccagagcctgctggactccgatggcaagacctacctgaactggtatcagcagaagcccggcaaggcccctaagctgctgatctacctggtgtccaagctggatagcggcgtgcccagcagattttctggcagcggcagcggaaccgacttcaccctgacaatatccagcctccagcctgaggacttcgccacctactactgctggcaaggcacccactttccattcaccttcggccagggcaccaaggtggaaatcaaaagactcgaggacctgaagcacgtgttcccacctgaggtggccgtgttcgagcctagcgacgccgagatctggcacacccagaaagccaccctcgtgtgcctggctaccggcttctaccccgaccatgtggaactgtcttggtgggtcaacggcaaagaggtgcacagcggcgtgtctaccgacccccagccactgaaagaacagcccgccctgaacgacagccggtactgcctgagcagcagactgagagtgtccgccaccttctggcagaacccccggaaccacttcagatgccaggtgcagttctacggcctgagcgagaacgacgagtggacccaggacagagccaagcccgtgacccagatcgtgtctgccgaagcctggggcagagccgattgcggctttaccagcgagagctaccagcagggcgtgctgagcgccaccatcctgtacgagatcctgctgggcaaggccaccctgtacgccgtgctggtgtctgccctggtgctgatggctatggtcaagcggaaggacagccggggaagggccaagcgatctggatctggagcaacaaacttctcactactcaaacaagcaggtgacgtggaggagaatcccgggcctactagtatggactggatttggcgcatccttttccttgtcggcgctgctaccggcgcgcattccttcgaagaagtgcagctggttgaatcaggcggaggactggttcagcctggcggatctctgagactgtcttgtgccgccagcggctacaccttcagcagctactggatgaactgggtccgacaggcccctggcaaaggactggaatgggtcggaatgatcgaccccagcgacagcgagacacactacaaccacatcttcaaggaccgcttcaccatcagcgccgacaccagcaagaataccgcctacctccagatgaactccctgagagccgaggacaccgccgtgtactactgcgccagaaacctgtatctgtggggccagggaaccctggtcacagtgtcatctacgcgtatccagaaccctgatcctgccgtgtaccagctgcgggatagcaagagcagcgacaagagcgtgtgtctgttcaccgacttcgacagccagaccaacgtgtcccagagcaaggactccgacgtgtacatcaccgataagaccgtgctggacatgcggagcatggacttcaagagcaactccgccgtggcctggtccaccaagtccgatttcgcctgcgccaacgccttcaacaacagcattatccccgaggacacattcttcccaagccccgaggtggtgtgcgacgtgaagctggtggaaaagagcttcgagacagacaccaacctgaacttccagaacctggtggtgatcggcgccagaatcctgctgctgaaagtggccggctttaacctgctgatgaccctgcggctgtggtccagc

SEQ ID NO: 36991 - DNA, 1857 bp, synthetic construct
  source 1..1857: mol_type = other DNA
atggccttaccagtgaccgccttgctcctgccgctggccttgctgctccacgccgccaggccggacatccagatgacacagagccctagcagcctgtctgccagcgtgggagacagagtgaccatcacatgcaagagcagccagagcctgctggactccgatggcaagacctacctgaactggtatcagcagaagcccggcaaggcccctaagctgctgatctacctggtgtccaagctggatagcggcgtgcccagcagattttctggcagcggcagcggaaccgacttcaccctgacaatatccagcctccagcctgaggacttcgccacctactactgctggcaaggcacccactttccattcaccttcggccagggcaccaaggtggaaatcaaaagactcgaggacctgaagaacgtgttcccacctgaggtggccgtgttcgagcctagcaaggccgagatcagcagaacccagaaagccaccctcgtgtgcctggctaccggcttctaccctcctcatgtggaactgtcttggtgggtcaacggcaaagaggtgcacgacggcgtgtgtaccgacccccagccactgaaagaacagcccgccctgaacgacagccggtactgcctgagcagcagactgagagtgtccgccaccttctggcagaacccccggaaccacttcagatgccaggtgcagttctacggcctgagcgagaacgacgagtggacccaggacagagccaagcccgtgacccagatcgtgtctgccgaagcctggggcagagccgattgcggctttaccagcgagagctaccagcagggcgtgctgagcgccaccatcctgtacgagatcctgctgggcaaggccaccctgtacgccgtgctggtgtctgccctggtgctgatggctatggtcaagcggaaggacagccggggaagggccaagcgatctggatctggagcaacaaacttctcactactcaaacaagcaggtgacgtggaggagaatcccgggcctactagtatggactggatttggcgcatccttttccttgtcggcgctgctaccggcgcgcattccttcgaagaagtgcagctggttgaatcaggcggaggactggttcagcctggcggatctctgagactgtcttgtgccgccagcggctacaccttcagcagctactggatgaactgggtccgacaggcccctggcaaaggactggaatgggtcggaatgatcgaccccagcgacagcgagacacactacaaccacatcttcaaggaccgcttcaccatcagcgccgacaccagcaagaataccgcctacctccagatgaactccctgagagccgaggacaccgccgtgtactactgcgccagaaacctgtatctgtggggccagggaaccctggtcacagtgtcatctacgcgtatccagaaccctgatcctgccgtgtaccagctgcgggatagcaagagcagcgacaagttcgtgtgtctgttcaccgacttcgacagccagatcaacgtgtcccagagcaaggactccgacgtgtacatcaccgataagtgcgtgctggacatgcggagcatggacttcaagagcaactccgccgtggcctggtccaacaagtccgatttcacctgcgccaacgccttcaacaacagcattatccccgaggacacattcttcccaagccccgagagcagctgcgacgtgaagctggtggaaaagagcttcgagacagacaccaacctgaacttccagaacctgagcgtgatcggcttcagaatcctgctgctgaaagtggccggctttaacctgctgatgaccctgcggctgtggtccagc

SEQ ID NO: 36992 - DNA, 2283 bp, synthetic construct
  source 1..2283: mol_type = other DNA
atggccttaccagtgaccgccttgctcctgccgctggccttgctgctccacgccgccaggccggacatccagatgacacagagccctagcagcctgtctgccagcgtgggagacagagtgaccatcacatgcaagagcagccagagcctgctggactccgatggcaagacctacctgaactggtatcagcagaagcccggcaaggcccctaagctgctgatctacctggtgtccaagctggatagcggcgtgcccagcagattttctggcagcggcagcggaaccgacttcaccctgacaatatccagcctccagcctgaggacttcgccacctactactgctggcaaggcacccactttccattcaccttcggccagggcaccaaggtggaaatcaaaagactcgaggacctgaagaacgtgttcccacctgaggtggccgtgttcgagcctagcgaggccgagatcagccacacccagaaagccaccctcgtgtgcctggctaccggcttctaccccgaccatgtggaactgtcttggtgggtcaacggcaaagaggtgcacagcggcgtgtgtaccgacccccagccactgaaagaacagcccgccctgaacgacagccggtactgcctgagcagcagactgagagtgtccgccaccttctggcagaacccccggaaccacttcagatgccaggtgcagttctacggcctgagcgagaacgacgagtggacccaggacagagccaagcccgtgacccagatcgtgtctgccgaagcctggggcagagccgattgcggctttaccagcgagagctaccagcagggcgtgctgagcgccaccatcctgtacgagatcctgctgggcaaggccaccctgtacgccgtgctggtgtctgccctggtgctgatggctatggtcaagcggaaggacagccggggaagggccaagcgatctggatctggagcaacaaacttctcactactcaaacaagcaggtgacgtggaggagaatcccgggcctactagtaccatggactggatttggcgcatccttttccttgtcggcgctgctaccggcgcccattccgggccccaggtgcagctccaagaaagcggacccggactggttaagccctctcagaccctgtctctgacctgcacagttagcggagccagcattaccacaggcgagtattattggaattggtttcggcagccaccaggcaaggggcttgagtggatgggtgctattgctgcctctggcagcaccacctactctcccagctttgagagcagaacctccatcagccgggacacctccaaaaaccagttctctctgaagctgtcctccgtgaccgctgctgacaccgccgtctattattgtggccggtctttcggcgtggcagctgtgaccacaggacagaacagaggccagggaacacttgtgaccgtgtcctctggatccggcggcggaggatctggcggaggcggatctgggggcggaggctctttcgaagaagtgcagctggttgaatcaggcggaggactggttcagcctggcggatctctgagactgtcttgtgccgccagcggctacaccttcagcagctactggatgaactgggtccgacaggcccctggcaaaggactggaatgggtcggaatgatcgaccccagcgacagcgagacacactacaaccacatcttcaaggaccgcttcaccatcagcgccgacaccagcaagaataccgcctacctccagatgaactccctgagagccgaggacaccgccgtgtactactgcgccagaaacctgtatctgtggggccagggaaccctggtcacagtgtcatctacgcgtatccagaaccctgatcctgccgtgtaccagctgcgggatagcaagagcagcgacaagagcgtgtgtctgttcaccgacttcgacagccagaccaacgtgtcccagagcaaggactccgacgtgtacatcaccgataagtgcgtgctggacatgcggagcatggacttcaagagcaactccgccgtggcctggtccaacaagtccgatttcgcctgcgccaacgccttcaacaacagcattatccccgaggacacattcttcccaagccccgagagcagctgcgacgtgaagctggtggaaaagagcttcgagacagacaccaacctgaacttccagaacctgagcgtgatcggcttcagaatcctgctgctgaaagtggccggctttaacctgctgatgaccctgcggctgtggtccagc

SEQ ID NO: 36993 - DNA, 2706 bp, synthetic construct
  source 1..2706: mol_type = other DNA
atggccttaccagtgaccgccttgctcctgccgctggccttgctgctccacgccgccaggccgcaggttcagctgcaagagtctggccctggcctggtcaagcctagccaaacactgagcctgacctgtaccgtgtctggcggctctatcaccaccggcgagttctactggaactggttcagacagcctcctggcaaaggactggaatggatgggagccattgccgccagcggcagcacaacatacagccctagcttcgagagccggaccagcatcagcagagacaccagcaagaatcagttcagcctgaagctgagcagcgtgacagccgccgatacagccgtgtattactgcggcagatcctttggagtggccgccgtgacaaccggccagaatagaggacagggcaccctggtcacagtgtctagcggtaccggcggaggcggatctggcggcggaggtagcggtggcggaggatctgaattcgacatccagatgacacagagccctagcagcctgtctgccagcgtgggagacagagtgaccatcacatgcaagagcagccagagcctgctggactccgatggcaagacctacctgaactggtatcagcagaagcccggcaaggcccctaagctgctgatctacctggtgtccaagctggatagcggcgtgcccagcagattttctggcagcggcagcggaaccgacttcaccctgacaatatccagcctccagcctgaggacttcgccacctactactgctggcaaggcacccactttccattcaccttcggccagggcaccaaggtggaaatcaaaagactcgagatccagaaccctgatcctgccgtgtaccagctgcgggatagcaagagcagcgacaagagcgtgtgtctgttcaccgacttcgacagccagaccaacgtgtcccagagcaaggactccgacgtgtacatcaccgataagtgcgtgctggacatgcggagcatggacttcaagagcaactccgccgtggcctggtccaacaagtccgatttcgcctgcgccaacgccttcaacaacagcattatccccgaggacacattcttcccaagcagcgacgtgccctgcgacgtgaagctggtggaaaagagcttcgagacagacaccaacctgaacttccagaacctgagcgtgatcggcttcagaatcctgctgctgaaagtggccggctttaacctgctgatgaccctgcggctgtggtccagccgcgccaagagaagcggatctggcgtgaagcagaccctgaatttcgacctgctgaagctggctggcgacgtggaatccaacccaggccctactagtaccatggactggatttggcgcatccttttccttgtcggcgctgctaccggcgcccattccgggcccgaagtgcaactggttgaatccggtggcggcctggtgcaacccggcggatctctcagacttagctgtgccgcctccggcagaaccttcacaatgggatggtacaggcaggctccagggaaagagagagagttcgtcgccgccatctctctgtctcccacactggcctactacgccgactctgtgaaaggccggttcaccatctccagagataatagcaagaacaccgtggtgctgcaaatgaactctctgagagccgaggatacagccctgtactattgtgccgctgaccggaagtccgtgatgagcatcagacccgattactggggacagggcacactggtcacagtgtctagtggatccggcggcggaggatctggcggaggcggatctgggggcggaggctctttcgaagaagtgcagctggttgaatcaggcggaggactggttcagcctggcggatctctgagactgtcttgtgccgccagcggctacaccttcagcagctactggatgaactgggtccgacaggcccctggcaaaggactggaatgggtcggaatgatcgaccccagcgacagcgagacacactacaaccacatcttcaaggaccgcttcaccatcagcgccgacaccagcaagaataccgcctacctccagatgaactccctgagagccgaggacaccgccgtgtactactgcgccagaaacctgtatctgtggggccagggaaccctggtcacagtgtcatctacgcgtgaggacctgaagaacgtgttcccacctgaggtggccgtgttcgagcctagcaaggccgagatcgcccacacccagaaagccaccctcgtgtgcctggctaccggcttctaccccgaccatgtggaactgtcttggtgggtcaacggcaaagaggtgcacagcggcgtgtgtaccgacccccagccactgaaagaacagcccgccctgaacgacagccggtactgcctgagcagcagactgagagtgtccgccaccttctggcagaacccccggaaccacttcagatgccaggtgcagttctacggcctgagcgagaacgacgagtggacccaggacagagccaagcccgtgacccagatcgtgtctgccgaagcctggggcagagccgattgcggcatcaccagcgccagctaccaccagggcgtgctgagcgccaccatcctgtacgagatcctgctgggcaaggccaccctgtacgccgtgctggtgtctgccctggtgctgatggctatggtcaagcggaaggacagccgggga

SEQ ID NO: 36994 - DNA, 2295 bp, synthetic construct
  source 1..2295: mol_type = other DNA
atggccttaccagtgaccgccttgctcctgccgctggccttgctgctccacgccgccaggccgcaggttcagctgcaagagtctggccctggcctggtcaagcctagccaaacactgagcctgacctgtaccgtgtctggcggctctatcaccaccggcgagttctactggaactggttcagacagcctcctggcaaaggactggaatggatgggagccattgccgccagcggcagcacaacatacagccctagcttcgagagccggaccagcatcagcagagacaccagcaagaatcagttcagcctgaagctgagcagcgtgacagccgccgatacagccgtgtattactgcggcagatcctttggagtggccgccgtgacaaccggccagaatagaggacagggcaccctggtcacagtgtctagcggtaccggcggaggcggatctggcggcggaggtagcggtggcggaggatctgaattcgacatccagatgacacagagccctagcagcctgtctgccagcgtgggagacagagtgaccatcacatgcaagagcagccagagcctgctggactccgatggcaagacctacctgaactggtatcagcagaagcccggcaaggcccctaagctgctgatctacctggtgtccaagctggatagcggcgtgcccagcagattttctggcagcggcagcggaaccgacttcaccctgacaatatccagcctccagcctgaggacttcgccacctactactgctggcaaggcacccactttccattcaccttcggccagggcaccaaggtggaaatcaaaagactcgagatccagaaccctgatcctgccgtgtaccagctgcgggatagcaagagcagcgacaagagcgtgtgtctgttcaccgacttcgacagccagaccaacgtgtcccagagcaaggactccgacgtgtacatcaccgataagtgcgtgctggacatgcggagcatggacttcaagagcaactccgccgtggcctggtccaacaagtccgatttcgcctgcgccaacgccttcaacaacagcattatccccgaggacacattcttcccaagcagcgacgtgccctgcgacgtgaagctggtggaaaagagcttcgagacagacaccaacctgaacttccagaacctgagcgtgatcggcttcagaatcctgctgctgaaagtggccggctttaacctgctgatgaccctgcggctgtggtccagccgcgccaagagaagcggatctggcgtgaagcagaccctgaatttcgacctgctgaagctggctggcgacgtggaatccaacccaggccctactagtaccatggactggatttggcgcatccttttccttgtcggcgctgctaccggcgcccattccttcgaagaagtgcagctggttgaatcaggcggaggactggttcagcctggcggatctctgagactgtcttgtgccgccagcggctacaccttcagcagctactggatgaactgggtccgacaggcccctggcaaaggactggaatgggtcggaatgatcgaccccagcgacagcgagacacactacaaccacatcttcaaggaccgcttcaccatcagcgccgacaccagcaagaataccgcctacctccagatgaactccctgagagccgaggacaccgccgtgtactactgcgccagaaacctgtatctgtggggccagggaaccctggtcacagtgtcatctacgcgtgaggacctgaagaacgtgttcccacctgaggtggccgtgttcgagcctagcaaggccgagatcgcccacacccagaaagccaccctcgtgtgcctggctaccggcttctaccccgaccatgtggaactgtcttggtgggtcaacggcaaagaggtgcacagcggcgtgtgtaccgacccccagccactgaaagaacagcccgccctgaacgacagccggtactgcctgagcagcagactgagagtgtccgccaccttctggcagaacccccggaaccacttcagatgccaggtgcagttctacggcctgagcgagaacgacgagtggacccaggacagagccaagcccgtgacccagatcgtgtctgccgaagcctggggcagagccgattgcggcatcaccagcgccagctaccaccagggcgtgctgagcgccaccatcctgtacgagatcctgctgggcaaggccaccctgtacgccgtgctggtgtctgccctggtgctgatggctatggtcaagcggaaggacagccgggga

SEQ ID NO: 36995 - DNA, 2694 bp, synthetic construct
  source 1..2694: mol_type = other DNA
atggccttaccagtgaccgccttgctcctgccgctggccttgctgctccacgccgccaggccggaagtgcagctggttgaatctggcggaggactggttcaggctggcggatctctgagactgtcttgtgccgccagcggcagaacctttagcatgggctggtttagacaggcccctggcaaagagagagagttcgtcgccgccatcacatactctggcggcagcccttactacgccgactctgtgaagggcagattcaccatcagccgggacaacgccaagaacaccgtgtacctccagatgaacagcctgaagcctgaggacaccgccgtgtactactgcgccgccaatccaacatacggcagcgactggaacgccgagaattggggccagggaacccaagtgacagtgtctagcggtaccggcggaggcggatctggcggcggaggtagcggtggcggaggatctgaattcgacatccagatgacacagagccctagcagcctgtctgccagcgtgggagacagagtgaccatcacatgcaagagcagccagagcctgctggactccgatggcaagacctacctgaactggtatcagcagaagcccggcaaggcccctaagctgctgatctacctggtgtccaagctggatagcggcgtgcccagcagattttctggcagcggcagcggaaccgacttcaccctgacaatatccagcctccagcctgaggacttcgccacctactactgctggcaaggcacccactttccattcaccttcggccagggcaccaaggtggaaatcaaaagactcgaggacctgaagaacgtgttcccacctgaggtggccgtgttcgagcctagcgaggccgagatcagccacacccagaaagccaccctcgtgtgcctggctaccggcttctaccccgaccatgtggaactgtcttggtgggtcaacggcaaagaggtgcacagcggcgtgtgtaccgacccccagccactgaaagaacagcccgccctgaacgacagccggtactgcctgagcagcagactgagagtgtccgccaccttctggcagaacccccggaaccacttcagatgccaggtgcagttctacggcctgagcgagaacgacgagtggacccaggacagagccaagcccgtgacccagatcgtgtctgccgaagcctggggcagagccgattgcggctttaccagcgagagctaccagcagggcgtgctgagcgccaccatcctgtacgagatcctgctgggcaaggccaccctgtacgccgtgctggtgtctgccctggtgctgatggctatggtcaagcggaaggacagccggggaagggccaagcgatctggatctggagcaacaaacttctcactactcaaacaagcaggtgacgtggaggagaatcccgggcctactagtaccatggactggatttggcgcatccttttccttgtcggcgctgctaccggcgcccattccgggccccaggtgcagctccaagaaagcggacccggactggttaagccctctcagaccctgtctctgacctgcacagttagcggagccagcattaccacaggcgagtattattggaattggtttcggcagccaccaggcaaggggcttgagtggatgggtgctattgctgcctctggcagcaccacctactctcccagctttgagagcagaacctccatcagccgggacacctccaaaaaccagttctctctgaagctgtcctccgtgaccgctgctgacaccgccgtctattattgtggccggtctttcggcgtggcagctgtgaccacaggacagaacagaggccagggaacacttgtgaccgtgtcctctggatccggcggcggaggatctggcggaggcggatctgggggcggaggctctttcgaagaagtgcagctggttgaatcaggcggaggactggttcagcctggcggatctctgagactgtcttgtgccgccagcggctacaccttcagcagctactggatgaactgggtccgacaggcccctggcaaaggactggaatgggtcggaatgatcgaccccagcgacagcgagacacactacaaccacatcttcaaggaccgcttcaccatcagcgccgacaccagcaagaataccgcctacctccagatgaactccctgagagccgaggacaccgccgtgtactactgcgccagaaacctgtatctgtggggccagggaaccctggtcacagtgtcatctacgcgtatccagaaccctgatcctgccgtgtaccagctgcgggatagcaagagcagcgacaagagcgtgtgtctgttcaccgacttcgacagccagaccaacgtgtcccagagcaaggactccgacgtgtacatcaccgataagtgcgtgctggacatgcggagcatggacttcaagagcaactccgccgtggcctggtccaacaagtccgatttcgcctgcgccaacgccttcaacaacagcattatccccgaggacacattcttcccaagccccgagagcagctgcgacgtgaagctggtggaaaagagcttcgagacagacaccaacctgaacttccagaacctgagcgtgatcggcttcagaatcctgctgctgaaagtggccggctttaacctgctgatgaccctgcggctgtggtccagc

SEQ ID NO: 36996 - DNA, 2715 bp, synthetic construct
  source 1..2715: mol_type = other DNA
atggccttaccagtgaccgccttgctcctgccgctggccttgctgctccacgccgccaggccggaagtgcagctggttgaatctggcggaggactggttcaggctggcggatctctgagactgtcttgtgccgccagcggcagaacctttagcatgggctggtttagacaggcccctggcaaagagagagagttcgtcgccgccatcacatactctggcggcagcccttactacgccgactctgtgaagggcagattcaccatcagccgggacaacgccaagaacaccgtgtacctccagatgaacagcctgaagcctgaggacaccgccgtgtactactgcgccgccaatccaacatacggcagcgactggaacgccgagaattggggccagggaacccaagtgacagtgtctagcggtaccggcggaggcggatctggcggcggaggtagcggtggcggaggatctgaattcgacatccagatgacacagagccctagcagcctgtctgccagcgtgggagacagagtgaccatcacatgcaagagcagccagagcctgctggactccgatggcaagacctacctgaactggtatcagcagaagcccggcaaggcccctaagctgctgatctacctggtgtccaagctggatagcggcgtgcccagcagattttctggcagcggcagcggaaccgacttcaccctgacaatatccagcctccagcctgaggacttcgccacctactactgctggcaaggcacccactttccattcaccttcggccagggcaccaaggtggaaatcaaaagactcgagatccagaaccctgatcctgccgtgtaccagctgcgggatagcaagagcagcgacaagagcgtgtgtctgttcaccgacttcgacagccagaccaacgtgtcccagagcaaggactccgacgtgtacatcaccgataagtgcgtgctggacatgcggagcatggacttcaagagcaactccgccgtggcctggtccaacaagtccgatttcgcctgcgccaacgccttcaacaacagcattatccccgaggacacattcttcccaagcagcgacgtgccctgcgacgtgaagctggtggaaaagagcttcgagacagacaccaacctgaacttccagaacctgagcgtgatcggcttcagaatcctgctgctgaaagtggccggctttaacctgctgatgaccctgcggctgtggtccagccgcgccaagagaagcggatctggcgtgaagcagaccctgaatttcgacctgctgaagctggctggcgacgtggaatccaacccaggccctactagtaccatggactggatttggcgcatccttttccttgtcggcgctgctaccggcgcccattccgggccccaggtgcagctggttgaatctggcggaggactggttcagcctggcggatctctgagactgtcttgtgccgccagcggcaacatcaacagcagaaactgcatgggctggttcagacaggcccctggcaagggaagagaaggcgtggcagctatcggccaagtgaccggcagaacctactacgtggacagcgtgaagggcagattcaccatcagcctggacaacagcaagaacaccctgtacctccagatgaacagcctgagagccgaggacaccgccgtgtactattgtgctgctgcccctggctgtctgctgtctgcacttagaagcgccgactacagaaactggggccagggcacactggtcaccgtttcttctggatccggcggcggaggatctggcggaggcggatctgggggcggaggctctttcgaagaagtgcagctggttgaatcaggcggaggactggttcagcctggcggatctctgagactgtcttgtgccgccagcggctacaccttcagcagctactggatgaactgggtccgacaggcccctggcaaaggactggaatgggtcggaatgatcgaccccagcgacagcgagacacactacaaccacatcttcaaggaccgcttcaccatcagcgccgacaccagcaagaataccgcctacctccagatgaactccctgagagccgaggacaccgccgtgtactactgcgccagaaacctgtatctgtggggccagggaaccctggtcacagtgtcatctacgcgtgaggacctgaagaacgtgttcccacctgaggtggccgtgttcgagcctagcaaggccgagatcgcccacacccagaaagccaccctcgtgtgcctggctaccggcttctaccccgaccatgtggaactgtcttggtgggtcaacggcaaagaggtgcacagcggcgtgtgtaccgacccccagccactgaaagaacagcccgccctgaacgacagccggtactgcctgagcagcagactgagagtgtccgccaccttctggcagaacccccggaaccacttcagatgccaggtgcagttctacggcctgagcgagaacgacgagtggacccaggacagagccaagcccgtgacccagatcgtgtctgccgaagcctggggcagagccgattgcggcatcaccagcgccagctaccaccagggcgtgctgagcgccaccatcctgtacgagatcctgctgggcaaggccaccctgtacgccgtgctggtgtctgccctggtgctgatggctatggtcaagcggaaggacagccgggga

SEQ ID NO: 36997 - DNA, 2703 bp, synthetic construct
  source 1..2703: mol_type = other DNA
atggccttaccagtgaccgccttgctcctgccgctggccttgctgctccacgccgccaggccggaagtgcagctggttgaatctggcggaggactggttcaggctggcggatctctgagactgtcttgtgccgccagcggcagaacctttagcatgggctggtttagacaggcccctggcaaagagagagagttcgtcgccgccatcacatactctggcggcagcccttactacgccgactctgtgaagggcagattcaccatcagccgggacaacgccaagaacaccgtgtacctccagatgaacagcctgaagcctgaggacaccgccgtgtactactgcgccgccaatccaacatacggcagcgactggaacgccgagaattggggccagggaacccaagtgacagtgtctagcggtaccggcggaggcggatctggcggcggaggtagcggtggcggaggatctgaattcgacatccagatgacacagagccctagcagcctgtctgccagcgtgggagacagagtgaccatcacatgcaagagcagccagagcctgctggactccgatggcaagacctacctgaactggtatcagcagaagcccggcaaggcccctaagctgctgatctacctggtgtccaagctggatagcggcgtgcccagcagattttctggcagcggcagcggaaccgacttcaccctgacaatatccagcctccagcctgaggacttcgccacctactactgctggcaaggcacccactttccattcaccttcggccagggcaccaaggtggaaatcaaaagactcgaggacctgaagaacgtgttcccacctgaggtggccgtgttcgagcctagcgaggccgagatcagccacacccagaaagccaccctcgtgtgcctggctaccggcttctaccccgaccatgtggaactgtcttggtgggtcaacggcaaagaggtgcacagcggcgtgtgtaccgacccccagccactgaaagaacagcccgccctgaacgacagccggtactgcctgagcagcagactgagagtgtccgccaccttctggcagaacccccggaaccacttcagatgccaggtgcagttctacggcctgagcgagaacgacgagtggacccaggacagagccaagcccgtgacccagatcgtgtctgccgaagcctggggcagagccgattgcggctttaccagcgagagctaccagcagggcgtgctgagcgccaccatcctgtacgagatcctgctgggcaaggccaccctgtacgccgtgctggtgtctgccctggtgctgatggctatggtcaagcggaaggacagccggggaagggccaagcgatctggatctggagcaacaaacttctcactactcaaacaagcaggtgacgtggaggagaatcccgggcctactagtaccatggactggatttggcgcatccttttccttgtcggcgctgctaccggcgcccattccgggccccaggtgcagctggttgaatctggcggaggactggttcagcctggcggatctctgagactgtcttgtgccgccagcggcaacatcaacagcagaaactgcatgggctggttcagacaggcccctggcaagggaagagaaggcgtggcagctatcggccaagtgaccggcagaacctactacgtggacagcgtgaagggcagattcaccatcagcctggacaacagcaagaacaccctgtacctccagatgaacagcctgagagccgaggacaccgccgtgtactattgtgctgctgcccctggctgtctgctgtctgcacttagaagcgccgactacagaaactggggccagggcacactggtcaccgtttcttctggatccggcggcggaggatctggcggaggcggatctgggggcggaggctctttcgaagaagtgcagctggttgaatcaggcggaggactggttcagcctggcggatctctgagactgtcttgtgccgccagcggctacaccttcagcagctactggatgaactgggtccgacaggcccctggcaaaggactggaatgggtcggaatgatcgaccccagcgacagcgagacacactacaaccacatcttcaaggaccgcttcaccatcagcgccgacaccagcaagaataccgcctacctccagatgaactccctgagagccgaggacaccgccgtgtactactgcgccagaaacctgtatctgtggggccagggaaccctggtcacagtgtcatctacgcgtatccagaaccctgatcctgccgtgtaccagctgcgggatagcaagagcagcgacaagagcgtgtgtctgttcaccgacttcgacagccagaccaacgtgtcccagagcaaggactccgacgtgtacatcaccgataagtgcgtgctggacatgcggagcatggacttcaagagcaactccgccgtggcctggtccaacaagtccgatttcgcctgcgccaacgccttcaacaacagcattatccccgaggacacattcttcccaagccccgagagcagctgcgacgtgaagctggtggaaaagagcttcgagacagacaccaacctgaacttccagaacctgagcgtgatcggcttcagaatcctgctgctgaaagtggccggctttaacctgctgatgaccctgcggctgtggtccagc

SEQ ID NO: 36998 - DNA, 2703 bp, synthetic construct
  source 1..2703: mol_type = other DNA
atggccttaccagtgaccgccttgctcctgccgctggccttgctgctccacgccgccaggccggaagtgcaactggttgaatccggtggcggcctggtgcaagcaggcggatctctcagacttagctgtgccgcctccggcagaaccttcacaatgggatggtttaggcaggctccagggaaagagagagagttcgtcgccgccatctctctgtctcccacactggcctactacgccgactctgtgaaaggccggttcaccatctccagagataatgccaagaacaccgtggtgctgcaaatgaactctctgaaacccgaggatacagccctgtactattgtgccgctgaccggaagtccgtgatgagcatcagacccgattactggggacagggcacacaagtcacagtgtcctctggtaccggcggaggcggatctggcggcggaggtagcggtggcggaggatctgaattcgacatccagatgacacagagccctagcagcctgtctgccagcgtgggagacagagtgaccatcacatgcaagagcagccagagcctgctggactccgatggcaagacctacctgaactggtatcagcagaagcccggcaaggcccctaagctgctgatctacctggtgtccaagctggatagcggcgtgcccagcagattttctggcagcggcagcggaaccgacttcaccctgacaatatccagcctccagcctgaggacttcgccacctactactgctggcaaggcacccactttccattcaccttcggccagggcaccaaggtggaaatcaaaagactcgaggacctgaagaacgtgttcccacctgaggtggccgtgttcgagcctagcgaggccgagatcagccacacccagaaagccaccctcgtgtgcctggctaccggcttctaccccgaccatgtggaactgtcttggtgggtcaacggcaaagaggtgcacagcggcgtgtgtaccgacccccagccactgaaagaacagcccgccctgaacgacagccggtactgcctgagcagcagactgagagtgtccgccaccttctggcagaacccccggaaccacttcagatgccaggtgcagttctacggcctgagcgagaacgacgagtggacccaggacagagccaagcccgtgacccagatcgtgtctgccgaagcctggggcagagccgattgcggctttaccagcgagagctaccagcagggcgtgctgagcgccaccatcctgtacgagatcctgctgggcaaggccaccctgtacgccgtgctggtgtctgccctggtgctgatggctatggtcaagcggaaggacagccggggaagggccaagcgatctggatctggagcaacaaacttctcactactcaaacaagcaggtgacgtggaggagaatcccgggcctactagtaccatggactggatttggcgcatccttttccttgtcggcgctgctaccggcgcccattccgggccccaggtgcagctggttgaatctggcggaggactggttcagcctggcggatctctgagactgtcttgtgccgccagcggcaacatcaacagcagaaactgcatgggctggttcagacaggcccctggcaagggaagagaaggcgtggcagctatcggccaagtgaccggcagaacctactacgtggacagcgtgaagggcagattcaccatcagcctggacaacagcaagaacaccctgtacctccagatgaacagcctgagagccgaggacaccgccgtgtactattgtgctgctgcccctggctgtctgctgtctgcacttagaagcgccgactacagaaactggggccagggcacactggtcaccgtttcttctggatccggcggcggaggatctggcggaggcggatctgggggcggaggctctttcgaagaagtgcagctggttgaatcaggcggaggactggttcagcctggcggatctctgagactgtcttgtgccgccagcggctacaccttcagcagctactggatgaactgggtccgacaggcccctggcaaaggactggaatgggtcggaatgatcgaccccagcgacagcgagacacactacaaccacatcttcaaggaccgcttcaccatcagcgccgacaccagcaagaataccgcctacctccagatgaactccctgagagccgaggacaccgccgtgtactactgcgccagaaacctgtatctgtggggccagggaaccctggtcacagtgtcatctacgcgtatccagaaccctgatcctgccgtgtaccagctgcgggatagcaagagcagcgacaagagcgtgtgtctgttcaccgacttcgacagccagaccaacgtgtcccagagcaaggactccgacgtgtacatcaccgataagtgcgtgctggacatgcggagcatggacttcaagagcaactccgccgtggcctggtccaacaagtccgatttcgcctgcgccaacgccttcaacaacagcattatccccgaggacacattcttcccaagccccgagagcagctgcgacgtgaagctggtggaaaagagcttcgagacagacaccaacctgaacttccagaacctgagcgtgatcggcttcagaatcctgctgctgaaagtggccggctttaacctgctgatgaccctgcggctgtggtccagc

SEQ ID NO: 36999 - DNA, 2715 bp, synthetic construct
  source 1..2715: mol_type = other DNA
atggccttaccagtgaccgccttgctcctgccgctggccttgctgctccacgccgccaggccgcaggttcagctgcaagagtctggccctggcctggtcaagcctagccaaacactgagcctgacctgtaccgtgtctggcggctctatcaccaccggcgagttctactggaactggttcagacagcctcctggcaaaggactggaatggatgggagccattgccgccagcggcagcacaacatacagccctagcttcgagagccggaccagcatcagcagagacaccagcaagaatcagttcagcctgaagctgagcagcgtgacagccgccgatacagccgtgtattactgcggcagatcctttggagtggccgccgtgacaaccggccagaatagaggacagggcaccctggtcacagtgtctagcggtaccggcggaggcggatctggcggcggaggtagcggtggcggaggatctgaattcgacatccagatgacacagagccctagcagcctgtctgccagcgtgggagacagagtgaccatcacatgcaagagcagccagagcctgctggactccgatggcaagacctacctgaactggtatcagcagaagcccggcaaggcccctaagctgctgatctacctggtgtccaagctggatagcggcgtgcccagcagattttctggcagcggcagcggaaccgacttcaccctgacaatatccagcctccagcctgaggacttcgccacctactactgctggcaaggcacccactttccattcaccttcggccagggcaccaaggtggaaatcaaaagactcgaggacctgaagaacgtgttcccacctgaggtggccgtgttcgagcctagcgaggccgagatcagccacacccagaaagccaccctcgtgtgcctggctaccggcttctaccccgaccatgtggaactgtcttggtgggtcaacggcaaagaggtgcacagcggcgtgtgtaccgacccccagccactgaaagaacagcccgccctgaacgacagccggtactgcctgagcagcagactgagagtgtccgccaccttctggcagaacccccggaaccacttcagatgccaggtgcagttctacggcctgagcgagaacgacgagtggacccaggacagagccaagcccgtgacccagatcgtgtctgccgaagcctggggcagagccgattgcggctttaccagcgagagctaccagcagggcgtgctgagcgccaccatcctgtacgagatcctgctgggcaaggccaccctgtacgccgtgctggtgtctgccctggtgctgatggctatggtcaagcggaaggacagccggggaagggccaagcgatctggatctggagcaacaaacttctcactactcaaacaagcaggtgacgtggaggagaatcccgggcctactagtaccatggactggatttggcgcatccttttccttgtcggcgctgctaccggcgcccattccgggccccaggtgcagctggttgaatctggcggaggactggttcagcctggcggatctctgagactgtcttgtgccgccagcggcaacatcaacagcagaaactgcatgggctggttcagacaggcccctggcaagggaagagaaggcgtggcagctatcggccaagtgaccggcagaacctactacgtggacagcgtgaagggcagattcaccatcagcctggacaacagcaagaacaccctgtacctccagatgaacagcctgagagccgaggacaccgccgtgtactattgtgctgctgcccctggctgtctgctgtctgcacttagaagcgccgactacagaaactggggccagggcacactggtcaccgtttcttctggatccggcggcggaggatctggcggaggcggatctgggggcggaggctctttcgaagaagtgcagctggttgaatcaggcggaggactggttcagcctggcggatctctgagactgtcttgtgccgccagcggctacaccttcagcagctactggatgaactgggtccgacaggcccctggcaaaggactggaatgggtcggaatgatcgaccccagcgacagcgagacacactacaaccacatcttcaaggaccgcttcaccatcagcgccgacaccagcaagaataccgcctacctccagatgaactccctgagagccgaggacaccgccgtgtactactgcgccagaaacctgtatctgtggggccagggaaccctggtcacagtgtcatctacgcgtatccagaaccctgatcctgccgtgtaccagctgcgggatagcaagagcagcgacaagagcgtgtgtctgttcaccgacttcgacagccagaccaacgtgtcccagagcaaggactccgacgtgtacatcaccgataagtgcgtgctggacatgcggagcatggacttcaagagcaactccgccgtggcctggtccaacaagtccgatttcgcctgcgccaacgccttcaacaacagcattatccccgaggacacattcttcccaagccccgagagcagctgcgacgtgaagctggtggaaaagagcttcgagacagacaccaacctgaacttccagaacctgagcgtgatcggcttcagaatcctgctgctgaaagtggccggctttaacctgctgatgaccctgcggctgtggtccagc

SEQ ID NO: 37000 - DNA, 1452 bp, synthetic construct
  source 1..1452: mol_type = other DNA
atggccttaccagtgaccgccttgctcctgccgctggccttgctgctccacgccgccaggccggacatccagatgacacagagccctagcagcctgtctgccagcgtgggagacagagtgaccatcacatgcaagagcagccagagcctgctggactccgatggcaagacctacctgaactggtatcagcagaagcccggcaaggcccctaagctgctgatctacctggtgtccaagctggatagcggcgtgcccagcagattttctggcagcggcagcggaaccgacttcaccctgacaatatccagcctccagcctgaggacttcgccacctactactgcttccaaggcacccactttccatacaccttcggccagggcaccaaggtggaaatcaaaagaggcggaggcggaagtggaggcggaggatctggcggcggaggctctgaagtgcagctggttgaatcaggcggaggactggttcagcctggcggatctctgagactgtcttgtgccgccagcggctacaccttcaccagctactggatgaactgggtccgacaggcccctggcaaaggactggaatgggtcggaatgatcgaccccagcgacagcgagacacactacaaccacatcttcaaggaccgcttcaccatcagcgccgacaccagcaagaataccgcctacctccagatgaactccctgagagccgaggacaccgccgtgtactactgcgccagaaacctgtatctgttcggccagggaaccctggtcacagtgtcatctacgcgtaaaattgaagttatgtatcctcctccttacctagacaatgagaagagcaatggaaccattatccatgtgaaagggaaacacctttgtccaagtcccctatttcccggaccttctaagcccttttgggtgctggtggtggttgggggagtcctggcttgctatagcttgctagtaacagtggcctttattattttctgggtgaggagtaagaggagcaggctcctgcacagtgactacatgaacatgactccacgccgccccggacccacccgcaagcattaccagccctatgccccaccacgcgacttcgcagcctatcgctccagagtgaagttcagcaggagcgcagacgcccccgcgtaccagcagggccagaaccagctctataacgagctcaatctaggacgaagagaggagtacgatgttttggacaagagacgtggccgggaccctgagatggggggaaagccgagaaggaagaaccctcaggaaggcctgtacaatgaactgcagaaagataagatggcggaggcctacagtgagattgggatgaaaggcgagcgccggaggggcaaggggcacgatggcctttaccagggtctcagtacagccaccaaggacacctacgacgcccttcacatgcaggccctgccccctcgc

SEQ ID NO: 37001 - DNA, 1470 bp, synthetic construct
  source 1..1470: mol_type = other DNA
atggccttaccagtgaccgccttgctcctgccgctggccttgctgctccacgccgccaggccggacatccagatgacacagagccctagcagcctgtctgccagcgtgggagacagagtgaccatcacatgcaagagcagccagagcctgctggactccgatggcaagacctacctgaactggtatcagcagaagcccggcaaggcccctaagctgctgatctacctggtgtccaagctggatagcggcgtgcccagcagattttctggcagcggcagcggaaccgacttcaccctgacaatatccagcctccagcctgaggacttcgccacctactactgcttccaaggcacccactttccatacaccttcggccagggcaccaaggtggaaatcaaaagaggcggaggcggaagtggaggcggaggatctggcggcggaggctctgaagtgcagctggttgaatcaggcggaggactggttcagcctggcggatctctgagactgtcttgtgccgccagcggctacaccttcaccagctactggatgaactgggtccgacaggcccctggcaaaggactggaatgggtcggaatgatcgaccccagcgacagcgagacacactacaaccacatcttcaaggaccgcttcaccatcagcgccgacaccagcaagaataccgcctacctccagatgaactccctgagagccgaggacaccgccgtgtactactgcgccagaaacctgtatctgttcggccagggaaccctggtcacagtgtcatctacgcgtgcgaagcccaccacgacgccagcgccgcgaccaccaacaccggcgcccaccatcgcgtcgcagcccctgtccctgcgcccagaggcgtgccggccagcggcggggggcgcagtgcacacgagggggctggacttcgcctgtgacatctacatctgggcgcccttggccgggacttgtggggtccttctcctgtcactggttatcaccctttactgcaaacggggcagaaagaaactcctgtatatattcaaacaaccatttatgagaccagtacaaactactcaagaggaagatggctgtagctgccgatttccagaagaagaagaaggaggatgtgaactgagagtgaagttcagcaggagcgcagacgcccccgcgtaccagcagggccagaaccagctctataacgagctgaatctaggacgaagagaggagtacgatgttttggacaagagacgtggccgggaccctgagatggggggaaagccgagaaggaagaaccctcaggaaggcctgtacaatgaactgcagaaagataagatggcggaggcctacagtgagattgggatgaaaggcgagcgccggaggggcaaggggcacgatggcctttaccagggtctcagtacagccaccaaggacacctacgacgcccttcacatgcaggccctgccccctcgc

SEQ ID NO: 37002 - DNA, 1470 bp, synthetic construct
  source 1..1470: mol_type = other DNA
atggccttaccagtgaccgccttgctcctgccgctggccttgctgctccacgccgccaggccggaagtgcagctggttgaatcaggcggaggactggttcagcctggcggatctctgagactgtcttgtgccgccagcggctacaccttcaccagctactggatgaactgggtccgacaggcccctggcaaaggactggaatgggtcggaatgatcgaccccagcgacagcgagacacactacaaccacatcttcaaggaccgcttcaccatcagcgccgacaccagcaagaataccgcctacctccagatgaactccctgagagccgaggacaccgccgtgtactactgcgccagaaacctgtatctgttcggccagggaaccctggtcacagtgtcatctggcggaggcggaagtggaggcggaggatctggcggcggaggctctgacatccagatgacacagagccctagcagcctgtctgccagcgtgggagacagagtgaccatcacatgcaagagcagccagagcctgctggactccgatggcaagacctacctgaactggtatcagcagaagcccggcaaggcccctaagctgctgatctacctggtgtccaagctggatagcggcgtgcccagcagattttctggcagcggcagcggaaccgacttcaccctgacaatatccagcctccagcctgaggacttcgccacctactactgcttccaaggcacccactttccatacaccttcggccagggcaccaaggtggaaatcaaaagaacgcgtgcgaagcccaccacgacgccagcgccgcgaccaccaacaccggcgcccaccatcgcgtcgcagcccctgtccctgcgcccagaggcgtgccggccagcggcggggggcgcagtgcacacgagggggctggacttcgcctgtgacatctacatctgggcgcccttggccgggacttgtggggtccttctcctgtcactggttatcaccctttactgcaaacggggcagaaagaaactcctgtatatattcaaacaaccatttatgagaccagtacaaactactcaagaggaagatggctgtagctgccgatttccagaagaagaagaaggaggatgtgaactgagagtgaagttcagcaggagcgcagacgcccccgcgtaccagcagggccagaaccagctctataacgagctgaatctaggacgaagagaggagtacgatgttttggacaagagacgtggccgggaccctgagatggggggaaagccgagaaggaagaaccctcaggaaggcctgtacaatgaactgcagaaagataagatggcggaggcctacagtgagattgggatgaaaggcgagcgccggaggggcaaggggcacgatggcctttaccagggtctcagtacagccaccaaggacacctacgacgcccttcacatgcaggccctgccccctcgc

SEQ ID NO: 37003 - DNA, 1869 bp, synthetic construct
  source 1..1869: mol_type = other DNA
atggccttaccagtgaccgccttgctcctgccgctggccttgctgctccacgccgccaggccggacatccagatgacacagagccctagcagcctgtctgccagcgtgggagacagagtgaccatcacatgcaagagcagccagagcctgctggactccgatggcaagacctacctgaactggtatcagcagaagcccggcaaggcccctaagctgctgatctacctggtgtccaagctggatagcggcgtgcccagcagattttctggcagcggcagcggaaccgacttcaccctgacaatatccagcctccagcctgaggacttcgccacctactactgcttccaaggcacccactttccatacaccttcggccagggcaccaaggtggaaatcaaaagactcgagatccagaaccctgatcctgccgtgtaccagctgcgggatagcaagagcagcgacaagagcgtgtgtctgttcaccgacttcgacagccagaccaacgtgtcccagagcaaggactccgacgtgtacatcaccgataagtgcgtgctggacatgcggagcatggacttcaagagcaactccgccgtggcctggtccaacaagtccgatttcgcctgcgccaacgccttcaacaacagcattatccccgaggacacattcttcccaagcagcgacgtgccctgcgacgtgaagctggtggaaaagagcttcgagacagacaccaacctgaacttccagaacctgagcgtgatcggcttcagaatcctgctgctgaaagtggccggctttaacctgctgatgaccctgcggctgtggtccagccgcgccaagagaagcggatctggcgtgaagcagaccctgaatttcgacctgctgaagctggctggcgacgtggaatccaacccaggccctactagtatggactggatttggcgcatccttttccttgtcggcgctgctaccggcgcgcattccttcgaagaagtgcagctggttgaatcaggcggaggactggttcagcctggcggatctctgagactgtcttgtgccgccagcggctacaccttcaccagctactggatgaactgggtccgacaggcccctggcaaaggactggaatgggtcggaatgatcgaccccagcgacagcgagacacactacaaccacatcttcaaggaccgcttcaccatcagcgccgacaccagcaagaataccgcctacctccagatgaactccctgagagccgaggacaccgccgtgtactactgcgccagaaacctgtatctgttcggccagggaaccctggtcacagtgtcatctacgcgtgaggacctgaagaacgtgttcccacctgaggtggccgtgttcgagcctagcaaggccgagatcgcccacacccagaaagccaccctcgtgtgcctggctaccggcttctaccccgaccatgtggaactgtcttggtgggtcaacggcaaagaggtgcacagcggcgtgtgtaccgacccccagccactgaaagaacagcccgccctgaacgacagccggtactgcctgagcagcagactgagagtgtccgccaccttctggcagaacccccggaaccacttcagatgccaggtgcagttctacggcctgagcgagaacgacgagtggacccaggacagagccaagcccgtgacccagatcgtgtctgccgaagcctggggcagagccgattgcggcatcaccagcgccagctaccaccagggcgtgctgagcgccaccatcctgtacgagatcctgctgggcaaggccaccctgtacgccgtgctggtgtctgccctggtgctgatggctatggtcaagcggaaggacagccgggga

SEQ ID NO: 37004 - DNA, 1857 bp, synthetic construct
  source 1..1857: mol_type = other DNA
atggccttaccagtgaccgccttgctcctgccgctggccttgctgctccacgccgccaggccggacatccagatgacacagagccctagcagcctgtctgccagcgtgggagacagagtgaccatcacatgcaagagcagccagagcctgctggactccgatggcaagacctacctgaactggtatcagcagaagcccggcaaggcccctaagctgctgatctacctggtgtccaagctggatagcggcgtgcccagcagattttctggcagcggcagcggaaccgacttcaccctgacaatatccagcctccagcctgaggacttcgccacctactactgcttccaaggcacccactttccatacaccttcggccagggcaccaaggtggaaatcaaaagactcgaggacctgaagaacgtgttcccacctgaggtggccgtgttcgagcctagcaaggccgagatcgcccacacccagaaagccaccctcgtgtgcctggctaccggcttctaccccgaccatgtggaactgtcttggtgggtcaacggcaaagaggtgcacagcggcgtgtgtaccgacccccagccactgaaagaacagcccgccctgaacgacagccggtactgcctgagcagcagactgagagtgtccgccaccttctggcagaacccccggaaccacttcagatgccaggtgcagttctacggcctgagcgagaacgacgagtggacccaggacagagccaagcccgtgacccagatcgtgtctgccgaagcctggggcagagccgattgcggcatcaccagcgccagctaccaccagggcgtgctgagcgccaccatcctgtacgagatcctgctgggcaaggccaccctgtacgccgtgctggtgtctgccctggtgctgatggctatggtcaagcggaaggacagccggggaagggccaagcgatctggatctggagcaacaaacttctcactactcaaacaagcaggtgacgtggaggagaatcccgggcctactagtatggactggatttggcgcatccttttccttgtcggcgctgctaccggcgcgcattccttcgaagaagtgcagctggttgaatcaggcggaggactggttcagcctggcggatctctgagactgtcttgtgccgccagcggctacaccttcaccagctactggatgaactgggtccgacaggcccctggcaaaggactggaatgggtcggaatgatcgaccccagcgacagcgagacacactacaaccacatcttcaaggaccgcttcaccatcagcgccgacaccagcaagaataccgcctacctccagatgaactccctgagagccgaggacaccgccgtgtactactgcgccagaaacctgtatctgttcggccagggaaccctggtcacagtgtcatctacgcgtatccagaaccctgatcctgccgtgtaccagctgcgggatagcaagagcagcgacaagagcgtgtgtctgttcaccgacttcgacagccagaccaacgtgtcccagagcaaggactccgacgtgtacatcaccgataagtgcgtgctggacatgcggagcatggacttcaagagcaactccgccgtggcctggtccaacaagtccgatttcgcctgcgccaacgccttcaacaacagcattatccccgaggacacattcttcccaagcagcgacgtgccctgcgacgtgaagctggtggaaaagagcttcgagacagacaccaacctgaacttccagaacctgagcgtgatcggcttcagaatcctgctgctgaaagtggccggctttaacctgctgatgaccctgcggctgtggtccagc

SEQ ID NO: 37005 - DNA, 1857 bp, synthetic construct
  source 1..1857: mol_type = other DNA
atggccttaccagtgaccgccttgctcctgccgctggccttgctgctccacgccgccaggccggacatccagatgacacagagccctagcagcctgtctgccagcgtgggagacagagtgaccatcacatgcaagagcagccagagcctgctggactccgatggcaagacctacctgaactggtatcagcagaagcccggcaaggcccctaagctgctgatctacctggtgtccaagctggatagcggcgtgcccagcagattttctggcagcggcagcggaaccgacttcaccctgacaatatccagcctccagcctgaggacttcgccacctactactgcttccaaggcacccactttccatacaccttcggccagggcaccaaggtggaaatcaaaagactcgaggacctgaagaacgtgttcccacctgaggtggccgtgttcgagcctagcgaggccgagatcagccacacccagaaagccaccctcgtgtgcctggctaccggcttctaccccgaccatgtggaactgtcttggtgggtcaacggcaaagaggtgcacagcggcgtgtgtaccgacccccagccactgaaagaacagcccgccctgaacgacagccggtactgcctgagcagcagactgagagtgtccgccaccttctggcagaacccccggaaccacttcagatgccaggtgcagttctacggcctgagcgagaacgacgagtggacccaggacagagccaagcccgtgacccagatcgtgtctgccgaagcctggggcagagccgattgcggctttaccagcgagagctaccagcagggcgtgctgagcgccaccatcctgtacgagatcctgctgggcaaggccaccctgtacgccgtgctggtgtctgccctggtgctgatggctatggtcaagcggaaggacagccggggaagggccaagcgatctggatctggagcaacaaacttctcactactcaaacaagcaggtgacgtggaggagaatcccgggcctactagtatggactggatttggcgcatccttttccttgtcggcgctgctaccggcgcgcattccttcgaagaagtgcagctggttgaatcaggcggaggactggttcagcctggcggatctctgagactgtcttgtgccgccagcggctacaccttcaccagctactggatgaactgggtccgacaggcccctggcaaaggactggaatgggtcggaatgatcgaccccagcgacagcgagacacactacaaccacatcttcaaggaccgcttcaccatcagcgccgacaccagcaagaataccgcctacctccagatgaactccctgagagccgaggacaccgccgtgtactactgcgccagaaacctgtatctgttcggccagggaaccctggtcacagtgtcatctacgcgtatccagaaccctgatcctgccgtgtaccagctgcgggatagcaagagcagcgacaagagcgtgtgtctgttcaccgacttcgacagccagaccaacgtgtcccagagcaaggactccgacgtgtacatcaccgataagtgcgtgctggacatgcggagcatggacttcaagagcaactccgccgtggcctggtccaacaagtccgatttcgcctgcgccaacgccttcaacaacagcattatccccgaggacacattcttcccaagccccgagagcagctgcgacgtgaagctggtggaaaagagcttcgagacagacaccaacctgaacttccagaacctgagcgtgatcggcttcagaatcctgctgctgaaagtggccggctttaacctgctgatgaccctgcggctgtggtccagc

SEQ ID NO: 37006 - DNA, 1869 bp, synthetic construct
  source 1..1869: mol_type = other DNA
atggccttaccagtgaccgccttgctcctgccgctggccttgctgctccacgccgccaggccggacatccagatgacacagagccctagcagcctgtctgccagcgtgggagacagagtgaccatcacatgcaagagcagccagagcctgctggactccgatggcaagacctacctgaactggtatcagcagaagcccggcaaggcccctaagctgctgatctacctggtgtccaagctggatagcggcgtgcccagcagattttctggcagcggcagcggaaccgacttcaccctgacaatatccagcctccagcctgaggacttcgccacctactactgcttccaaggcacccactttccatacaccttcggccagggcaccaaggtggaaatcaaaagactcgagatccagaaccctgatcctgccgtgtaccagctgcgggatagcaagagcagcgacaagagcgtgtgtctgttcaccgacttcgacagccagaccaacgtgtcccagagcaaggactccgacgtgtacatcaccgataagtgcgtgctggacatgcggagcatggacttcaagagcaactccgccgtggcctggtccaacaagtccgatttcgcctgcgccaacgccttcaacaacagcattatccccgaggacacattcttcccaagccccgagagcagctgcgacgtgaagctggtggaaaagagcttcgagacagacaccaacctgaacttccagaacctgagcgtgatcggcttcagaatcctgctgctgaaagtggccggctttaacctgctgatgaccctgcggctgtggtccagccgcgccaagagaagcggatctggcgtgaagcagaccctgaatttcgacctgctgaagctggctggcgacgtggaatccaacccaggccctactagtatggactggatttggcgcatccttttccttgtcggcgctgctaccggcgcgcattccttcgaagaagtgcagctggttgaatcaggcggaggactggttcagcctggcggatctctgagactgtcttgtgccgccagcggctacaccttcaccagctactggatgaactgggtccgacaggcccctggcaaaggactggaatgggtcggaatgatcgaccccagcgacagcgagacacactacaaccacatcttcaaggaccgcttcaccatcagcgccgacaccagcaagaataccgcctacctccagatgaactccctgagagccgaggacaccgccgtgtactactgcgccagaaacctgtatctgttcggccagggaaccctggtcacagtgtcatctacgcgtgaggacctgaagaacgtgttcccacctgaggtggccgtgttcgagcctagcgaggccgagatcagccacacccagaaagccaccctcgtgtgcctggctaccggcttctaccccgaccatgtggaactgtcttggtgggtcaacggcaaagaggtgcacagcggcgtgtgtaccgacccccagccactgaaagaacagcccgccctgaacgacagccggtactgcctgagcagcagactgagagtgtccgccaccttctggcagaacccccggaaccacttcagatgccaggtgcagttctacggcctgagcgagaacgacgagtggacccaggacagagccaagcccgtgacccagatcgtgtctgccgaagcctggggcagagccgattgcggctttaccagcgagagctaccagcagggcgtgctgagcgccaccatcctgtacgagatcctgctgggcaaggccaccctgtacgccgtgctggtgtctgccctggtgctgatggctatggtcaagcggaaggacagccgggga

SEQ ID NO: 37007 - DNA, 1905 bp, synthetic construct
  source 1..1905: mol_type = other DNA
atggccttaccagtgaccgccttgctcctgccgctggccttgctgctccacgccgccaggccgctcgaggaggacctgaagaacgtgttcccacctgaggtggccgtgttcgagcctagcaaggccgagatcgcccacacccagaaagccaccctcgtgtgcctggctaccggcttctaccccgaccatgtggaactgtcttggtgggtcaacggcaaagaggtgcacagcggcgtgtgtaccgacccccagccactgaaagaacagcccgccctgaacgacagccggtactgcctgagcagcagactgagagtgtccgccaccttctggcagaacccccggaaccacttcagatgccaggtgcagttctacggcctgagcgagaacgacgagtggacccaggacagagccaagcccgtgacccagatcgtgtctgccgaagcctggggcagagccgattgcggcatcaccagcgccagctaccaccagggcgtgctgagcgccaccatcctgtacgagatcctgctgggcaaggccaccctgtacgccgtgctggtgtctgccctggtgctgatggctatggtcaagcggaaggacagccggggaagggccaagcgatctggatctggagcaacaaacttctcactactcaaacaagcaggtgacgtggaggagaatcccgggcctactagcatggccttaccagtgaccgccttgctcctgccgctggccttgctgctccacgccgccaggccggacatccagatgacacagagccctagcagcctgtctgccagcgtgggagacagagtgaccatcacatgcaagagcagccagagcctgctggactccgatggcaagacctacctgaactggtatcagcagaagcccggcaaggcccctaagctgctgatctacctggtgtccaagctggatagcggcgtgcccagcagattttctggcagcggcagcggaaccgacttcaccctgacaatatccagcctccagcctgaggacttcgccacctactactgcttccaaggcacccactttccatacaccttcggccagggcaccaaggtggaaatcaaaagaggcggaggcggaagtggaggcggaggatctggcggcggaggctctgaagtgcagctggttgaatcaggcggaggactggttcagcctggcggatctctgagactgtcttgtgccgccagcggctacaccttcaccagctactggatgaactgggtccgacaggcccctggcaaaggactggaatgggtcggaatgatcgaccccagcgacagcgagacacactacaaccacatcttcaaggaccgcttcaccatcagcgccgacaccagcaagaataccgcctacctccagatgaactccctgagagccgaggacaccgccgtgtactactgcgccagaaacctgtatctgttcggccagggaaccctggtcacagtgtcatctacgcgtatccagaaccctgatcctgccgtgtaccagctgcgggatagcaagagcagcgacaagagcgtgtgtctgttcaccgacttcgacagccagaccaacgtgtcccagagcaaggactccgacgtgtacatcaccgataagtgcgtgctggacatgcggagcatggacttcaagagcaactccgccgtggcctggtccaacaagtccgatttcgcctgcgccaacgccttcaacaacagcattatccccgaggacacattcttcccaagcagcgacgtgccctgcgacgtgaagctggtggaaaagagcttcgagacagacaccaacctgaacttccagaacctgagcgtgatcggcttcagaatcctgctgctgaaagtggccggctttaacctgctgatgaccctgcggctgtggtccagc

SEQ ID NO: 37008 - DNA, 1926 bp, synthetic construct
  source 1..1926: mol_type = other DNA
atggccttaccagtgaccgccttgctcctgccgctggccttgctgctccacgccgccaggccgctcgagggctccggcgatcgccctgatcctgccgtgtaccagctgcgggatagcaagagcagcgacaagagcgtgtgtctgttcaccgacttcgacagccagaccaacgtgtcccagagcaaggactccgacgtgtacatcaccgataagtgcgtgctggacatgcggagcatggacttcaagagcaactccgccgtggcctggtccaacaagtccgatttcgcctgcgccaacgccttcaacaacagcattatccccgaggacacattcttcccaagccccgagagcagctgcgacgtgaagctggtggaaaagagcttcgagacagacaccaacctgaacttccagaacctgagcgtgatcggcttcagaatcctgctgctgaaagtggccggctttaacctgctgatgaccctgcggctgtggtccagctctagtcgcgccaagagaagcggatctggcgtgaagcagaccctgaatttcgacctgctgaagctggctggcgacgtggaatccaacccaggccccactagcatggccttaccagtgaccgccttgctcctgccgctggccttgctgctccacgccgccaggccggacatccagatgacacagagccctagcagcctgtctgccagcgtgggagacagagtgaccatcacatgcaagagcagccagagcctgctggactccgatggcaagacctacctgaactggtatcagcagaagcccggcaaggcccctaagctgctgatctacctggtgtccaagctggatagcggcgtgcccagcagattttctggcagcggcagcggaaccgacttcaccctgacaatatccagcctccagcctgaggacttcgccacctactactgcttccaaggcacccactttccatacaccttcggccagggcaccaaggtggaaatcaaaagaggcggaggcggaagtggaggcggaggatctggcggcggaggctctgaagtgcagctggttgaatcaggcggaggactggttcagcctggcggatctctgagactgtcttgtgccgccagcggctacaccttcaccagctactggatgaactgggtccgacaggcccctggcaaaggactggaatgggtcggaatgatcgaccccagcgacagcgagacacactacaaccacatcttcaaggaccgcttcaccatcagcgccgacaccagcaagaataccgcctacctccagatgaactccctgagagccgaggacaccgccgtgtactactgcgccagaaacctgtatctgttcggccagggaaccctggtcacagtgtcatctacgcgtgaggacctgaagaacgtgttcccacctgaggtggccgtgttcgagcctagcgaggccgagatcagccacacccagaaagccaccctcgtgtgcctggctaccggcttctaccccgaccatgtggaactgtcttggtgggtcaacggcaaagaggtgcacagcggcgtgtgtaccgacccccagccactgaaagaacagcccgccctgaacgacagccggtactgcctgagcagcagactgagagtgtccgccaccttctggcagaacccccggaaccacttcagatgccaggtgcagttctacggcctgagcgagaacgacgagtggacccaggacagagccaagcccgtgacccagatcgtgtctgccgaagcctggggcagagccgattgcggctttaccagcgagagctaccagcagggcgtgctgagcgccaccatcctgtacgagatcctgctgggcaaggccaccctgtacgccgtgctggtgtctgccctggtgctgatggctatggtcaagcggaaggacagccgggga

SEQ ID NO: 37009 - DNA, 1857 bp, synthetic construct
  source 1..1857: mol_type = other DNA
atggccttaccagtgaccgccttgctcctgccgctggccttgctgctccacgccgccaggccggacatccagatgacacagagccctagcagcctgtctgccagcgtgggagacagagtgaccatcacatgcaagagcagccagagcctgctggactccgatggcaagacctacctgaactggtatcagcagaagcccggcaaggcccctaagctgctgatctacctggtgtccaagctggatagcggcgtgcccagcagattttctggcagcggcagcggaaccgacttcaccctgacaatatccagcctccagcctgaggacttcgccacctactactgcttccaaggcacccactttccatacaccttcggccagggcaccaaggtggaaatcaaaagactcgaggacctgaagaacgtgttcccacctgaggtggccgtgttcgagcctagcgaggccgagatcagccacacccagaaagccaccctcgtgtgcctggctaccggcttctaccccgaccatgtggaactgtcttggtgggtcaacggcaaagaggtgcacagcggcgtgtctaccgacccccagccactgaaagaacagcccgccctgaacgacagccggtactgcctgagcagcagactgagagtgtccgccaccttctggcagaacccccggaaccacttcagatgccaggtgcagttctacggcctgagcgagaacgacgagtggacccaggacagagccaagcccgtgacccagatcgtgtctgccgaagcctggggcagagccgattgcggctttaccagcgagagctaccagcagggcgtgctgagcgccaccatcctgtacgagatcctgctgggcaaggccaccctgtacgccgtgctggtgtctgccctggtgctgatggctatggtcaagcggaaggacagccggggaagggccaagcgatctggatctggagcaacaaacttctcactactcaaacaagcaggtgacgtggaggagaatcccgggcctactagtatggactggatttggcgcatccttttccttgtcggcgctgctaccggcgcgcattccttcgaagaagtgcagctggttgaatcaggcggaggactggttcagcctggcggatctctgagactgtcttgtgccgccagcggctacaccttcaccagctactggatgaactgggtccgacaggcccctggcaaaggactggaatgggtcggaatgatcgaccccagcgacagcgagacacactacaaccacatcttcaaggaccgcttcaccatcagcgccgacaccagcaagaataccgcctacctccagatgaactccctgagagccgaggacaccgccgtgtactactgcgccagaaacctgtatctgttcggccagggaaccctggtcacagtgtcatctacgcgtatccagaaccctgatcctgccgtgtaccagctgcgggatagcaagagcagcgacaagagcgtgtgtctgttcaccgacttcgacagccagaccaacgtgtcccagagcaaggactccgacgtgtacatcaccgataagaccgtgctggacatgcggagcatggacttcaagagcaactccgccgtggcctggtccaacaagtccgatttcgcctgcgccaacgccttcaacaacagcattatccccgaggacacattcttcccaagccccgagagcagctgcgacgtgaagctggtggaaaagagcttcgagacagacaccaacctgaacttccagaacctgagcgtgatcggcttcagaatcctgctgctgaaagtggccggctttaacctgctgatgaccctgcggctgtggtccagc

SEQ ID NO: 37010 - DNA, 1881 bp, synthetic construct
  source 1..1881: mol_type = other DNA
atggccttaccagtgaccgccttgctcctgccgctggccttgctgctccacgccgccaggccggacatccagatgacacagagccctagcagcctgtctgccagcgtgggagacagagtgaccatcacatgcaagagcagccagagcctgctggactccgatggcaagacctacctgaactggtatcagcagaagcccggcaaggcccctaagctgctgatctacctggtgtccaagctggatagcggcgtgcccagcagattttctggcagcggcagcggaaccgacttcaccctgacaatatccagcctccagcctgaggacttcgccacctactactgcttccaaggcacccactttccatacaccttcggccagggcaccaaggtggaaatcaaaagactcgaggacaagcagctggacgccgacgtgtcccccaagcctaccatcttcctgccctctatcgccgagacaaagctccagaaggccggcacctacctgtgcctgctggaaaagttcttcccagatgtgattaagatccactggcaggaaaagaagtccaacaccatcctgggcagccaggaaggcaacaccatgaagaccaacgacacctacatgaagttcagctggctgaccgtgcccgagaagtccctggacaaagaacacagatgcatcgtgcggcacgaaaacaacaagaacggcgtggaccaggaaatcatcttcccacccatcaagaccgatgtgattacaatggaccccaaggacaactgctccaaggacgccaacgataccctgctgctccagctgaccaacaccagcgcctactacatgtacttgttgctgctgctgaagtccgtggtgtacttcgccatcatcacatgctgcctgctgcggagaaccgccttctgctgcaacggcgagaagtctagggccaagcgatctggatctggagcaacaaacttctcactactcaaacaagcaggtgacgtggaggagaatcccgggcctactagtatggactggatttggcgcatccttttccttgtcggcgctgctaccggcgcgcattccttcgaagaagtgcagctggttgaatcaggcggaggactggttcagcctggcggatctctgagactgtcttgtgccgccagcggctacaccttcaccagctactggatgaactgggtccgacaggcccctggcaaaggactggaatgggtcggaatgatcgaccccagcgacagcgagacacactacaaccacatcttcaaggaccgcttcaccatcagcgccgacaccagcaagaataccgcctacctccagatgaactccctgagagccgaggacaccgccgtgtactactgcgccagaaacctgtatctgttcggccagggaaccctggtcacagtgtcatctacgcgtagccagcctcacaccaagcccagcgtgttcgtgatgaagaacggcaccaacgtggcctgcctcgtgaaagagttctaccccaaggacatcaggatcaacctggtgtccagcaagaagatcaccgagttcgaccccgccatcgtgatctcccccagcggcaagtacaacgccgtgaagctggggaagtacgaggacagcaacagcgtgacctgctccgtgcagcacgacaacaagaccgtgcacagcaccgactttgaagtgaaaaccgactccaccgaccacgtgaagcccaaagagacagagaacaccaagcagcccagcaagagctgccacaagcccaaggccatcgtgcacaccgagaaagtgaacatgatgagcctgaccgtgctgggcctgcggatgctgttcgccaaaaccgtggccgtgaacttcctgctgaccgccaagctgttcttcctc

SEQ ID NO: 37011 - DNA, 1881 bp, synthetic construct
  source 1..1881: mol_type = other DNA
atggccttaccagtgaccgccttgctcctgccgctggccttgctgctccacgccgccaggccggacatccagatgacacagagccctagcagcctgtctgccagcgtgggagacagagtgaccatcacatgcaagagcagccagagcctgctggactccgatggcaagacctacctgaactggtatcagcagaagcccggcaaggcccctaagctgctgatctacctggtgtccaagctggatagcggcgtgcccagcagattttctggcagcggcagcggaaccgacttcaccctgacaatatccagcctccagcctgaggacttcgccacctactactgcttccaaggcacccactttccatacaccttcggccagggcaccaaggtggaaatcaaaagactcgagagccagcctcacaccaagcccagcgtgttcgtgatgaagaacggcaccaacgtggcctgcctcgtgaaagagttctaccccaaggacatcaggatcaacctggtgtccagcaagaagatcaccgagttcgaccccgccatcgtgatctcccccagcggcaagtacaacgccgtgaagctggggaagtacgaggacagcaacagcgtgacctgctccgtgcagcacgacaacaagaccgtgcacagcaccgactttgaagtgaaaaccgactccaccgaccacgtgaagcccaaagagacagagaacaccaagcagcccagcaagagctgccacaagcccaaggccatcgtgcacaccgagaaagtgaacatgatgagcctgaccgtgctgggcctgcggatgctgttcgccaaaaccgtggccgtgaacttcctgctgaccgccaagctgttcttcctcagggccaagcgatctggatctggagcaacaaacttctcactactcaaacaagcaggtgacgtggaggagaatcccgggcctactagtatggactggatttggcgcatccttttccttgtcggcgctgctaccggcgcgcattccttcgaagaagtgcagctggttgaatcaggcggaggactggttcagcctggcggatctctgagactgtcttgtgccgccagcggctacaccttcaccagctactggatgaactgggtccgacaggcccctggcaaaggactggaatgggtcggaatgatcgaccccagcgacagcgagacacactacaaccacatcttcaaggaccgcttcaccatcagcgccgacaccagcaagaataccgcctacctccagatgaactccctgagagccgaggacaccgccgtgtactactgcgccagaaacctgtatctgttcggccagggaaccctggtcacagtgtcatctacgcgtgacaagcagctggacgccgacgtgtcccccaagcctaccatcttcctgccctctatcgccgagacaaagctccagaaggccggcacctacctgtgcctgctggaaaagttcttcccagatgtgattaagatccactggcaggaaaagaagtccaacaccatcctgggcagccaggaaggcaacaccatgaagaccaacgacacctacatgaagttcagctggctgaccgtgcccgagaagtccctggacaaagaacacagatgcatcgtgcggcacgaaaacaacaagaacggcgtggaccaggaaatcatcttcccacccatcaagaccgatgtgattacaatggaccccaaggacaactgctccaaggacgccaacgataccctgctgctccagctgaccaacaccagcgcctactacatgtacttgttgctgctgctgaagtccgtggtgtacttcgccatcatcacatgctgcctgctgcggagaaccgccttctgctgcaacggcgagaagtct

SEQ ID NO: 37012 - DNA, 1926 bp, synthetic construct
  source 1..1926: mol_type = other DNA
atggccttaccagtgaccgccttgctcctgccgctggccttgctgctccacgccgccaggccgctcgaggacaagcagctggacgccgacgtgtcccccaagcctaccatcttcctgccctctatcgccgagacaaagctccagaaggccggcacctacctgtgcctgctggaaaagttcttcccagatgtgattaagatccactggcaggaaaagaagtccaacaccatcctgggcagccaggaaggcaacaccatgaagaccaacgacacctacatgaagttcagctggctgaccgtgcccgagaagtccctggacaaagaacacagatgcatcgtgcggcacgaaaacaacaagaacggcgtggaccaggaaatcatcttcccacccatcaagaccgatgtgattacaatggaccccaaggacaactgctccaaggacgccaacgataccctgctgctccagctgaccaacaccagcgcctactacatgtacttgttgctgctgctgaagtccgtggtgtacttcgccatcatcacatgctgcctgctgcggagaaccgccttctgctgcaacggcgagaagtctagggccaagcgatctggatctggagcaacaaacttctcactactcaaacaagcaggtgacgtggaggagaatcccgggcctactagcatggccttaccagtgaccgccttgctcctgccgctggccttgctgctccacgccgccaggccggacatccagatgacacagagccctagcagcctgtctgccagcgtgggagacagagtgaccatcacatgcaagagcagccagagcctgctggactccgatggcaagacctacctgaactggtatcagcagaagcccggcaaggcccctaagctgctgatctacctggtgtccaagctggatagcggcgtgcccagcagattttctggcagcggcagcggaaccgacttcaccctgacaatatccagcctccagcctgaggacttcgccacctactactgcttccaaggcacccactttccatacaccttcggccagggcaccaaggtggaaatcaaaagaggcggaggcggaagtggaggcggaggatctggcggcggaggctctgaagtgcagctggttgaatcaggcggaggactggttcagcctggcggatctctgagactgtcttgtgccgccagcggctacaccttcaccagctactggatgaactgggtccgacaggcccctggcaaaggactggaatgggtcggaatgatcgaccccagcgacagcgagacacactacaaccacatcttcaaggaccgcttcaccatcagcgccgacaccagcaagaataccgcctacctccagatgaactccctgagagccgaggacaccgccgtgtactactgcgccagaaacctgtatctgttcggccagggaaccctggtcacagtgtcatctacgcgtagccagcctcacaccaagcccagcgtgttcgtgatgaagaacggcaccaacgtggcctgcctcgtgaaagagttctaccccaaggacatcaggatcaacctggtgtccagcaagaagatcaccgagttcgaccccgccatcgtgatctcccccagcggcaagtacaacgccgtgaagctggggaagtacgaggacagcaacagcgtgacctgctccgtgcagcacgacaacaagaccgtgcacagcaccgactttgaagtgaaaaccgactccaccgaccacgtgaagcccaaagagacagagaacaccaagcagcccagcaagagctgccacaagcccaaggccatcgtgcacaccgagaaagtgaacatgatgagcctgaccgtgctgggcctgcggatgctgttcgccaaaaccgtggccgtgaacttcctgctgaccgccaagctgttcttcctc

SEQ ID NO: 37013 - DNA, 2388 bp, synthetic construct
  source 1..2388: mol_type = other DNA
atggccttaccagtgaccgccttgctcctgccgctggccttgctgctccacgccgccaggccggacatccagatgacacagagccctagcagcctgtctgccagcgtgggagacagagtgaccatcacatgcaagagcagccagagcctgctggactccgatggcaagacctacctgaactggtatcagcagaagcccggcaaggcccctaagctgctgatctacctggtgtccaagctggatagcggcgtgcccagcagattttctggcagcggcagcggaaccgacttcaccctgacaatatccagcctccagcctgaggacttcgccacctactactgcttccaaggcacccactttccatacaccttcggccagggcaccaaggtggaaatcaaaagaggacagcctaaggccaatcctaccgtgacactgttccctccaagcagcgaagaactccaggccaacaaggccacacttgtgtgcctgatctccgacttctaccctggggctgtgacagtggcttggaaggccgatggatctcctgtgaaagccggcgtggaaaccaccaagccatccaagcagagcaacaacaaatacgccgccagctcctacctgagcctgacacctgagcagtggaagtcccacagatcctacagctgccaagtgacccacgaaggcagcaccgtggaaaagacagtggcccctacagagtgcagcggatcccagagcttcggcctgctggaccccaagctgtgctacctgctggatggcatcctgttcatctacggcgtgatcctgaccgccctgttcctgagagtgaagttcagcagaagcgccgacgcccctgcctaccagcagggacagaaccaactgtacaacgagctgaacctgggcagacgggaagagtacgacgtgctggacaagcggagaggcagggaccctgagatgggcggaaagccccagcggagaaagaacccccaggaaggactgtataacgaactccagaaagacaagatggccgaagcctacagcgagatcggcatgaagggcgagcggagaagaggcaagggccacgatggcctgtaccagggcctgagcaccgccaccaaggacacctatgacgccctgcacatgcaggccctgcctccaagaagggccaagcgatctggatctggagcaacaaacttctcactactcaaacaagcaggtgacgtggaggagaatcccgggcctactagtatggactggatttggcgcatccttttccttgtcggcgctgctaccggcgcgcattccttcgaagaagtgcagctggttgaatcaggcggaggactggttcagcctggcggatctctgagactgtcttgtgccgccagcggctacaccttcaccagctactggatgaactgggtccgacaggcccctggcaaaggactggaatgggtcggaatgatcgaccccagcgacagcgagacacactacaaccacatcttcaaggaccgcttcaccatcagcgccgacaccagcaagaataccgcctacctccagatgaactccctgagagccgaggacaccgccgtgtactactgcgccagaaacctgtatctgttcggccagggaaccctggtcacagtgtcatctgcctctacaaagggaccctccgtgtttcctctggctcccagcagcaagtctacaagcggaggaacagccgctctgggctgcctggtcaaggattactttcccgagcctgtgaccgtgtcctggaatagcggagcactgacaagcggcgtgcacacctttccagccgtgctgcaaagcagcggcctgtactctctgagcagcgtggtcacagtgcctagctctagcctgggcacccagacctacatctgcaatgtgaaccacaagcctagcaacaccaaggtggacaagagagtggaacccaagagctgtggtacccagagttttgggttgttggaccctaaattgtgctatctgttggacggaatcctgttcatttacggagtgatcctgaccgcattgttcctgcgggttaagttttccagatccgcagacgcacccgcttaccaacaagggcagaaccaactctacaatgaacttaatttggggcggagggaagagtacgacgttctggacaaaaggaggggacgagatcccgagatgggcggaaagcctcagcgaaggaagaatccgcaagaggggctttataacgaactccagaaagataaaatggcagaagcctatagtgagattgggatgaagggagaaaggaggaggggtaaaggtcacgatgggttgtaccaaggattgagcacagccactaaagatacctatgatgcgctccacatgcaggccctgccgccaaga

SEQ ID NO: 37014 - DNA, 2445 bp, synthetic construct
  source 1..2445: mol_type = other DNA
atggccttaccagtgaccgccttgctcctgccgctggccttgctgctccacgccgccaggccggacatccagatgacacagagccctagcagcctgtctgccagcgtgggagacagagtgaccatcacatgcaagagcagccagagcctgctggactccgatggcaagacctacctgaactggtatcagcagaagcccggcaaggcccctaagctgctgatctacctggtgtccaagctggatagcggcgtgcccagcagattttctggcagcggcagcggaaccgacttcaccctgacaatatccagcctccagcctgaggacttcgccacctactactgcttccaaggcacccactttccatacaccttcggccagggcaccaaggtggaaatcaaaagactcgaggacctgaagaacgtgttcccacctgaggtggccgtgttcgagcctagcgaggccgagatcagccacacccagaaagccaccctcgtgtgcctggctaccggcttctaccccgaccatgtggaactgtcttggtgggtcaacggcaaagaggtgcacagcggcgtgtctaccgacccccagccactgaaagaacagcccgccctgaacgacagccggtactgcctgagcagcagactgagagtgtccgccaccttctggcagaacccccggaaccacttcagatgccaggtgcagttctacggcctgagcgagaacgacgagtggacccaggacagagccaagcccgtgacccagatcgtgtctgccgaagcctggggcagagccgattgcggatcccagagcttcggcctgctggaccccaagctgtgctacctgctggatggcatcctgttcatctacggcgtgatcctgaccgccctgttcctgagagtgaagttcagcagaagcgccgacgcccctgcctaccagcagggacagaaccaactgtacaacgagctgaacctgggcagacgggaagagtacgacgtgctggacaagcggagaggcagggaccctgagatgggcggaaagccccagcggagaaagaacccccaggaaggactgtataacgaactccagaaagacaagatggccgaagcctacagcgagatcggcatgaagggcgagcggagaagaggcaagggccacgatggcctgtaccagggcctgagcaccgccaccaaggacacctatgacgccctgcacatgcaggccctgcctccaagaagggccaagcgatctggatctggagcaacaaacttctcactactcaaacaagcaggtgacgtggaggagaatcccgggcctactagtatggactggatttggcgcatccttttccttgtcggcgctgctaccggcgcgcattccttcgaagaagtgcagctggttgaatcaggcggaggactggttcagcctggcggatctctgagactgtcttgtgccgccagcggctacaccttcaccagctactggatgaactgggtccgacaggcccctggcaaaggactggaatgggtcggaatgatcgaccccagcgacagcgagacacactacaaccacatcttcaaggaccgcttcaccatcagcgccgacaccagcaagaataccgcctacctccagatgaactccctgagagccgaggacaccgccgtgtactactgcgccagaaacctgtatctgttcggccagggaaccctggtcacagtgtcatctacgcgtatccagaaccctgatcctgccgtgtaccagctgcgggatagcaagagcagcgacaagagcgtgtgtctgttcaccgacttcgacagccagaccaacgtgtcccagagcaaggactccgacgtgtacatcaccgataagaccgtgctggacatgcggagcatggacttcaagagcaactccgccgtggcctggtccaacaagtccgatttcgcctgcgccaacgccttcaacaacagcattatccccgaggacacattcttcccaagccccgagagcagctgcggtacccagagttttgggttgttggaccctaaattgtgctatctgttggacggaatcctgttcatttacggagtgatcctgaccgcattgttcctgcgggttaagttttccagatccgcagacgcacccgcttaccaacaagggcagaaccaactctacaatgaacttaatttggggcggagggaagagtacgacgttctggacaaaaggaggggacgagatcccgagatgggcggaaagcctcagcgaaggaagaatccgcaagaggggctttataacgaactccagaaagataaaatggcagaagcctatagtgagattgggatgaagggagaaaggaggaggggtaaaggtcacgatgggttgtaccaaggattgagcacagccactaaagatacctatgatgcgctccacatgcaggccctgccgccaaga

SEQ ID NO: 37015 - DNA, 2571 bp, synthetic construct
  source 1..2571: mol_type = other DNA
atggccttaccagtgaccgccttgctcctgccgctggccttgctgctccacgccgccaggccggacatccagatgacacagagccctagcagcctgtctgccagcgtgggagacagagtgaccatcacatgcaagagcagccagagcctgctggactccgatggcaagacctacctgaactggtatcagcagaagcccggcaaggcccctaagctgctgatctacctggtgtccaagctggatagcggcgtgcccagcagattttctggcagcggcagcggaaccgacttcaccctgacaatatccagcctccagcctgaggacttcgccacctactactgcttccaaggcacccactttccatacaccttcggccagggcaccaaggtggaaatcaaaagactcgaggaggacctgaagaacgtgttcccacctgaggtggccgtgttcgagcctagcgaggccgagatcagccacacccagaaagccaccctcgtgtgcctggctaccggcttctaccccgaccatgtggaactgtcttggtgggtcaacggcaaagaggtgcacagcggcgtgtctaccgacccccagccactgaaagaacagcccgccctgaacgacagccggtactgcctgagcagcagactgagagtgtccgccaccttctggcagaacccccggaaccacttcagatgccaggtgcagttctacggcctgagcgagaacgacgagtggacccaggacagagccaagcccgtgacccagatcgtgtctgccgaagcctggggcagagccgattgcggatcccagagcttcggcctgctggaccccaagctgtgctacctgctggatggcatcctgttcatctacggcgtgatcctgaccgccctgttcctgagagtgaagttcagcagaagcgccgacgcccctgcctaccagcagggacagaaccaactgtacaacgagctgaacctgggcagacgggaagagtacgacgtgctggacaagcggagaggcagggaccctgagatgggcggaaagccccagcggagaaagaacccccaggaaggactgtataacgaactccagaaagacaagatggccgaagcctacagcgagatcggcatgaagggcgagcggagaagaggcaagggccacgatggcctgtaccagggcctgagcaccgccaccaaggacacctatgacgccctgcacatgcaggccctgcctccaagaagggccaagcgatctggatctggagcaacaaacttctcactactcaaacaagcaggtgacgtggaggagaatcccgggcctactagtatggactggatttggcgcatccttttccttgtcggcgctgctaccggcgcgcattccttcgaagaagtgcagctggttgaatcaggcggaggactggttcagcctggcggatctctgagactgtcttgtgccgccagcggctacaccttcaccagctactggatgaactgggtccgacaggcccctggcaaaggactggaatgggtcggaatgatcgaccccagcgacagcgagacacactacaaccacatcttcaaggaccgcttcaccatcagcgccgacaccagcaagaataccgcctacctccagatgaactccctgagagccgaggacaccgccgtgtactactgcgccagaaacctgtatctgttcggccagggaaccctggtcacagtgtcatctacgcgtatccagaaccctgatcctgccgtgtaccagctgcgggatagcaagagcagcgacaagagcgtgtgtctgttcaccgacttcgacagccagaccaacgtgtcccagagcaaggactccgacgtgtacatcaccgataagaccgtgctggacatgcggagcatggacttcaagagcaactccgccgtggcctggtccaacaagtccgatttcgcctgcgccaacgccttcaacaacagcattatccccgaggacacattcttcccaagccccgagagcagctgcggtacccagagttttgggttgttggaccctaaattgtgctatctgttggacggaatcctgttcatttacggagtgatcctgaccgcattgttcctgaggagcaagcggtcacggctgctccacagcgattacatgaatatgacaccacgaagaccgggtcctactcgcaaacactaccaaccctacgcacctccccgcgactttgcagcgtaccgatctcgggttaagttttccagatccgcagacgcacccgcttaccaacaagggcagaaccaactctacaatgaacttaatttggggcggagggaagagtacgacgttctggacaaaaggaggggacgagatcccgagatgggcggaaagcctcagcgaaggaagaatccgcaagaggggctttataacgaactccagaaagataaaatggcagaagcctatagtgagattgggatgaagggagaaaggaggaggggtaaaggtcacgatgggttgtaccaaggattgagcacagccactaaagatacctatgatgcgctccacatgcaggccctgccgccaaga

SEQ ID NO: 37016 - DNA, 2700 bp, synthetic construct
  source 1..2700: mol_type = other DNA
atggccttaccagtgaccgccttgctcctgccgctggccttgctgctccacgccgccaggccggacatccagatgacacagagccctagcagcctgtctgccagcgtgggagacagagtgaccatcacatgcaagagcagccagagcctgctggactccgatggcaagacctacctgaactggtatcagcagaagcccggcaaggcccctaagctgctgatctacctggtgtccaagctggatagcggcgtgcccagcagattttctggcagcggcagcggaaccgacttcaccctgacaatatccagcctccagcctgaggacttcgccacctactactgcttccaaggcacccactttccatacaccttcggccagggcaccaaggtggaaatcaaaagactcgaggaggacctgaagaacgtgttcccacctgaggtggccgtgttcgagcctagcgaggccgagatcagccacacccagaaagccaccctcgtgtgcctggctaccggcttctaccccgaccatgtggaactgtcttggtgggtcaacggcaaagaggtgcacagcggcgtgtctaccgacccccagccactgaaagaacagcccgccctgaacgacagccggtactgcctgagcagcagactgagagtgtccgccaccttctggcagaacccccggaaccacttcagatgccaggtgcagttctacggcctgagcgagaacgacgagtggacccaggacagagccaagcccgtgacccagatcgtgtctgccgaagcctggggcagagccgattgcggatcccagagcttcggcctgctggaccccaagctgtgctacctgctggatggcatcctgttcatctacggcgtgatcctgaccgccctgttcctgaaacggggcagaaagaaactcctgtatatattcaaacaaccatttatgagaccagtacaaactactcaagaggaagatggctgtagctgccgatttccagaagaagaagaaggaggatgtgaactgagagtgaagttcagcagaagcgccgacgcccctgcctaccagcagggacagaaccaactgtacaacgagctgaacctgggcagacgggaagagtacgacgtgctggacaagcggagaggcagggaccctgagatgggcggaaagccccagcggagaaagaacccccaggaaggactgtataacgaactccagaaagacaagatggccgaagcctacagcgagatcggcatgaagggcgagcggagaagaggcaagggccacgatggcctgtaccagggcctgagcaccgccaccaaggacacctatgacgccctgcacatgcaggccctgcctccaagaagggccaagcgatctggatctggagcaacaaacttctcactactcaaacaagcaggtgacgtggaggagaatcccgggcctactagtatggactggatttggcgcatccttttccttgtcggcgctgctaccggcgcgcattccttcgaagaagtgcagctggttgaatcaggcggaggactggttcagcctggcggatctctgagactgtcttgtgccgccagcggctacaccttcaccagctactggatgaactgggtccgacaggcccctggcaaaggactggaatgggtcggaatgatcgaccccagcgacagcgagacacactacaaccacatcttcaaggaccgcttcaccatcagcgccgacaccagcaagaataccgcctacctccagatgaactccctgagagccgaggacaccgccgtgtactactgcgccagaaacctgtatctgttcggccagggaaccctggtcacagtgtcatctacgcgtatccagaaccctgatcctgccgtgtaccagctgcgggatagcaagagcagcgacaagagcgtgtgtctgttcaccgacttcgacagccagaccaacgtgtcccagagcaaggactccgacgtgtacatcaccgataagaccgtgctggacatgcggagcatggacttcaagagcaactccgccgtggcctggtccaacaagtccgatttcgcctgcgccaacgccttcaacaacagcattatccccgaggacacattcttcccaagccccgagagcagctgcggtacccagagttttgggttgttggaccctaaattgtgctatctgttggacggaatcctgttcatttacggagtgatcctgaccgcattgttcctgaagagaggccggaagaagctgctgtacatcttcaagcagcctttcatgcggcccgtgcagaccacccaggaagaggacggctgctcctgccggttccccgaggaagaagaaggcggctgcgagctgcgggttaagttttccagatccgcagacgcacccgcttaccaacaagggcagaaccaactctacaatgaacttaatttggggcggagggaagagtacgacgttctggacaaaaggaggggacgagatcccgagatgggcggaaagcctcagcgaaggaagaatccgcaagaggggctttataacgaactccagaaagataaaatggcagaagcctatagtgagattgggatgaagggagaaaggaggaggggtaaaggtcacgatgggttgtaccaaggattgagcacagccactaaagatacctatgatgcgctccacatgcaggccctgccgccaaga

SEQ ID NO: 37017 - DNA, 1761 bp, synthetic construct
  source 1..1761: mol_type = other DNA
atggccttaccagtgaccgccttgctcctgccgctggccttgctgctccacgccgccaggccggacatccagatgacacagagccctagcagcctgtctgccagcgtgggagacagagtgaccatcacatgcaagagcagccagagcctgctggactccgatggcaagacctacctgaactggtatcagcagaagcccggcaaggcccctaagctgctgatctacctggtgtccaagctggatagcggcgtgcccagcagattttctggcagcggcagcggaaccgacttcaccctgacaatatccagcctccagcctgaggacttcgccacctactactgcttccaaggcacccactttccatacaccttcggccagggcaccaaggtggaaatcaaaagactcgagcagagcttcggcctgctggaccccaagctgtgctacctgctggatggcatcctgttcatctacggcgtgatcctgaccgccctgttcctgagagtgaagttcagcagaagcgccgacgcccctgcctaccagcagggacagaaccaactgtacaacgagctgaacctgggcagacgggaagagtacgacgtgctggacaagcggagaggcagggaccctgagatgggcggaaagccccagcggagaaagaacccccaggaaggactgtataacgaactccagaaagacaagatggccgaagcctacagcgagatcggcatgaagggcgagcggagaagaggcaagggccacgatggcctgtaccagggcctgagcaccgccaccaaggacacctatgacgccctgcacatgcaggccctgcctccaagaagggccaagcgatctggatctggagcaacaaacttctcactactcaaacaagcaggtgacgtggaggagaatcccgggcctactagtatggactggatttggcgcatccttttccttgtcggcgctgctaccggcgcgcattccttcgaagaagtgcagctggttgaatcaggcggaggactggttcagcctggcggatctctgagactgtcttgtgccgccagcggctacaccttcaccagctactggatgaactgggtccgacaggcccctggcaaaggactggaatgggtcggaatgatcgaccccagcgacagcgagacacactacaaccacatcttcaaggaccgcttcaccatcagcgccgacaccagcaagaataccgcctacctccagatgaactccctgagagccgaggacaccgccgtgtactactgcgccagaaacctgtatctgttcggccagggaaccctggtcacagtgtcatctacgcgtcagagttttgggttgttggaccctaaattgtgctatctgttggacggaatcctgttcatttacggagtgatcctgaccgcattgttcctgcgggttaagttttccagatccgcagacgcacccgcttaccaacaagggcagaaccaactctacaatgaacttaatttggggcggagggaagagtacgacgttctggacaaaaggaggggacgagatcccgagatgggcggaaagcctcagcgaaggaagaatccgcaagaggggctttataacgaactccagaaagataaaatggcagaagcctatagtgagattgggatgaagggagaaaggaggaggggtaaaggtcacgatgggttgtaccaaggattgagcacagccactaaagatacctatgatgcgctccacatgcaggccctgccgccaaga

SEQ ID NO: 37018 - DNA, 1935 bp, synthetic construct
  source 1..1935: mol_type = other DNA
atggccttaccagtgaccgccttgctcctgccgctggccttgctgctccacgccgccaggccggacatccagatgacacagagccctagcagcctgtctgccagcgtgggagacagagtgaccatcacatgcaagagcagccagagcctgctggactccgatggcaagacctacctgaactggtatcagcagaagcccggcaaggcccctaagctgctgatctacctggtgtccaagctggatagcggcgtgcccagcagattttctggcagcggcagcggaaccgacttcaccctgacaatatccagcctccagcctgaggacttcgccacctactactgcttccaaggcacccactttccatacaccttcggccagggcaccaaggtggaaatcaaaagactcgagggacagcctaaggccaatcctaccgtgacactgttccctccaagcagcgaagaactccaggccaacaaggccacacttgtgtgcctgatctccgacttctaccctggggctgtgacagtggcttggaaggccgatggatctcctgtgaaagccggcgtggaaaccaccaagccatccaagcagagcaacaacaaatacgccgccagctcctacctgagcctgacacctgagcagtggaagtcccacagatcctacagctgccaagtgacccacgaaggcagcaccgtggaaaagacagtggcccctacagagtgcagccccatcaagaccgatgtgattacaatggaccccaaggacaactgctccaaggacgccaacgataccctgctgctccagctgaccaacaccagcgcctactacatgtacttgttgctgctgctgaagtccgtggtgtacttcgccatcatcacatgctgcctgctgcggagaaccgccttctgctgcaacggcgagaagtctagggccaagcgatctggatctggagcaacaaacttctcactactcaaacaagcaggtgacgtggaggagaatcccgggcctactagtatggactggatttggcgcatccttttccttgtcggcgctgctaccggcgcgcattccttcgaagaagtgcagctggttgaatcaggcggaggactggttcagcctggcggatctctgagactgtcttgtgccgccagcggctacaccttcaccagctactggatgaactgggtccgacaggcccctggcaaaggactggaatgggtcggaatgatcgaccccagcgacagcgagacacactacaaccacatcttcaaggaccgcttcaccatcagcgccgacaccagcaagaataccgcctacctccagatgaactccctgagagccgaggacaccgccgtgtactactgcgccagaaacctgtatctgttcggccagggaaccctggtcacagtgtcatctacgcgtgcctctacaaagggaccctccgtgtttcctctggctcccagcagcaagtctacaagcggaggaacagccgctctgggctgcctggtcaaggattactttcccgagcctgtgaccgtgtcctggaatagcggagcactgacaagcggcgtgcacacctttccagccgtgctgcaaagcagcggcctgtactctctgagcagcgtggtcacagtgcctagctctagcctgggcacccagacctacatctgcaatgtgaaccacaagcctagcaacaccaaggtggacaagagagtggaacccaagagctgtgaagtgaaaaccgactccaccgaccacgtgaagcccaaagagacagagaacaccaagcagcccagcaagagctgccacaagcccaaggccatcgtgcacaccgagaaagtgaacatgatgagcctgaccgtgctgggcctgcggatgctgttcgccaaaaccgtggccgtgaacttcctgctgaccgccaagctgttcttcctc

SEQ ID NO: 37019 - DNA, 1869 bp, synthetic construct
  source 1..1869: mol_type = other DNA
atggccttaccagtgaccgccttgctcctgccgctggccttgctgctccacgccgccaggccggacatccagatgacacagagccctagcagcctgtctgccagcgtgggagacagagtgaccatcacatgcaagagcagccagagcctgctggactccgatggcaagacctacctgaactggtatcagcagaagcccggcaaggcccctaagctgctgatctacctggtgtccaagctggatagcggcgtgcccagcagattttctggcagcggcagcggaaccgacttcaccctgacaatatccagcctccagcctgaggacttcgccacctactactgcttccaaggcacccactttccatacaccttcggccagggcaccaaggtggaaatcaaaagactcgagggacagcctaaggccaatcctaccgtgacactgttccctccaagcagcgaagaactccaggccaacaaggccacacttgtgtgcctgatctccgacttctaccctggggctgtgacagtggcttggaaggccgatggatctcctgtgaaagccggcgtggaaaccaccaagccatccaagcagagcaacaacaaatacgccgccagctcctacctgagcctgacacctgagcagtggaagtcccacagatcctacagctgccaagtgacccacgaaggcagcaccgtggaaaagacagtggcccctacagagtgcagcggcagagccgattgcggcatcaccagcgccagctaccaccagggcgtgctgagcgccaccatcctgtacgagatcctgctgggcaaggccaccctgtacgccgtgctggtgtctgccctggtgctgatggctatggtcaagcggaaggacagccggggaagggccaagcgatctggatctggagcaacaaacttctcactactcaaacaagcaggtgacgtggaggagaatcccgggcctactagtatggactggatttggcgcatccttttccttgtcggcgctgctaccggcgcgcattccttcgaagaagtgcagctggttgaatcaggcggaggactggttcagcctggcggatctctgagactgtcttgtgccgccagcggctacaccttcaccagctactggatgaactgggtccgacaggcccctggcaaaggactggaatgggtcggaatgatcgaccccagcgacagcgagacacactacaaccacatcttcaaggaccgcttcaccatcagcgccgacaccagcaagaataccgcctacctccagatgaactccctgagagccgaggacaccgccgtgtactactgcgccagaaacctgtatctgttcggccagggaaccctggtcacagtgtcatctacgcgtgcctctacaaagggaccctccgtgtttcctctggctcccagcagcaagtctacaagcggaggaacagccgctctgggctgcctggtcaaggattactttcccgagcctgtgaccgtgtcctggaatagcggagcactgacaagcggcgtgcacacctttccagccgtgctgcaaagcagcggcctgtactctctgagcagcgtggtcacagtgcctagctctagcctgggcacccagacctacatctgcaatgtgaaccacaagcctagcaacaccaaggtggacaagagagtggaacccaagagctgtatccccgaggacacattcttcccaagcagcgacgtgccctgcgacgtgaagctggtggaaaagagcttcgagacagacaccaacctgaacttccagaacctgagcgtgatcggcttcagaatcctgctgctgaaagtggccggctttaacctgctgatgaccctgcggctgtggtccagc

SEQ ID NO: 37020 - DNA, 1869 bp, synthetic construct
  source 1..1869: mol_type = other DNA
atggccttaccagtgaccgccttgctcctgccgctggccttgctgctccacgccgccaggccggacatccagatgacacagagccctagcagcctgtctgccagcgtgggagacagagtgaccatcacatgcaagagcagccagagcctgctggactccgatggcaagacctacctgaactggtatcagcagaagcccggcaaggcccctaagctgctgatctacctggtgtccaagctggatagcggcgtgcccagcagattttctggcagcggcagcggaaccgacttcaccctgacaatatccagcctccagcctgaggacttcgccacctactactgcttccaaggcacccactttccatacaccttcggccagggcaccaaggtggaaatcaaaagactcgagggacagcctaaggccaatcctaccgtgacactgttccctccaagcagcgaagaactccaggccaacaaggccacacttgtgtgcctgatctccgacttctaccctggggctgtgacagtggcttggaaggccgatggatctcctgtgaaagccggcgtggaaaccaccaagccatccaagcagagcaacaacaaatacgccgccagctcctacctgagcctgacacctgagcagtggaagtcccacagatcctacagctgccaagtgacccacgaaggcagcaccgtggaaaagacagtggcccctacagagtgcagcggcagagccgattgcggctttaccagcgagagctaccagcagggcgtgctgagcgccaccatcctgtacgagatcctgctgggcaaggccaccctgtacgccgtgctggtgtctgccctggtgctgatggctatggtcaagcggaaggacagccggggaagggccaagcgatctggatctggagcaacaaacttctcactactcaaacaagcaggtgacgtggaggagaatcccgggcctactagtatggactggatttggcgcatccttttccttgtcggcgctgctaccggcgcgcattccttcgaagaagtgcagctggttgaatcaggcggaggactggttcagcctggcggatctctgagactgtcttgtgccgccagcggctacaccttcaccagctactggatgaactgggtccgacaggcccctggcaaaggactggaatgggtcggaatgatcgaccccagcgacagcgagacacactacaaccacatcttcaaggaccgcttcaccatcagcgccgacaccagcaagaataccgcctacctccagatgaactccctgagagccgaggacaccgccgtgtactactgcgccagaaacctgtatctgttcggccagggaaccctggtcacagtgtcatctacgcgtgcctctacaaagggaccctccgtgtttcctctggctcccagcagcaagtctacaagcggaggaacagccgctctgggctgcctggtcaaggattactttcccgagcctgtgaccgtgtcctggaatagcggagcactgacaagcggcgtgcacacctttccagccgtgctgcaaagcagcggcctgtactctctgagcagcgtggtcacagtgcctagctctagcctgggcacccagacctacatctgcaatgtgaaccacaagcctagcaacaccaaggtggacaagagagtggaacccaagagctgtatccccgaggacacattcttcccaagccccgagagcagctgcgacgtgaagctggtggaaaagagcttcgagacagacaccaacctgaacttccagaacctgagcgtgatcggcttcagaatcctgctgctgaaagtggccggctttaacctgctgatgaccctgcggctgtggtccagc

SEQ ID NO: 37021 - DNA, 1347 bp, synthetic construct
  source 1..1347: mol_type = other DNA
atggccttaccagtgaccgccttgctcctgccgctggccttgctgctccacgccgccaggccggacatccagatgacacagagccctagcagcctgtctgccagcgtgggagacagagtgaccatcacatgcaagagcagccagagcctgctggactccgatggcaagacctacctgaactggtatcagcagaagcccggcaaggcccctaagctgctgatctacctggtgtccaagctggatagcggcgtgcccagcagattttctggcagcggcagcggaaccgacttcaccctgacaatatccagcctccagcctgaggacttcgccacctactactgcttccaaggcacccactttccatacaccttcggccagggcaccaaggtggaaatcaaaagaggcggaggcggaagtggaggcggaggatctggcggcggaggctctgaagtgcagctggttgaatcaggcggaggactggttcagcctggcggatctctgagactgtcttgtgccgccagcggctacaccttcaccagctactggatgaactgggtccgacaggcccctggcaaaggactggaatgggtcggaatgatcgaccccagcgacagcgagacacactacaaccacatcttcaaggaccgcttcaccatcagcgccgacaccagcaagaataccgcctacctccagatgaactccctgagagccgaggacaccgccgtgtactactgcgccagaaacctgtatctgttcggccagggaaccctggtcacagtgtcatctacgcgtgacggtaacgaggagatgggaggaatcactcaaaccccttacaaagtctcaatttcaggaacaactgttatccttacatgtccccagtatcctggcagcgagatcctttggcagcataacgacaagaatatagggggagatgaagacgataagaatatcggatctgacgaggatcacttgagcctgaaagagttctccgagcttgaacaaagcggatattatgtgtgctatccgcgcgggtcaaagccggaagacgctaacttttacctttatctccgagccagagtgtgcgaaaattgcatggaaatggacgttatgtccgttgctacaatagttatcgtagatatatgcatcacgggtggactgcttctgctggtttattattggtccaagaatagaaaggccaaagctaaacccgtgaccagaggcgctggcgcaggcggaaggcaaaggggacaaaacaaagaacggccaccaccagtgccaaatccagattatgagcctattcggaaaggacagagggacctgtactctggcctgaatcagagaagaatc

SEQ ID NO: 37022 - DNA, 1242 bp, synthetic construct
  source 1..1242: mol_type = other DNA
atggccttaccagtgaccgccttgctcctgccgctggccttgctgctccacgccgccaggccggacatccagatgacacagagccctagcagcctgtctgccagcgtgggagacagagtgaccatcacatgcaagagcagccagagcctgctggactccgatggcaagacctacctgaactggtatcagcagaagcccggcaaggcccctaagctgctgatctacctggtgtccaagctggatagcggcgtgcccagcagattttctggcagcggcagcggaaccgacttcaccctgacaatatccagcctccagcctgaggacttcgccacctactactgcttccaaggcacccactttccatacaccttcggccagggcaccaaggtggaaatcaaaagaggcggaggcggaagtggaggcggaggatctggcggcggaggctctgaagtgcagctggttgaatcaggcggaggactggttcagcctggcggatctctgagactgtcttgtgccgccagcggctacaccttcaccagctactggatgaactgggtccgacaggcccctggcaaaggactggaatgggtcggaatgatcgaccccagcgacagcgagacacactacaaccacatcttcaaggaccgcttcaccatcagcgccgacaccagcaagaataccgcctacctccagatgaactccctgagagccgaggacaccgccgtgtactactgcgccagaaacctgtatctgttcggccagggaaccctggtcacagtgtcatctacgcgtttcaagatccccatcgaggaactggaagatcgggtgttcgtgaactgcaacacctctatcacctgggtggaaggcaccgtgggaacactgctgagcgacatcaccagactggacctcggcaagcggattctggaccctcggggcatctacagatgcaacggcaccgacatctacaaggacaaagaaagcaccgtgcaggtccactacagaatgtgccagtcctgcgtggaactggaccctgctacagtggccggcatcatcgtgaccgatgtgatcgctactctgctgctggctctgggagtgttctgcttcgccggacacgaaacaggcagactgtctggcgctgccgatacacaggccctgctgagaaacgaccaagtgtatcagcccctgcgcgacagagatgatgcccagtattctcacctcggcggcaactgggctagaaacaag

SEQ ID NO: 37023 - DNA, 1272 bp, synthetic construct
  source 1..1272: mol_type = other DNA
atggccttaccagtgaccgccttgctcctgccgctggccttgctgctccacgccgccaggccggacatccagatgacacagagccctagcagcctgtctgccagcgtgggagacagagtgaccatcacatgcaagagcagccagagcctgctggactccgatggcaagacctacctgaactggtatcagcagaagcccggcaaggcccctaagctgctgatctacctggtgtccaagctggatagcggcgtgcccagcagattttctggcagcggcagcggaaccgacttcaccctgacaatatccagcctccagcctgaggacttcgccacctactactgcttccaaggcacccactttccatacaccttcggccagggcaccaaggtggaaatcaaaagaggcggaggcggaagtggaggcggaggatctggcggcggaggctctgaagtgcagctggttgaatcaggcggaggactggttcagcctggcggatctctgagactgtcttgtgccgccagcggctacaccttcaccagctactggatgaactgggtccgacaggcccctggcaaaggactggaatgggtcggaatgatcgaccccagcgacagcgagacacactacaaccacatcttcaaggaccgcttcaccatcagcgccgacaccagcaagaataccgcctacctccagatgaactccctgagagccgaggacaccgccgtgtactactgcgccagaaacctgtatctgttcggccagggaaccctggtcacagtgtcatctacgcgtcagagcatcaagggcaaccacctggtcaaggtgtacgactaccaagaggacggcagcgtgctgctgacatgtgatgccgaggccaagaacatcacctggtttaaggacggcaagatgatcggcttcctgaccgaggacaagaagaagtggaacctgggcagcaacgctaaggaccccagaggcatgtatcagtgcaagggcagccagaacaagagcaagcccctccaggtgtactaccggatgtgccagaactgcatcgagctgaacgccgctaccatcagcggctttctgttcgccgagatcgtgtccatcttcgtgctggccgtgggcgtgtactttatcgctggacaggatggcgtgcggcagagcagagcttccgataagcaaaccctgctgcctaacgaccagctgtaccagcctctgaaggacagagaggacgaccagtacagccacctccagggcaatcagctgagaagaaac

SEQ ID NO: 37024 - DNA, 1221 bp, synthetic construct
  source 1..1221: mol_type = other DNA
atggccttaccagtgaccgccttgctcctgccgctggccttgctgctccacgccgccaggccggacatccagatgacacagagccctagcagcctgtctgccagcgtgggagacagagtgaccatcacatgcaagagcagccagagcctgctggactccgatggcaagacctacctgaactggtatcagcagaagcccggcaaggcccctaagctgctgatctacctggtgtccaagctggatagcggcgtgcccagcagattttctggcagcggcagcggaaccgacttcaccctgacaatatccagcctccagcctgaggacttcgccacctactactgcttccaaggcacccactttccatacaccttcggccagggcaccaaggtggaaatcaaaagaggcggaggcggaagtggaggcggaggatctggcggcggaggctctgaagtgcagctggttgaatcaggcggaggactggttcagcctggcggatctctgagactgtcttgtgccgccagcggctacaccttcaccagctactggatgaactgggtccgacaggcccctggcaaaggactggaatgggtcggaatgatcgaccccagcgacagcgagacacactacaaccacatcttcaaggaccgcttcaccatcagcgccgacaccagcaagaataccgcctacctccagatgaactccctgagagccgaggacaccgccgtgtactactgcgccagaaacctgtatctgttcggccagggaaccctggtcacagtgtcatctacgcgtcagagttttgggttgttggaccctaaattgtgctatctgttggacggaatcctgttcatttacggagtgatcctgaccgcattgttcctgcgggttaagttttccagatccgcagacgcacccgcttaccaacaagggcagaaccaactctacaatgaacttaatttggggcggagggaagagtacgacgttctggacaaaaggaggggacgagatcccgagatgggcggaaagcctcagcgaaggaagaatccgcaagaggggctttataacgaactccagaaagataaaatggcagaagcctatagtgagattgggatgaagggagaaaggaggaggggtaaaggtcacgatgggttgtaccaaggattgagcacagccactaaagatacctatgatgcgctccacatgcaggccctgccgccaaga

SEQ ID NO: 37025 - DNA, 1506 bp, synthetic construct
  source 1..1506: mol_type = other DNA
atggccttaccagtgaccgccttgctcctgccgctggccttgctgctccacgccgccaggccggacatccagatgacacagagccctagcagcctgtctgccagcgtgggagacagagtgaccatcacatgcaagagcagccagagcctgctggactccgatggcaagacctacctgaactggtatcagcagaagcccggcaaggcccctaagctgctgatctacctggtgtccaagctggatagcggcgtgcccagcagattttctggcagcggcagcggaaccgacttcaccctgacaatatccagcctccagcctgaggacttcgccacctactactgcttccaaggcacccactttccatacaccttcggccagggcaccaaggtggaaatcaaaagaggcggaggcggaagtggaggcggaggatctggcggcggaggctctgaagtgcagctggttgaatcaggcggaggactggttcagcctggcggatctctgagactgtcttgtgccgccagcggctacaccttcaccagctactggatgaactgggtccgacaggcccctggcaaaggactggaatgggtcggaatgatcgaccccagcgacagcgagacacactacaaccacatcttcaaggaccgcttcaccatcagcgccgacaccagcaagaataccgcctacctccagatgaactccctgagagccgaggacaccgccgtgtactactgcgccagaaacctgtatctgttcggccagggaaccctggtcacagtgtcatctacgcgtggaatgaggactgaggatcttcccaaagctgtcgtctttctcgaaccccaatggtatcgggtgctcgaaaaagactctgtgacactgaaatgccaaggggcctactctcccgaggacaactccacacagtggtttcataatgagtccctcatcagctctcaggccagctcttatttcattgatgccgctacagtggacgactccggcgagtatcggtgtcagaccaatctgtctacactgtctgaccccgtgcagcttgaggtccacattggatggttgctcttgcaagccccacgctgggttttcaaagaggaagatccaatccatctgcggtgccacagctggaaaaacaccgctctccacaaagtcacatacctgcaaaatggcaaaggacgcaaatacttccatcacaattccgatttttacattccgaaggctaccctgaaagacagcggcagctatttctgccggggactcgtcggctccaagaatgtgtcctccgaaaccgtgaatatcacgattacccaaggactggctgtgcctacaatctctagcttctttccgcctggataccaagtctccttctgtcttgtgatggtcctcctgtttgctgtggacacaggactgtacttttccgtgaaaacgaacatccgcagctccacacgcgattggaaagatcacaagtttaaatggcgcaaagatccccaggacaag

SEQ ID NO: 37026 - DNA, 1431 bp, synthetic construct
  source 1..1431: mol_type = other DNA
atggccttaccagtgaccgccttgctcctgccgctggccttgctgctccacgccgccaggccggacatccagatgacacagagccctagcagcctgtctgccagcgtgggagacagagtgaccatcacatgcaagagcagccagagcctgctggactccgatggcaagacctacctgaactggtatcagcagaagcccggcaaggcccctaagctgctgatctacctggtgtccaagctggatagcggcgtgcccagcagattttctggcagcggcagcggaaccgacttcaccctgacaatatccagcctccagcctgaggacttcgccacctactactgcttccaaggcacccactttccatacaccttcggccagggcaccaaggtggaaatcaaaagaggcggaggcggaagtggaggcggaggatctggcggcggaggctctgaagtgcagctggttgaatcaggcggaggactggttcagcctggcggatctctgagactgtcttgtgccgccagcggctacaccttcaccagctactggatgaactgggtccgacaggcccctggcaaaggactggaatgggtcggaatgatcgaccccagcgacagcgagacacactacaaccacatcttcaaggaccgcttcaccatcagcgccgacaccagcaagaataccgcctacctccagatgaactccctgagagccgaggacaccgccgtgtactactgcgccagaaacctgtatctgttcggccagggaaccctggtcacagtgtcatctacgcgtggaatgaggactgaggatcttcccaaagctgtcgtctttctcgaaccccaatggtatcgggtgctcgaaaaagactctgtgacactgaaatgccaaggggcctactctcccgaggacaactccacacagtggtttcataatgagtccctcatcagctctcaggccagctcttatttcattgatgccgctacagtggacgactccggcgagtatcggtgtcagaccaatctgtctacactgtctgaccccgtgcagcttgaggtccacattggatggttgctcttgcaagccccacgctgggttttcaaagaggaagatccaatccatctgcggtgccacagctggaaaaacaccgctctccacaaagtcacatacctgcaaaatggcaaaggacgcaaatacttccatcacaattccgatttttacattccgaaggctaccctgaaagacagcggcagctatttctgccggggactcgtcggctccaagaatgtgtcctccgaaaccgtgaatatcacgattacccaaggactggctgtgcctacaatctctagcttctttccgcctggataccaagtctccttctgtcttgtgatggtcctcctgtttgctgtggacacaggactgtacttttccgtg

SEQ ID NO: 37027 - DNA, 1434 bp, synthetic construct
  source 1..1434: mol_type = other DNA
atggccttaccagtgaccgccttgctcctgccgctggccttgctgctccacgccgccaggccggacatccagatgacacagagccctagcagcctgtctgccagcgtgggagacagagtgaccatcacatgcaagagcagccagagcctgctggactccgatggcaagacctacctgaactggtatcagcagaagcccggcaaggcccctaagctgctgatctacctggtgtccaagctggatagcggcgtgcccagcagattttctggcagcggcagcggaaccgacttcaccctgacaatatccagcctccagcctgaggacttcgccacctactactgcttccaaggcacccactttccatacaccttcggccagggcaccaaggtggaaatcaaaagaggcggaggcggaagtggaggcggaggatctggcggcggaggctctgaagtgcagctggttgaatcaggcggaggactggttcagcctggcggatctctgagactgtcttgtgccgccagcggctacaccttcaccagctactggatgaactgggtccgacaggcccctggcaaaggactggaatgggtcggaatgatcgaccccagcgacagcgagacacactacaaccacatcttcaaggaccgcttcaccatcagcgccgacaccagcaagaataccgcctacctccagatgaactccctgagagccgaggacaccgccgtgtactactgcgccagaaacctgtatctgttcggccagggaaccctggtcacagtgtcatctacgcgtggaatgaggactgaggatcttcccaaagctgtcgtctttctcgaaccccaatggtatcgggtgctcgaaaaagactctgtgacactgaaatgccaaggggcctactctcccgaggacaactccacacagtggtttcataatgagtccctcatcagctctcaggccagctcttatttcattgatgccgctacagtggacgactccggcgagtatcggtgtcagaccaatctgtctacactgtctgaccccgtgcagcttgaggtccacattggatggttgctcttgcaagccccacgctgggttttcaaagaggaagatccaatccatctgcggtgccacagctggaaaaacaccgctctccacaaagtcacatacctgcaaaatggcaaaggacgcaaatacttccatcacaattccgatttttacattccgaaggctaccctgaaagacagcggcagctatttctgccggggactcgtcggctccaagaatgtgtcctccgaaaccgtgaatatcacgattacccaaggactggctgtgcctacaatctctagcttctttccgcctggataccaagtctccttctgtcttgtgatggtcctcctgtttgctgtggacacaggactgtacttttccgtgaaa

SEQ ID NO: 37028 - DNA, 2166 bp, synthetic construct
  source 1..2166: mol_type = other DNA
atggccttaccagtgaccgccttgctcctgccgctggccttgctgctccacgccgccaggccggacatccagatgacacagagccctagcagcctgtctgccagcgtgggagacagagtgaccatcacatgcaagagcagccagagcctgctggactccgatggcaagacctacctgaactggtatcagcagaagcccggcaaggcccctaagctgctgatctacctggtgtccaagctggatagcggcgtgcccagcagattttctggcagcggcagcggaaccgacttcaccctgacaatatccagcctccagcctgaggacttcgccacctactactgcttccaaggcacccactttccatacaccttcggccagggcaccaaggtggaaatcaaaagactcgagggacagcctaaggccaatcctaccgtgacactgttccctccaagcagcgaagaactccaggccaacaaggccacacttgtgtgcctgatctccgacttctaccctggggctgtgacagtggcttggaaggccgatggatctcctgtgaaagccggcgtggaaaccaccaagccatccaagcagagcaacaacaaatacgccgccagctcctacctgagcctgacacctgagcagtggaagtcccacagatcctacagctgccaagtgacccacgaaggcagcaccgtggaaaagacagtggcccctacagagtgcagcggatcccagagcttcggcctgctggaccccaagctgtgctacctgctggatggcatcctgttcatctacggcgtgatcctgaccgccctgttcctgagagtgaagttcagcagaagcgccgacgcccctgcctaccagcagggacagaaccaactgtacaacgagctgaacctgggcagacgggaagagtacgacgtgctggacaagcggagaggcagggaccctgagatgggcggaaagccccagcggagaaagaacccccaggaaggactgtataacgaactccagaaagacaagatggccgaagcctacagcgagatcggcatgaagggcgagcggagaagaggcaagggccacgatggcctgtaccagggcctgagcaccgccaccaaggacacctatgacgccctgcacatgcaggccctgcctccaagaagggccaagcgatctggatctggagcaacaaacttctcactactcaaacaagcaggtgacgtggaggagaatcccgggcctactagtatggactggatttggcgcatccttttccttgtcggcgctgctaccggcgcgcattccttcgaagaagtgcagctggttgaatcaggcggaggactggttcagcctggcggatctctgagactgtcttgtgccgccagcggctacaccttcaccagctactggatgaactgggtccgacaggcccctggcaaaggactggaatgggtcggaatgatcgaccccagcgacagcgagacacactacaaccacatcttcaaggaccgcttcaccatcagcgccgacaccagcaagaataccgcctacctccagatgaactccctgagagccgaggacaccgccgtgtactactgcgccagaaacctgtatctgttcggccagggaaccctggtcacagtgtcatctacgcgtgcctctacaaagggaccctccgtgtttcctctggctcccagcagcaagtctacaagcggaggaacagccgctctgggctgcctggtcaaggattactttcccgagcctgtgaccgtgtcctggaatagcggagcactgacaagcggcgtgcacacctttccagccgtgctgcaaagcagcggcctgtactctctgagcagcgtggtcacagtgcctagctctagcctgggcacccagacctacatctgcaatgtgaaccacaagcctagcaacaccaaggtggacaagagagtggaacccaagagctgtggtaccatcactcaaggtttggcagtgtcaaccatctcatcattctttccacctggctaccaagtgtccttctgcctggtcatggtgctgctgttcgccgtggataccggcctgtacttcagcgtcaagaccaacatccggtccagcaccagagactggaaggaccacaagttcaagtggcggaaggaccctcaggacaag

SEQ ID NO: 37029 - DNA, 2211 bp, synthetic construct
  source 1..2211: mol_type = other DNA
atggccttaccagtgaccgccttgctcctgccgctggccttgctgctccacgccgccaggccggacatccagatgacacagagccctagcagcctgtctgccagcgtgggagacagagtgaccatcacatgcaagagcagccagagcctgctggactccgatggcaagacctacctgaactggtatcagcagaagcccggcaaggcccctaagctgctgatctacctggtgtccaagctggatagcggcgtgcccagcagattttctggcagcggcagcggaaccgacttcaccctgacaatatccagcctccagcctgaggacttcgccacctactactgcttccaaggcacccactttccatacaccttcggccagggcaccaaggtggaaatcaaaagactcgaggacctgaagaacgtgttcccacctgaggtggccgtgttcgagcctagcgaggccgagatcagccacacccagaaagccaccctcgtgtgcctggctaccggcttctaccccgaccatgtggaactgtcttggtgggtcaacggcaaagaggtgcacagcggcgtgtctaccgacccccagccactgaaagaacagcccgccctgaacgacagccggtactgcctgagcagcagactgagagtgtccgccaccttctggcagaacccccggaaccacttcagatgccaggtgcagttctacggcctgagcgagaacgacgagtggacccaggacagagccaagcccgtgacccagatcgtgtctgccgaagcctggggcagagccgattgcggatcccagagcttcggcctgctggaccccaagctgtgctacctgctggatggcatcctgttcatctacggcgtgatcctgaccgccctgttcctgagagtgaagttcagcagaagcgccgacgcccctgcctaccagcagggacagaaccaactgtacaacgagctgaacctgggcagacgggaagagtacgacgtgctggacaagcggagaggcagggaccctgagatgggcggaaagccccagcggagaaagaacccccaggaaggactgtataacgaactccagaaagacaagatggccgaagcctacagcgagatcggcatgaagggcgagcggagaagaggcaagggccacgatggcctgtaccagggcctgagcaccgccaccaaggacacctatgacgccctgcacatgcaggccctgcctccaagaagggccaagcgatctggatctggagcaacaaacttctcactactcaaacaagcaggtgacgtggaggagaatcccgggcctactagtatggactggatttggcgcatccttttccttgtcggcgctgctaccggcgcgcattccttcgaagaagtgcagctggttgaatcaggcggaggactggttcagcctggcggatctctgagactgtcttgtgccgccagcggctacaccttcaccagctactggatgaactgggtccgacaggcccctggcaaaggactggaatgggtcggaatgatcgaccccagcgacagcgagacacactacaaccacatcttcaaggaccgcttcaccatcagcgccgacaccagcaagaataccgcctacctccagatgaactccctgagagccgaggacaccgccgtgtactactgcgccagaaacctgtatctgttcggccagggaaccctggtcacagtgtcatctacgcgtatccagaaccctgatcctgccgtgtaccagctgcgggatagcaagagcagcgacaagagcgtgtgtctgttcaccgacttcgacagccagaccaacgtgtcccagagcaaggactccgacgtgtacatcaccgataagaccgtgctggacatgcggagcatggacttcaagagcaactccgccgtggcctggtccaacaagtccgatttcgcctgcgccaacgccttcaacaacagcattatccccgaggacacattcttcccaagccccgagagcagctgcggtaccatcactcaaggtttggcagtgtcaaccatctcatcattctttccacctggctaccaagtgtccttctgcctggtcatggtgctgctgttcgccgtggataccggcctgtacttcagcgtcaagaccaacatccggtccagcaccagagactggaaggaccacaagttcaagtggcggaaggaccctcaggacaag

SEQ ID NO: 37030 - DNA, 2136 bp, synthetic construct
  source 1..2136: mol_type = other DNA
atggccttaccagtgaccgccttgctcctgccgctggccttgctgctccacgccgccaggccggacatccagatgacacagagccctagcagcctgtctgccagcgtgggagacagagtgaccatcacatgcaagagcagccagagcctgctggactccgatggcaagacctacctgaactggtatcagcagaagcccggcaaggcccctaagctgctgatctacctggtgtccaagctggatagcggcgtgcccagcagattttctggcagcggcagcggaaccgacttcaccctgacaatatccagcctccagcctgaggacttcgccacctactactgcttccaaggcacccactttccatacaccttcggccagggcaccaaggtggaaatcaaaagactcgaggacctgaagaacgtgttcccacctgaggtggccgtgttcgagcctagcgaggccgagatcagccacacccagaaagccaccctcgtgtgcctggctaccggcttctaccccgaccatgtggaactgtcttggtgggtcaacggcaaagaggtgcacagcggcgtgtctaccgacccccagccactgaaagaacagcccgccctgaacgacagccggtactgcctgagcagcagactgagagtgtccgccaccttctggcagaacccccggaaccacttcagatgccaggtgcagttctacggcctgagcgagaacgacgagtggacccaggacagagccaagcccgtgacccagatcgtgtctgccgaagcctggggcagagccgattgcggatcccagagcttcggcctgctggaccccaagctgtgctacctgctggatggcatcctgttcatctacggcgtgatcctgaccgccctgttcctgagagtgaagttcagcagaagcgccgacgcccctgcctaccagcagggacagaaccaactgtacaacgagctgaacctgggcagacgggaagagtacgacgtgctggacaagcggagaggcagggaccctgagatgggcggaaagccccagcggagaaagaacccccaggaaggactgtataacgaactccagaaagacaagatggccgaagcctacagcgagatcggcatgaagggcgagcggagaagaggcaagggccacgatggcctgtaccagggcctgagcaccgccaccaaggacacctatgacgccctgcacatgcaggccctgcctccaagaagggccaagcgatctggatctggagcaacaaacttctcactactcaaacaagcaggtgacgtggaggagaatcccgggcctactagtatggactggatttggcgcatccttttccttgtcggcgctgctaccggcgcgcattccttcgaagaagtgcagctggttgaatcaggcggaggactggttcagcctggcggatctctgagactgtcttgtgccgccagcggctacaccttcaccagctactggatgaactgggtccgacaggcccctggcaaaggactggaatgggtcggaatgatcgaccccagcgacagcgagacacactacaaccacatcttcaaggaccgcttcaccatcagcgccgacaccagcaagaataccgcctacctccagatgaactccctgagagccgaggacaccgccgtgtactactgcgccagaaacctgtatctgttcggccagggaaccctggtcacagtgtcatctacgcgtatccagaaccctgatcctgccgtgtaccagctgcgggatagcaagagcagcgacaagagcgtgtgtctgttcaccgacttcgacagccagaccaacgtgtcccagagcaaggactccgacgtgtacatcaccgataagaccgtgctggacatgcggagcatggacttcaagagcaactccgccgtggcctggtccaacaagtccgatttcgcctgcgccaacgccttcaacaacagcattatccccgaggacacattcttcccaagccccgagagcagctgcggtaccatcactcaaggtttggcagtgtcaaccatctcatcattctttccacctggctaccaagtgtccttctgcctggtcatggtgctgctgttcgccgtggataccggcctgtacttcagcgtc

SEQ ID NO: 37031 - DNA, 2139 bp, synthetic construct
  source 1..2139: mol_type = other DNA
atggccttaccagtgaccgccttgctcctgccgctggccttgctgctccacgccgccaggccggacatccagatgacacagagccctagcagcctgtctgccagcgtgggagacagagtgaccatcacatgcaagagcagccagagcctgctggactccgatggcaagacctacctgaactggtatcagcagaagcccggcaaggcccctaagctgctgatctacctggtgtccaagctggatagcggcgtgcccagcagattttctggcagcggcagcggaaccgacttcaccctgacaatatccagcctccagcctgaggacttcgccacctactactgcttccaaggcacccactttccatacaccttcggccagggcaccaaggtggaaatcaaaagactcgaggacctgaagaacgtgttcccacctgaggtggccgtgttcgagcctagcgaggccgagatcagccacacccagaaagccaccctcgtgtgcctggctaccggcttctaccccgaccatgtggaactgtcttggtgggtcaacggcaaagaggtgcacagcggcgtgtctaccgacccccagccactgaaagaacagcccgccctgaacgacagccggtactgcctgagcagcagactgagagtgtccgccaccttctggcagaacccccggaaccacttcagatgccaggtgcagttctacggcctgagcgagaacgacgagtggacccaggacagagccaagcccgtgacccagatcgtgtctgccgaagcctggggcagagccgattgcggatcccagagcttcggcctgctggaccccaagctgtgctacctgctggatggcatcctgttcatctacggcgtgatcctgaccgccctgttcctgagagtgaagttcagcagaagcgccgacgcccctgcctaccagcagggacagaaccaactgtacaacgagctgaacctgggcagacgggaagagtacgacgtgctggacaagcggagaggcagggaccctgagatgggcggaaagccccagcggagaaagaacccccaggaaggactgtataacgaactccagaaagacaagatggccgaagcctacagcgagatcggcatgaagggcgagcggagaagaggcaagggccacgatggcctgtaccagggcctgagcaccgccaccaaggacacctatgacgccctgcacatgcaggccctgcctccaagaagggccaagcgatctggatctggagcaacaaacttctcactactcaaacaagcaggtgacgtggaggagaatcccgggcctactagtatggactggatttggcgcatccttttccttgtcggcgctgctaccggcgcgcattccttcgaagaagtgcagctggttgaatcaggcggaggactggttcagcctggcggatctctgagactgtcttgtgccgccagcggctacaccttcaccagctactggatgaactgggtccgacaggcccctggcaaaggactggaatgggtcggaatgatcgaccccagcgacagcgagacacactacaaccacatcttcaaggaccgcttcaccatcagcgccgacaccagcaagaataccgcctacctccagatgaactccctgagagccgaggacaccgccgtgtactactgcgccagaaacctgtatctgttcggccagggaaccctggtcacagtgtcatctacgcgtatccagaaccctgatcctgccgtgtaccagctgcgggatagcaagagcagcgacaagagcgtgtgtctgttcaccgacttcgacagccagaccaacgtgtcccagagcaaggactccgacgtgtacatcaccgataagaccgtgctggacatgcggagcatggacttcaagagcaactccgccgtggcctggtccaacaagtccgatttcgcctgcgccaacgccttcaacaacagcattatccccgaggacacattcttcccaagccccgagagcagctgcggtaccatcactcaaggtttggcagtgtcaaccatctcatcattctttccacctggctaccaagtgtccttctgcctggtcatggtgctgctgttcgccgtggataccggcctgtacttcagcgtcaag

SEQ ID NO: 37032 - DNA, 2142 bp, synthetic construct
  source 1..2142: mol_type = other DNA
atggccttaccagtgaccgccttgctcctgccgctggccttgctgctccacgccgccaggccggacatccagatgacacagagccctagcagcctgtctgccagcgtgggagacagagtgaccatcacatgcaagagcagccagagcctgctggactccgatggcaagacctacctgaactggtatcagcagaagcccggcaaggcccctaagctgctgatctacctggtgtccaagctggatagcggcgtgcccagcagattttctggcagcggcagcggaaccgacttcaccctgacaatatccagcctccagcctgaggacttcgccacctactactgcttccaaggcacccactttccatacaccttcggccagggcaccaaggtggaaatcaaaagactcgaggacctgaagaacgtgttcccacctgaggtggccgtgttcgagcctagcgaggccgagatcagccacacccagaaagccaccctcgtgtgcctggctaccggcttctaccccgaccatgtggaactgtcttggtgggtcaacggcaaagaggtgcacagcggcgtgtctaccgacccccagccactgaaagaacagcccgccctgaacgacagccggtactgcctgagcagcagactgagagtgtccgccaccttctggcagaacccccggaaccacttcagatgccaggtgcagttctacggcctgagcgagaacgacgagtggacccaggacagagccaagcccgtgacccagatcgtgtctgccgaagcctggggcagagccgattgcggatcccagagcttcggcctgctggaccccaagctgtgctacctgctggatggcatcctgttcatctacggcgtgatcctgaccgccctgttcctgagagtgaagttcagcagaagcgccgacgcccctgcctaccagcagggacagaaccaactgtacaacgagctgaacctgggcagacgggaagagtacgacgtgctggacaagcggagaggcagggaccctgagatgggcggaaagccccagcggagaaagaacccccaggaaggactgtataacgaactccagaaagacaagatggccgaagcctacagcgagatcggcatgaagggcgagcggagaagaggcaagggccacgatggcctgtaccagggcctgagcaccgccaccaaggacacctatgacgccctgcacatgcaggccctgcctccaagaagggccaagcgatctggatctggagcaacaaacttctcactactcaaacaagcaggtgacgtggaggagaatcccgggcctactagtatggactggatttggcgcatccttttccttgtcggcgctgctaccggcgcgcattccttcgaagaagtgcagctggttgaatcaggcggaggactggttcagcctggcggatctctgagactgtcttgtgccgccagcggctacaccttcaccagctactggatgaactgggtccgacaggcccctggcaaaggactggaatgggtcggaatgatcgaccccagcgacagcgagacacactacaaccacatcttcaaggaccgcttcaccatcagcgccgacaccagcaagaataccgcctacctccagatgaactccctgagagccgaggacaccgccgtgtactactgcgccagaaacctgtatctgttcggccagggaaccctggtcacagtgtcatctacgcgtatccagaaccctgatcctgccgtgtaccagctgcgggatagcaagagcagcgacaagagcgtgtgtctgttcaccgacttcgacagccagaccaacgtgtcccagagcaaggactccgacgtgtacatcaccgataagaccgtgctggacatgcggagcatggacttcaagagcaactccgccgtggcctggtccaacaagtccgatttcgcctgcgccaacgccttcaacaacagcattatccccgaggacacattcttcccaagccccgagagcagctgcggtaccatcactcaaggtttggcagtgtcaaccatctcatcattctttccacctggctaccaagtgtccttctgcctggtcatggtgctgctgttcgccgtggataccggcctgtacttcagcgtcaagacc

SEQ ID NO: 37033 - DNA, 1953 bp, synthetic construct
  source 1..1953: mol_type = other DNA
atggccttaccagtgaccgccttgctcctgccgctggccttgctgctccacgccgccaggccggacatccagatgacacagagccctagcagcctgtctgccagcgtgggagacagagtgaccatcacatgcaagagcagccagagcctgctggactccgatggcaagacctacctgaactggtatcagcagaagcccggcaaggcccctaagctgctgatctacctggtgtccaagctggatagcggcgtgcccagcagattttctggcagcggcagcggaaccgacttcaccctgacaatatccagcctccagcctgaggacttcgccacctactactgcttccaaggcacccactttccatacaccttcggccagggcaccaaggtggaaatcaaaagactcgagggacagcctaaggccaatcctaccgtgacactgttccctccaagcagcgaagaactccaggccaacaaggccacacttgtgtgcctgatctccgacttctaccctggggctgtgacagtggcttggaaggccgatggatctcctgtgaaagccggcgtggaaaccaccaagccatccaagcagagcaacaacaaatacgccgccagctcctacctgagcctgacacctgagcagtggaagtcccacagatcctacagctgccaagtgacccacgaaggcagcaccgtggaaaagacagtggcccctacagagtgcagcggatccctgggagagcctcagctgtgctatatcctggacgccatcctgtttctgtacggcatcgtgctgaccctgctgtactgccggctgaagatccaagtgcggaaggccgccatcaccagctacgagaaatccgacggcgtgtacaccggcctgagcaccagaaatcaagagacatacgagacactgaagcacgaaaagcctccacaaagggccaagcgatctggatctggagcaacaaacttctcactactcaaacaagcaggtgacgtggaggagaatcccgggcctactagtatggactggatttggcgcatccttttccttgtcggcgctgctaccggcgcgcattccttcgaagaagtgcagctggttgaatcaggcggaggactggttcagcctggcggatctctgagactgtcttgtgccgccagcggctacaccttcaccagctactggatgaactgggtccgacaggcccctggcaaaggactggaatgggtcggaatgatcgaccccagcgacagcgagacacactacaaccacatcttcaaggaccgcttcaccatcagcgccgacaccagcaagaataccgcctacctccagatgaactccctgagagccgaggacaccgccgtgtactactgcgccagaaacctgtatctgttcggccagggaaccctggtcacagtgtcatctacgcgtgcctctacaaagggaccctccgtgtttcctctggctcccagcagcaagtctacaagcggaggaacagccgctctgggctgcctggtcaaggattactttcccgagcctgtgaccgtgtcctggaatagcggagcactgacaagcggcgtgcacacctttccagccgtgctgcaaagcagcggcctgtactctctgagcagcgtggtcacagtgcctagctctagcctgggcacccagacctacatctgcaatgtgaaccacaagcctagcaacaccaaggtggacaagagagtggaacccaagagctgtggtaccctcggagaaccacagctctgttacattctggatgctatcctgttcctctatgggatcgtcctgacactcctgtattgcagactcaaaattcaagttcgcaaagccgccattacctcttacgagaagagtgatggggtgtacacaggactgtctacccggaatcaagaaacctacgaaaccctcaaacatgagaagccacctcagtaa

SEQ ID NO: 37034 - DNA, 1860 bp, synthetic construct
  source 1..1860: mol_type = other DNA
atggccttaccagtgaccgccttgctcctgccgctggccttgctgctccacgccgccaggccggacatccagatgacacagagccctagcagcctgtctgccagcgtgggagacagagtgaccatcacatgcaagagcagccagagcctgctggactccgatggcaagacctacctgaactggtatcagcagaagcccggcaaggcccctaagctgctgatctacctggtgtccaagctggatagcggcgtgcccagcagattttctggcagcggcagcggaaccgacttcaccctgacaatatccagcctccagcctgaggacttcgccacctactactgcttccaaggcacccactttccatacaccttcggccagggcaccaaggtggaaatcaaaagactcgaggacctgaagaacgtgttcccacctgaggtggccgtgttcgagcctagcgaggccgagatcagccacacccagaaagccaccctcgtgtgcctggctaccggcttctaccccgaccatgtggaactgtcttggtgggtcaacggcaaagaggtgcacagcggcgtgtgtaccgacccccagccactgaaagaacagcccgccctgaacgacagccggtactgcctgagcagcagactgagagtgtccgccaccttctggcagaacccccggaaccacttcagatgccaggtgcagttctacggcctgagcgagaacgacgagtggacccaggacagagccaagcccgtgacccagatcgtgtctgccgaagcctggggcagagccgattgcggctttaccagcgagagctaccagcagggcgtgctgagcgcctactacatgtacttgttgctgctgctgaagtccgtggtgtacttcgccatcatcacatgctgcctgctgcggagaaccgccttctgctgcaacggcgagaagtctagggccaagcgatctggatctggagcaacaaacttctcactactcaaacaagcaggtgacgtggaggagaatcccgggcctactagtatggactggatttggcgcatccttttccttgtcggcgctgctaccggcgcgcattccttcgaagaagtgcagctggttgaatcaggcggaggactggttcagcctggcggatctctgagactgtcttgtgccgccagcggctacaccttcaccagctactggatgaactgggtccgacaggcccctggcaaaggactggaatgggtcggaatgatcgaccccagcgacagcgagacacactacaaccacatcttcaaggaccgcttcaccatcagcgccgacaccagcaagaataccgcctacctccagatgaactccctgagagccgaggacaccgccgtgtactactgcgccagaaacctgtatctgttcggccagggaaccctggtcacagtgtcatctacgcgtatccagaaccctgatcctgccgtgtaccagctgcgggatagcaagagcagcgacaagagcgtgtgtctgttcaccgacttcgacagccagaccaacgtgtcccagagcaaggactccgacgtgtacatcaccgataagtgcgtgctggacatgcggagcatggacttcaagagcaactccgccgtggcctggtccaacaagtccgatttcgcctgcgccaacgccttcaacaacagcattatccccgaggacacattcttcccaagccccgagagcagctgcgacgtgaagctggtggaaaagagcttcgagacagacaccaacctgaacttccagaacctgagcgtgatcggcttcagaatcctgctgctgaaagtggccggctttaacctgctgatgaccctgcggctgtggtccagc

SEQ ID NO: 37035 - DNA, 1881 bp, synthetic construct
  source 1..1881: mol_type = other DNA
atggccttaccagtgaccgccttgctcctgccgctggccttgctgctccacgccgccaggccggacatccagatgacacagagccctagcagcctgtctgccagcgtgggagacagagtgaccatcacatgcaagagcagccagagcctgctggactccgatggcaagacctacctgaactggtatcagcagaagcccggcaaggcccctaagctgctgatctacctggtgtccaagctggatagcggcgtgcccagcagattttctggcagcggcagcggaaccgacttcaccctgacaatatccagcctccagcctgaggacttcgccacctactactgcttccaaggcacccactttccatacaccttcggccagggcaccaaggtggaaatcaaaagactcgaggacaagcagctggacgccgacgtgtcccccaagcctaccatcttcctgccctctatcgccgagacaaagctccagaaggccggcacctacctgtgcctgctggaaaagttcttcccagatgtgattaagatccactggcaggaaaagaagtccaacaccatcctgggcagccaggaaggcaacaccatgaagaccaacgacacctacatgaagttcagctggctgaccgtgcccgagaagtccctggacaaagaacacagatgcatcgtgcggcacgaaaacaacaagaacggcgtggaccaggaaatcatcttcccacccatcaagaccgatgtgattacaatggaccccaaggacaactgctccaaggacgccaacgataccctgctgctccagctgaccaacaccagcgcctactacatgtacgagatcctgctgggcaaggccaccctgtacgccgtgctggtgtctgccctggtgctgatggctatggtcaagcggaaggacagccggggaagggccaagcgatctggatctggagcaacaaacttctcactactcaaacaagcaggtgacgtggaggagaatcccgggcctactagtatggactggatttggcgcatccttttccttgtcggcgctgctaccggcgcgcattccttcgaagaagtgcagctggttgaatcaggcggaggactggttcagcctggcggatctctgagactgtcttgtgccgccagcggctacaccttcaccagctactggatgaactgggtccgacaggcccctggcaaaggactggaatgggtcggaatgatcgaccccagcgacagcgagacacactacaaccacatcttcaaggaccgcttcaccatcagcgccgacaccagcaagaataccgcctacctccagatgaactccctgagagccgaggacaccgccgtgtactactgcgccagaaacctgtatctgttcggccagggaaccctggtcacagtgtcatctacgcgtagccagcctcacaccaagcccagcgtgttcgtgatgaagaacggcaccaacgtggcctgcctcgtgaaagagttctaccccaaggacatcaggatcaacctggtgtccagcaagaagatcaccgagttcgaccccgccatcgtgatctcccccagcggcaagtacaacgccgtgaagctggggaagtatgaggacagcaacagcgtgacctgctccgtgcagcacgacaacaagaccgtgcacagcaccgactttgaagtgaaaaccgactccaccgaccacgtgaagcccaaagagacagagaacaccaagcagcccagcaagagctgccacaagcccaaggccatcgtgcacaccgagaaagtgaacatgatgagcctgaccgtgatcggcttcagaatcctgctgctgaaagtggccggctttaacctgctgatgaccctgcggctgtggtccagctaa

SEQ ID NO: 37036 - DNA, 1881 bp, synthetic construct
  source 1..1881: mol_type = other DNA
atggccttaccagtgaccgccttgctcctgccgctggccttgctgctccacgccgccaggccggacatccagatgacacagagccctagcagcctgtctgccagcgtgggagacagagtgaccatcacatgcaagagcagccagagcctgctggactccgatggcaagacctacctgaactggtatcagcagaagcccggcaaggcccctaagctgctgatctacctggtgtccaagctggatagcggcgtgcccagcagattttctggcagcggcagcggaaccgacttcaccctgacaatatccagcctccagcctgaggacttcgccacctactactgcttccaaggcacccactttccatacaccttcggccagggcaccaaggtggaaatcaaaagactcgaggacaagcagctggacgccgacgtgtcccccaagcctaccatcttcctgccctctatcgccgagacaaagctccagaaggccggcacctacctgtgcctgctggaaaagttcttcccagatgtgattaagatccactggcaggaaaagaagtccaacaccatcctgggcagccaggaaggcaacaccatgaagaccaacgacacctacatgaagttcagctggctgaccgtgcccgagaagtccctggacaaagaacacagatgcatcgtgcggcacgaaaacaacaagaacggcgtggaccaggaaatcatcttcccacccatcaagaccgatgtgattacaatggaccccaaggacaactgctccaaggacgccaacgataccctgctgctccagctgaccaacaccagcgccaccatcctgtacgagatcctgctgggcaaggccaccctgtacgccgtgctggtgtctgccctggtgctgatggctatggtcaagcggaaggacagccggggaagggccaagcgatctggatctggagcaacaaacttctcactactcaaacaagcaggtgacgtggaggagaatcccgggcctactagtatggactggatttggcgcatccttttccttgtcggcgctgctaccggcgcgcattccttcgaagaagtgcagctggttgaatcaggcggaggactggttcagcctggcggatctctgagactgtcttgtgccgccagcggctacaccttcaccagctactggatgaactgggtccgacaggcccctggcaaaggactggaatgggtcggaatgatcgaccccagcgacagcgagacacactacaaccacatcttcaaggaccgcttcaccatcagcgccgacaccagcaagaataccgcctacctccagatgaactccctgagagccgaggacaccgccgtgtactactgcgccagaaacctgtatctgttcggccagggaaccctggtcacagtgtcatctacgcgtagccagcctcacaccaagcccagcgtgttcgtgatgaagaacggcaccaacgtggcctgcctcgtgaaagagttctaccccaaggacatcaggatcaacctggtgtccagcaagaagatcaccgagttcgaccccgccatcgtgatctcccccagcggcaagtacaacgccgtgaagctggggaagtatgaggacagcaacagcgtgacctgctccgtgcagcacgacaacaagaccgtgcacagcaccgactttgaagtgaaaaccgactccaccgaccacgtgaagcccaaagagacagagaacaccaagcagcccagcaagagctgccacaagcccaaggccatcgtgcacaccgagaaagtgaacatgatgagcctgaccgtgatcggcttcagaatcctgctgctgaaagtggccggctttaacctgctgatgaccctgcggctgtggtccagctaa

SEQ ID NO: 37037 - DNA, 1881 bp, synthetic construct
  source 1..1881: mol_type = other DNA
atggccttaccagtgaccgccttgctcctgccgctggccttgctgctccacgccgccaggccggacatccagatgacacagagccctagcagcctgtctgccagcgtgggagacagagtgaccatcacatgcaagagcagccagagcctgctggactccgatggcaagacctacctgaactggtatcagcagaagcccggcaaggcccctaagctgctgatctacctggtgtccaagctggatagcggcgtgcccagcagattttctggcagcggcagcggaaccgacttcaccctgacaatatccagcctccagcctgaggacttcgccacctactactgcttccaaggcacccactttccatacaccttcggccagggcaccaaggtggaaatcaaaagactcgaggacaagcagctggacgccgacgtgtcccccaagcctaccatcttcctgccctctatcgccgagacaaagctccagaaggccggcacctacctgtgcctgctggaaaagttcttcccagatgtgattaagatccactggcaggaaaagaagtccaacaccatcctgggcagccaggaaggcaacaccatgaagaccaacgacacctacatgaagttcagctggctgaccgtgcccgagaagtccctggacaaagaacacagatgcatcgtgcggcacgaaaacaacaagaacggcgtggaccaggaaatcatcttcccacccatcaagaccgatgtgattacaatggaccccaaggacaactgctccaaggacgccaacgataccctgctgctccagctgaccaacaccagcgcctactacatgtacgagatcctgctgggcaaggccaccctgtacgccgtgctggtgtctgccctggtgctgatggctatggtcaagcggaaggacagccggggaagggccaagcgatctggatctggagcaacaaacttctcactactcaaacaagcaggtgacgtggaggagaatcccgggcctactagtatggactggatttggcgcatccttttccttgtcggcgctgctaccggcgcgcattccttcgaagaagtgcagctggttgaatcaggcggaggactggttcagcctggcggatctctgagactgtcttgtgccgccagcggctacaccttcaccagctactggatgaactgggtccgacaggcccctggcaaaggactggaatgggtcggaatgatcgaccccagcgacagcgagacacactacaaccacatcttcaaggaccgcttcaccatcagcgccgacaccagcaagaataccgcctacctccagatgaactccctgagagccgaggacaccgccgtgtactactgcgccagaaacctgtatctgttcggccagggaaccctggtcacagtgtcatctacgcgtagccagcctcacaccaagcccagcgtgttcgtgatgaagaacggcaccaacgtggcctgcctcgtgaaagagttctaccccaaggacatcaggatcaacctggtgtccagcaagaagatcaccgagttcgaccccgccatcgtgatctcccccagcggcaagtacaacgccgtgaagctggggaagtacgaggacagcaacagcgtgacctgctccgtgcagcacgacaacaagaccgtgcacagcaccgactttgaagtgaaaaccgactccaccgaccacgtgaagcccaaagagacagagaacaccaagcagcccagcaagagctgccacaagcccaaggccatcgtgcacaccgagaaagtgaacatgatgagcctgaccgtgctgggcttcagaatcctgctgctgaaagtggccggctttaacctgctgatgaccctgcggctgtggtccagctaa

SEQ ID NO: 37038 - DNA, 1881 bp, synthetic construct
  source 1..1881: mol_type = other DNA
atggccttaccagtgaccgccttgctcctgccgctggccttgctgctccacgccgccaggccggacatccagatgacacagagccctagcagcctgtctgccagcgtgggagacagagtgaccatcacatgcaagagcagccagagcctgctggactccgatggcaagacctacctgaactggtatcagcagaagcccggcaaggcccctaagctgctgatctacctggtgtccaagctggatagcggcgtgcccagcagattttctggcagcggcagcggaaccgacttcaccctgacaatatccagcctccagcctgaggacttcgccacctactactgcttccaaggcacccactttccatacaccttcggccagggcaccaaggtggaaatcaaaagactcgaggacaagcagctggacgccgacgtgtcccccaagcctaccatcttcctgccctctatcgccgagacaaagctccagaaggccggcacctacctgtgcctgctggaaaagttcttcccagatgtgattaagatccactggcaggaaaagaagtccaacaccatcctgggcagccaggaaggcaacaccatgaagaccaacgacacctacatgaagttcagctggctgaccgtgcccgagaagtccctggacaaagaacacagatgcatcgtgcggcacgaaaacaacaagaacggcgtggaccaggaaatcatcttcccacccatcaagaccgatgtgattacaatggaccccaaggacaactgctccaaggacgccaacgataccctgctgctccagctgaccaacaccagcgccaccatcctgtacgagatcctgctgggcaaggccaccctgtacgccgtgctggtgtctgccctggtgctgatggctatggtcaagcggaaggacagccggggaagggccaagcgatctggatctggagcaacaaacttctcactactcaaacaagcaggtgacgtggaggagaatcccgggcctactagtatggactggatttggcgcatccttttccttgtcggcgctgctaccggcgcgcattccttcgaagaagtgcagctggttgaatcaggcggaggactggttcagcctggcggatctctgagactgtcttgtgccgccagcggctacaccttcaccagctactggatgaactgggtccgacaggcccctggcaaaggactggaatgggtcggaatgatcgaccccagcgacagcgagacacactacaaccacatcttcaaggaccgcttcaccatcagcgccgacaccagcaagaataccgcctacctccagatgaactccctgagagccgaggacaccgccgtgtactactgcgccagaaacctgtatctgttcggccagggaaccctggtcacagtgtcatctacgcgtagccagcctcacaccaagcccagcgtgttcgtgatgaagaacggcaccaacgtggcctgcctcgtgaaagagttctaccccaaggacatcaggatcaacctggtgtccagcaagaagatcaccgagttcgaccccgccatcgtgatctcccccagcggcaagtacaacgccgtgaagctggggaagtacgaggacagcaacagcgtgacctgctccgtgcagcacgacaacaagaccgtgcacagcaccgactttgaagtgaaaaccgactccaccgaccacgtgaagcccaaagagacagagaacaccaagcagcccagcaagagctgccacaagcccaaggccatcgtgcacaccgagaaagtgaacatgatgagcctgaccgtgctgggcttcagaatcctgctgctgaaagtggccggctttaacctgctgatgaccctgcggctgtggtccagctaa

SEQ ID NO: 37039 - DNA, 1863 bp, synthetic construct
  source 1..1863: mol_type = other DNA
atggccttaccagtgaccgccttgctcctgccgctggccttgctgctccacgccgccaggccggacatccagatgacacagagccctagcagcctgtctgccagcgtgggagacagagtgaccatcacatgcaagagcagccagagcctgctggactccgatggcaagacctacctgaactggtatcagcagaagcccggcaaggcccctaagctgctgatctacctggtgtccaagctggatagcggcgtgcccagcagattttctggcagcggcagcggaaccgacttcaccctgacaatatccagcctccagcctgaggacttcgccacctactactgcttccaaggcacccactttccatacaccttcggccagggcaccaaggtggaaatcaaaagactcgaggacctgaagaacgtgttcccacctgaggtggccgtgttcgagcctagcgaggccgagatcagccacacccagaaagccaccctcgtgtgcctggctaccggcttctaccccgaccatgtggaactgtcttggtgggtcaacggcaaagaggtgcacagcggcgtgtgtaccgacccccagccactgaaagaacagcccgccctgaacgacagccggtactgcctgagcagcagactgagagtgtccgccaccttctggcagaacccccggaaccacttcagatgccaggtgcagttctacggcctgagcgagaacgacgagtggacccaggacagagccaagcccgtgacccagatcgtgtctgccgaagcctggggcagagccgattgcggctttaccagcgagagctaccagcagggcgtgctgagcgccaccatcctgtacttgttgctgctgctgaagtccgtggtgtacttcgccatcatcacatgctgcctgctgcggagaaccgccttctgctgcaacggcgagaagtctagggccaagcgatctggatctggagcaacaaacttctcactactcaaacaagcaggtgacgtggaggagaatcccgggcctactagtatggactggatttggcgcatccttttccttgtcggcgctgctaccggcgcgcattccttcgaagaagtgcagctggttgaatcaggcggaggactggttcagcctggcggatctctgagactgtcttgtgccgccagcggctacaccttcaccagctactggatgaactgggtccgacaggcccctggcaaaggactggaatgggtcggaatgatcgaccccagcgacagcgagacacactacaaccacatcttcaaggaccgcttcaccatcagcgccgacaccagcaagaataccgcctacctccagatgaactccctgagagccgaggacaccgccgtgtactactgcgccagaaacctgtatctgttcggccagggaaccctggtcacagtgtcatctacgcgtatccagaaccctgatcctgccgtgtaccagctgcgggatagcaagagcagcgacaagagcgtgtgtctgttcaccgacttcgacagccagaccaacgtgtcccagagcaaggactccgacgtgtacatcaccgataagtgcgtgctggacatgcggagcatggacttcaagagcaactccgccgtggcctggtccaacaagtccgatttcgcctgcgccaacgccttcaacaacagcattatccccgaggacacattcttcccaagccccgagagcagctgcgacgtgaagctggtggaaaagagcttcgagacagacaccaacctgaacttccagaacctgagcgtgatcggcctgcggatgctgttcgccaaaaccgtggccgtgaacttcctgctgaccgccaagctgttcttcctctaa

SEQ ID NO: 37040 - DNA, 1950 bp, synthetic construct
  source 1..1950: mol_type = other DNA
atggccttaccagtgaccgccttgctcctgccgctggccttgctgctccacgccgccaggccggacatccagatgacacagagccctagcagcctgtctgccagcgtgggagacagagtgaccatcacatgcaagagcagccagagcctgctggactccgatggcaagacctacctgaactggtatcagcagaagcccggcaaggcccctaagctgctgatctacctggtgtccaagctggatagcggcgtgcccagcagattttctggcagcggcagcggaaccgacttcaccctgacaatatccagcctccagcctgaggacttcgccacctactactgcttccaaggcacccactttccatacaccttcggccagggcaccaaggtggaaatcaaaagactcgaggacctgaagaacgtgttcccacctgaggtggccgtgttcgagcctagcgaggccgagatcagccacacccagaaagccaccctcgtgtgcctggctaccggcttctaccccgaccatgtggaactgtcttggtgggtcaacggcaaagaggtgcacagcggcgtgtctaccgacccccagccactgaaagaacagcccgccctgaacgacagccggtactgcctgagcagcagactgagagtgtccgccaccttctggcagaacccccggaaccacttcagatgccaggtgcagttctacggcctgagcgagaacgacgagtggacccaggacagagccaagcccgtgacccagatcgtgtctgccgaagcctggggcagagccgattgcggatcctccaaggacgccaacgataccctgctgctccagctgaccaacaccagcgcctactacatgtacttgttgctgctgctgaagtccgtggtgtacttcgccatcatcacatgctgcctgctgcggagaaccgccttctgctgcaacggcgagaagtctagggccaagcgatctggatctggagcaacaaacttctcactactcaaacaagcaggtgacgtggaggagaatcccgggcctactagtatggactggatttggcgcatccttttccttgtcggcgctgctaccggcgcgcattccttcgaagaagtgcagctggttgaatcaggcggaggactggttcagcctggcggatctctgagactgtcttgtgccgccagcggctacaccttcaccagctactggatgaactgggtccgacaggcccctggcaaaggactggaatgggtcggaatgatcgaccccagcgacagcgagacacactacaaccacatcttcaaggaccgcttcaccatcagcgccgacaccagcaagaataccgcctacctccagatgaactccctgagagccgaggacaccgccgtgtactactgcgccagaaacctgtatctgttcggccagggaaccctggtcacagtgtcatctacgcgtatccagaaccctgatcctgccgtgtaccagctgcgggatagcaagagcagcgacaagagcgtgtgtctgttcaccgacttcgacagccagaccaacgtgtcccagagcaaggactccgacgtgtacatcaccgataagaccgtgctggacatgcggagcatggacttcaagagcaactccgccgtggcctggtccaacaagtccgatttcgcctgcgccaacgccttcaacaacagcattatccccgaggacacattcttcccaagccccgagagcagctgcggtaccgaagtgaaaaccgactccaccgaccacgtgaagcccaaagagacagagaacaccaagcagcccagcaagagctgccacaagcccaaggccatcgtgcacaccgagaaagtgaacatgatgagcctgaccgtgctgggcctgcggatgctgttcgccaaaaccgtggccgtgaacttcctgctgaccgccaagctgttcttcctctaa

SEQ ID NO: 37041 - DNA, 1860 bp, synthetic construct
  source 1..1860: mol_type = other DNA
atggccttaccagtgaccgccttgctcctgccgctggccttgctgctccacgccgccaggccggacatccagatgacacagagccctagcagcctgtctgccagcgtgggagacagagtgaccatcacatgcaagagcagccagagcctgctggactccgatggcaagacctacctgaactggtatcagcagaagcccggcaaggcccctaagctgctgatctacctggtgtccaagctggatagcggcgtgcccagcagattttctggcagcggcagcggaaccgacttcaccctgacaatatccagcctccagcctgaggacttcgccacctactactgcttccaaggcacccactttccatacaccttcggccagggcaccaaggtggaaatcaaaagactcgaggacctgaagaacgtgttcccacctgaggtggccgtgttcgagcctagcgaggccgagatcagccacacccagaaagccaccctcgtgtgcctggctaccggcttctaccccgaccatgtggaactgtcttggtgggtcaacggcaaagaggtgcacagcggcgtgtgtaccgacccccagccactgaaagaacagcccgccctgaacgacagccggtactgcctgagcagcagactgagagtgtccgccaccttctggcagaacccccggaaccacttcagatgccaggtgcagttctacggcctgagcgagaacgacgagtggacccaggacagagccaagcccgtgacccagatcgtgtctgccgaagcctggggcagagccgattgcgacgtgaagctggtggaaaagagcttcgagacagacaccaacctgaacttccagaacctgagcgtgatcggcttcagaatcctgctgctgaaagtggccggctttaacctgctgatgaccctgcggctgtggtccagcagggccaagcgatctggatctggagcaacaaacttctcactactcaaacaagcaggtgacgtggaggagaatcccgggcctactagtatggactggatttggcgcatccttttccttgtcggcgctgctaccggcgcgcattccttcgaagaagtgcagctggttgaatcaggcggaggactggttcagcctggcggatctctgagactgtcttgtgccgccagcggctacaccttcaccagctactggatgaactgggtccgacaggcccctggcaaaggactggaatgggtcggaatgatcgaccccagcgacagcgagacacactacaaccacatcttcaaggaccgcttcaccatcagcgccgacaccagcaagaataccgcctacctccagatgaactccctgagagccgaggacaccgccgtgtactactgcgccagaaacctgtatctgttcggccagggaaccctggtcacagtgtcatctacgcgtatccagaaccctgatcctgccgtgtaccagctgcgggatagcaagagcagcgacaagagcgtgtgtctgttcaccgacttcgacagccagaccaacgtgtcccagagcaaggactccgacgtgtacatcaccgataagtgcgtgctggacatgcggagcatggacttcaagagcaactccgccgtggcctggtccaacaagtccgatttcgcctgcgccaacgccttcaacaacagcattatccccgaggacacattcttcccaagccccgagagcagctgcggctttaccagcgagagctaccagcagggcgtgctgagcgccaccatcctgtacgagatcctgctgggcaaggccaccctgtacgccgtgctggtgtctgccctggtgctgatggctatggtcaagcggaaggacagccggggataa

SEQ ID NO: 37042 - DNA, 1860 bp, synthetic construct
  source 1..1860: mol_type = other DNA
atggccttaccagtgaccgccttgctcctgccgctggccttgctgctccacgccgccaggccggacatccagatgacacagagccctagcagcctgtctgccagcgtgggagacagagtgaccatcacatgcaagagcagccagagcctgctggactccgatggcaagacctacctgaactggtatcagcagaagcccggcaaggcccctaagctgctgatctacctggtgtccaagctggatagcggcgtgcccagcagattttctggcagcggcagcggaaccgacttcaccctgacaatatccagcctccagcctgaggacttcgccacctactactgcttccaaggcacccactttccatacaccttcggccagggcaccaaggtggaaatcaaaagactcgaggacctgaagaacgtgttcccacctgaggtggccgtgttcgagcctagcgaggccgagatcagccacacccagaaagccaccctcgtgtgcctggctaccggcttctaccccgaccatgtggaactgtcttggtgggtcaacggcaaagaggtgcacagcggcgtgtgtaccgacccccagccactgaaagaacagcccgccctgaacgacagccggtactgcctgagcagcagactgagagtgtccgccaccttctggcagaacccccggaaccacttcagatgccaggtgcagttctacggcctgagcgagaacgacgagtggacccaggacagagccaagcccgtgacccagatcgtgtctgccgaagcctggggcagagccgattgcggctttaccagcgagagctaccagcagggcgtgctgagcgccaccaacctgagcgtgatcggcttcagaatcctgctgctgaaagtggccggctttaacctgctgatgaccctgcggctgtggtccagcagggccaagcgatctggatctggagcaacaaacttctcactactcaaacaagcaggtgacgtggaggagaatcccgggcctactagtatggactggatttggcgcatccttttccttgtcggcgctgctaccggcgcgcattccttcgaagaagtgcagctggttgaatcaggcggaggactggttcagcctggcggatctctgagactgtcttgtgccgccagcggctacaccttcaccagctactggatgaactgggtccgacaggcccctggcaaaggactggaatgggtcggaatgatcgaccccagcgacagcgagacacactacaaccacatcttcaaggaccgcttcaccatcagcgccgacaccagcaagaataccgcctacctccagatgaactccctgagagccgaggacaccgccgtgtactactgcgccagaaacctgtatctgttcggccagggaaccctggtcacagtgtcatctacgcgtatccagaaccctgatcctgccgtgtaccagctgcgggatagcaagagcagcgacaagagcgtgtgtctgttcaccgacttcgacagccagaccaacgtgtcccagagcaaggactccgacgtgtacatcaccgataagtgcgtgctggacatgcggagcatggacttcaagagcaactccgccgtggcctggtccaacaagtccgatttcgcctgcgccaacgccttcaacaacagcattatccccgaggacacattcttcccaagccccgagagcagctgcgacgtgaagctggtggaaaagagcttcgagacagacaccaacctgaacttccagatcctgtacgagatcctgctgggcaaggccaccctgtacgccgtgctggtgtctgccctggtgctgatggctatggtcaagcggaaggacagccggggataa

SEQ ID NO: 37043 - DNA, 1860 bp, synthetic construct; identical to SEQ ID NO: 37041
  source 1..1860: mol_type = other DNA

SEQ ID NO: 37044 - DNA, 1860 bp, synthetic construct; identical to SEQ ID NO: 37042
  source 1..1860: mol_type = other DNA

SEQ ID NO: 37045 - DNA, 1857 bp, synthetic construct
  source 1..1857: mol_type = other DNA
atggccttaccagtgaccgccttgctcctgccgctggccttgctgctccacgccgccaggccggacatccagatgacacagagccctagcagcctgtctgccagcgtgggagacagagtgaccatcacatgcaagagcagccagagcctgctggactccgatggcaagacctacctgaactggtatcagcagaagcccggcaaggcccctaagctgctgatctacctggtgtccaagctggatagcggcgtgcccagcagattttctggcagcggcagcggaaccgacttcaccctgacaatatccagcctccagcctgaggacttcgccacctactactgcttccaaggcacccactttccatacaccttcggccagggcaccaaggtggaaatcaaaagactcgaggacctgaagaacgtgttcccacctgaggtggccgtgttcgagcctagcgaggccgagatcagccacacccagaaagccaccctcgtgtgcctggctaccggcttctaccccgaccatgtggaactgtcttggtgggtcaacggcaaagaggtgcacagcggcgtgtgtaccgacccccagccactgaaagaacagcccgccctgaacgacagccggtactgcctgagcagcagactgagagtgtccgccaccttctggcagaacccccggaaccacttcagatgccaggtgcagttctacggcctgagcgagaacgacgagtggacccaggacagagccaagcccgtgacccagatcgtgtctgccgaagcctggggcagagccgattgcgacgtgaagctggtggaaaagagcttcgagacagacaccaacctgaacttccagaacctgagcgtgatcggcttcagaatcctgctgctgaaagtggccggctttaacctgctgatgaccctgcggctgtggtccagcagggccaagcgatctggatctggagcaacaaacttctcactactcaaacaagcaggtgacgtggaggagaatcccgggcctactagtatggactggatttggcgcatccttttccttgtcggcgctgctaccggcgcgcattccttcgaagaagtgcagctggttgaatcaggcggaggactggttcagcctggcggatctctgagactgtcttgtgccgccagcggctacaccttcaccagctactggatgaactgggtccgacaggcccctggcaaaggactggaatgggtcggaatgatcgaccccagcgacagcgagacacactacaaccacatcttcaaggaccgcttcaccatcagcgccgacaccagcaagaataccgcctacctccagatgaactccctgagagccgaggacaccgccgtgtactactgcgccagaaacctgtatctgttcggccagggaaccctggtcacagtgtcatctacgcgtatccagaaccctgatcctgccgtgtaccagctgcgggatagcaagagcagcgacaagagcgtgtgtctgttcaccgacttcgacagccagaccaacgtgtcccagagcaaggactccgacgtgtacatcaccgataagtgcgtgctggacatgcggagcatggacttcaagagcaactccgccgtggcctggtccaacaagtccgatttcgcctgcgccaacgccttcaacaacagcattatccccgaggacacattcttcccaagccccgagagcagctgcggctttaccagcgagagctaccagcagggcgtgctgagcgccaccatcctgtacgagatcctgctgggcaaggccaccctgtacgccgtgctggtgtctgccctggtgctgatggctatggtcaagcggaaggacagccgggga

SEQ ID NO: 37046 - DNA, 1869 bp, synthetic construct
  source 1..1869: mol_type = other DNA
atggccttaccagtgaccgccttgctcctgccgctggccttgctgctccacgccgccaggccggacatccagatgacacagagccctagcagcctgtctgccagcgtgggagacagagtgaccatcacatgcaagagcagccagagcctgctggactccgatggcaagacctacctgaactggtatcagcagaagcccggcaaggcccctaagctgctgatctacctggtgtccaagctggatagcggcgtgcccagcagattttctggcagcggcagcggaaccgacttcaccctgacaatatccagcctccagcctgaggacttcgccacctactactgcttccaaggcacccactttccatacaccttcggccagggcaccaaggtggaaatcaaaagactcgaggccgacgtgtcccccaagcctaccatcttcctgccctctatcgccgagacaaagctccagaaggccggcacctacctgtgcctgctggaaaagttcttcccagatgtgattaagatccactggcaggaaaagaagtccaacaccatcctgggcagccaggaaggcaacaccatgaagaccaacgacacctacatgaagttcagctggctgaccgtgcccgagaagtccctggacaaagaacacagatgcatcgtgcggcacgaaaacaacaagaacggcgtggaccaggaaatcatcttcccacccatcaagaccgatgtgattacaatggaccccaaggacaactgctccaaggacgccaacgataccctgctgctccagctgaccaacaccagcgcctactacatgtacttgttgctgctgctgaagtccgtggtgtacttcgccatcatcacatgctgcctgctgcggagaaccgccttctgctgcaacggcgagaagtctagggccaagcgatctggatctggagcaacaaacttctcactactcaaacaagcaggtgacgtggaggagaatcccgggcctactagtatggactggatttggcgcatccttttccttgtcggcgctgctaccggcgcgcattccttcgaagaagtgcagctggttgaatcaggcggaggactggttcagcctggcggatctctgagactgtcttgtgccgccagcggctacaccttcaccagctactggatgaactgggtccgacaggcccctggcaaaggactggaatgggtcggaatgatcgaccccagcgacagcgagacacactacaaccacatcttcaaggaccgcttcaccatcagcgccgacaccagcaagaataccgcctacctccagatgaactccctgagagccgaggacaccgccgtgtactactgcgccagaaacctgtatctgttcggccagggaaccctggtcacagtgtcatctacgcgtagccagcctcacaccaagcccagcgtgttcgtgatgaagaacggcaccaacgtggcctgcctcgtgaaagagttctaccccaaggacatcaggatcaacctggtgtccagcaagaagatcaccgagttcgaccccgccatcgtgatctcccccagcggcaagtacaacgccgtgaagctggggaagtatgaggacagcaacagcgtgacctgctccgtgcagcacgacaacaagaccgtgcacagcaccgactttgaagtgaaaaccgactccaccgaccacgtgaagcccaaagagacagagaacaccaagcagcccagcaagagctgccacaagcccaaggccatcgtgcacaccgagaaagtgaacatgatgagcctgaccgtgatcggcttcagaatcctgctgctgaaagtggccggctttaacctgctgatgaccctgcggctgtggtccagctaa

SEQ ID NO: 37047 - DNA, 1869 bp, synthetic construct
  source 1..1869: mol_type = other DNA
atggccttaccagtgaccgccttgctcctgccgctggccttgctgctccacgccgccaggccggacatccagatgacacagagccctagcagcctgtctgccagcgtgggagacagagtgaccatcacatgcaagagcagccagagcctgctggactccgatggcaagacctacctgaactggtatcagcagaagcccggcaaggcccctaagctgctgatctacctggtgtccaagctggatagcggcgtgcccagcagattttctggcagcggcagcggaaccgacttcaccctgacaatatccagcctccagcctgaggacttcgccacctactactgcttccaaggcacccactttccatacaccttcggccagggcaccaaggtggaaatcaaaagactcgaggccgacgtgtcccccaagcctaccatcttcctgccctctatcgccgagacaaagctccagaaggccggcacctacctgtgcctgctggaaaagttcttcccagatgtgattaagatccactggcaggaaaagaagtccaacaccatcctgggcagccaggaaggcaacaccatgaagaccaacgacacctacatgaagttcagctggctgaccgtgcccgagaagtccctggacaaagaacacagatgcatcgtgcggcacgaaaacaacaagaacggcgtggaccaggaaatcatcttcccacccatcaagaccgatgtgattacaatggaccccaaggacaactgctccaaggacgccaacgataccctgctgctccagctgaccaacaccagcgcctactacatgtacttgttgctgctgctgaagtccgtggtgtacttcgccatcatcacatgctgcctgctgcggagaaccgccttctgctgcaacggcgagaagtctagggccaagcgatctggatctggagcaacaaacttctcactactcaaacaagcaggtgacgtggaggagaatcccgggcctactagtatggactggatttggcgcatccttttccttgtcggcgctgctaccggcgcgcattccttcgaagaagtgcagctggttgaatcaggcggaggactggttcagcctggcggatctctgagactgtcttgtgccgccagcggctacaccttcaccagctactggatgaactgggtccgacaggcccctggcaaaggactggaatgggtcggaatgatcgaccccagcgacagcgagacacactacaaccacatcttcaaggaccgcttcaccatcagcgccgacaccagcaagaataccgcctacctccagatgaactccctgagagccgaggacaccgccgtgtactactgcgccagaaacctgtatctgttcggccagggaaccctggtcacagtgtcatctacgcgtagccagcctcacaccaagcccagcgtgttcgtgatgaagaacggcaccaacgtggcctgcctcgtgaaagagttctaccccaaggacatcaggatcaacctggtgtccagcaagaagatcaccgagttcgaccccgccatcgtgatctcccccagcggcaagtacaacgccgtgaagctggggaagtacgaggacagcaacagcgtgacctgctccgtgcagcacgacaacaagaccgtgcacagcaccgactttgaagtgaaaaccgactccaccgaccacgtgaagcccaaagagacagagaacaccaagcagcccagcaagagctgccacaagcccaaggccatcgtgcacaccgagaaagtgaacatgatgagcctgaccgtgctgggcttcagaatcctgctgctgaaagtggccggctttaacctgctgatgaccctgcggctgtggtccagctaa

SEQ ID NO: 37048 - DNA, 1857 bp, synthetic construct; identical to SEQ ID NO: 37045
  source 1..1857: mol_type = other DNA

SEQ ID NO: 37049 - DNA, 1869 bp, synthetic construct
  source 1..1869: mol_type = other DNA
atggccttaccagtgaccgccttgctcctgccgctggccttgctgctccacgccgccaggccggacatccagatgacacagagccctagcagcctgtctgccagcgtgggagacagagtgaccatcacatgcaagagcagccagagcctgctggactccgatggcaagacctacctgaactggtatcagcagaagcccggcaaggcccctaagctgctgatctacctggtgtccaagctggatagcggcgtgcccagcagattttctggcagcggcagcggaaccgacttcaccctgacaatatccagcctccagcctgaggacttcgccacctactactgcttccaaggcacccactttccatacaccttcggccagggcaccaaggtggaaatcaaaagactcgagatccagaaccctgatcctgccgtgtaccagctgcgggatagcaagagcagcgacaagagcgtgtgtctgttcaccgacttcgacagccagaccaacgtgtcccagagcaaggactccgacgtgtacatcaccgataagtgcgtgctggacatgcggagcatggacttcaagagcaactccgccgtggcctggtccaacaagtccgatttcgcctgcgccaacgccttcaacaacagcattatccccgaggacacattcttcccaagccccgagagcagctgcggctttaccagcgagagctaccagcagggcgtgctgagcgccaccatcctgtacgagatcctgctgggcaaggccaccctgtacgccgtgctggtgtctgccctggtgctgatggctatggtcaagcggaaggacagccggggacgcgccaagagaagcggatctggcgtgaagcagaccctgaatttcgacctgctgaagctggctggcgacgtggaatccaacccaggccctactagtatggactggatttggcgcatccttttccttgtcggcgctgctaccggcgcgcattccttcgaagaagtgcagctggttgaatcaggcggaggactggttcagcctggcggatctctgagactgtcttgtgccgccagcggctacaccttcaccagctactggatgaactgggtccgacaggcccctggcaaaggactggaatgggtcggaatgatcgaccccagcgacagcgagacacactacaaccacatcttcaaggaccgcttcaccatcagcgccgacaccagcaagaataccgcctacctccagatgaactccctgagagccgaggacaccgccgtgtactactgcgccagaaacctgtatctgttcggccagggaaccctggtcacagtgtcatctacgcgtgaggacctgaagaacgtgttcccacctgaggtggccgtgttcgagcctagcgaggccgagatcagccacacccagaaagccaccctcgtgtgcctggctaccggcttctaccccgaccatgtggaactgtcttggtgggtcaacggcaaagaggtgcacagcggcgtgtgtaccgacccccagccactgaaagaacagcccgccctgaacgacagccggtactgcctgagcagcagactgagagtgtccgccaccttctggcagaacccccggaaccacttcagatgccaggtgcagttctacggcctgagcgagaacgacgagtggacccaggacagagccaagcccgtgacccagatcgtgtctgccgaagcctggggcagagccgattgcgacgtgaagctggtggaaaagagcttcgagacagacaccaacctgaacttccagaacctgagcgtgatcggcttcagaatcctgctgctgaaagtggccggctttaacctgctgatgaccctgcggctgtggtccagc

SEQ ID NO: 37050 - DNA, 2262 bp, synthetic construct
  source 1..2262: mol_type = other DNA
atggccttaccagtgaccgccttgctcctgccgctggccttgctgctccacgccgccaggccggaagtgcagctggttgaatctggcggaggactggttcagcctggcggatctctgagactgtcttgtgccgccagcggcttcagcttcagcgacttttggatgagctgggtccgacaggcccctggcaaaggacttgaatgggtcgccacaatcagccaggccggcagcgagaaggactacgtggactctgtgaagggcagattcaccatcagccgggacaacgccaagaagtccctgtacctccagatgaacagcctgagagccgaggacaccgccgtgtactattgtgcctctggcgtgtacagcttcgactacagaggccagggcaccctggtcacagtctcttctggtaccggcggaggcggatctggcggcggaggtagcggtggcggaggatctgaattcgacatccagatgacacagagccctagcagcctgtctgccagcgtgggagacagagtgaccatcacatgcaagagcagccagagcctgctggactccgatggcaagacctacctgaactggtatcagcagaagcccggcaaggcccctaagctgctgatctacctggtgtccaagctggatagcggcgtgcccagcagattttctggcagcggcagcggaaccgacttcaccctgacaatatccagcctccagcctgaggacttcgccacctactactgcttccaaggcacccactttccatacaccttcggccagggcaccaaggtggaaatcaaaagactcgaggacctgaagaacgtgttcccacctgaggtggccgtgttcgagcctagcgaggccgagatcagccacacccagaaagccaccctcgtgtgcctggctaccggcttctaccccgaccatgtggaactgtcttggtgggtcaacggcaaagaggtgcacagcggcgtgtgtaccgacccccagccactgaaagaacagcccgccctgaacgacagccggtactgcctgagcagcagactgagagtgtccgccaccttctggcagaacccccggaaccacttcagatgccaggtgcagttctacggcctgagcgagaacgacgagtggacccaggacagagccaagcccgtgacccagatcgtgtctgccgaagcctggggcagagccgattgcgacgtgaagctggtggaaaagagcttcgagacagacaccaacctgaacttccagaacctgagcgtgatcggcttcagaatcctgctgctgaaagtggccggctttaacctgctgatgaccctgcggctgtggtccagcagggccaagcgatctggatctggagcaacaaacttctcactactcaaacaagcaggtgacgtggaggagaatcccgggcctactagtatggactggatttggcgcatccttttccttgtcggcgctgctaccggcgcgcattccttcgaagaagtgcagctggttgaatcaggcggaggactggttcagcctggcggatctctgagactgtcttgtgccgccagcggctacaccttcaccagctactggatgaactgggtccgacaggcccctggcaaaggactggaatgggtcggaatgatcgaccccagcgacagcgagacacactacaaccacatcttcaaggaccgcttcaccatcagcgccgacaccagcaagaataccgcctacctccagatgaactccctgagagccgaggacaccgccgtgtactactgcgccagaaacctgtatctgttcggccagggaaccctggtcacagtgtcatctacgcgtatccagaaccctgatcctgccgtgtaccagctgcgggatagcaagagcagcgacaagagcgtgtgtctgttcaccgacttcgacagccagaccaacgtgtcccagagcaaggactccgacgtgtacatcaccgataagtgcgtgctggacatgcggagcatggacttcaagagcaactccgccgtggcctggtccaacaagtccgatttcgcctgcgccaacgccttcaacaacagcattatccccgaggacacattcttcccaagccccgagagcagctgcggctttaccagcgagagctaccagcagggcgtgctgagcgccaccatcctgtacgagatcctgctgggcaaggccaccctgtacgccgtgctggtgtctgccctggtgctgatggctatggtcaagcggaaggacagccgggga

SEQ ID NO: 37051 - DNA, 2274 bp, synthetic construct
  source 1..2274: mol_type = other DNA
atggccttaccagtgaccgccttgctcctgccgctggccttgctgctccacgccgccaggccggaagtgcagctggttgaatctggcggaggactggttcagcctggcggatctctgagactgtcttgtgccgccagcggcttcagcttcagcgacttttggatgagctgggtccgacaggcccctggcaaaggacttgaatgggtcgccacaatcagccaggccggcagcgagaaggactacgtggactctgtgaagggcagattcaccatcagccgggacaacgccaagaagtccctgtacctccagatgaacagcctgagagccgaggacaccgccgtgtactattgtgcctctggcgtgtacagcttcgactacagaggccagggcaccctggtcacagtctcttctggtaccggcggaggcggatctggcggcggaggtagcggtggcggaggatctgaattcgacatccagatgacacagagccctagcagcctgtctgccagcgtgggagacagagtgaccatcacatgcaagagcagccagagcctgctggactccgatggcaagacctacctgaactggtatcagcagaagcccggcaaggcccctaagctgctgatctacctggtgtccaagctggatagcggcgtgcccagcagattttctggcagcggcagcggaaccgacttcaccctgacaatatccagcctccagcctgaggacttcgccacctactactgcttccaaggcacccactttccatacaccttcggccagggcaccaaggtggaaatcaaaagactcgagatccagaaccctgatcctgccgtgtaccagctgcgggatagcaagagcagcgacaagagcgtgtgtctgttcaccgacttcgacagccagaccaacgtgtcccagagcaaggactccgacgtgtacatcaccgataagtgcgtgctggacatgcggagcatggacttcaagagcaactccgccgtggcctggtccaacaagtccgatttcgcctgcgccaacgccttcaacaacagcattatccccgaggacacattcttcccaagccccgagagcagctgcggctttaccagcgagagctaccagcagggcgtgctgagcgccaccatcctgtacgagatcctgctgggcaaggccaccctgtacgccgtgctggtgtctgccctggtgctgatggctatggtcaagcggaaggacagccggggacgcgccaagagaagcggatctggcgtgaagcagaccctgaatttcgacctgctgaagctggctggcgacgtggaatccaacccaggccctactagtatggactggatttggcgcatccttttccttgtcggcgctgctaccggcgcgcattccttcgaagaagtgcagctggttgaatcaggcggaggactggttcagcctggcggatctctgagactgtcttgtgccgccagcggctacaccttcaccagctactggatgaactgggtccgacaggcccctggcaaaggactggaatgggtcggaatgatcgaccccagcgacagcgagacacactacaaccacatcttcaaggaccgcttcaccatcagcgccgacaccagcaagaataccgcctacctccagatgaactccctgagagccgaggacaccgccgtgtactactgcgccagaaacctgtatctgttcggccagggaaccctggtcacagtgtcatctacgcgtgaggacctgaagaacgtgttcccacctgaggtggccgtgttcgagcctagcgaggccgagatcagccacacccagaaagccaccctcgtgtgcctggctaccggcttctaccccgaccatgtggaactgtcttggtgggtcaacggcaaagaggtgcacagcggcgtgtgtaccgacccccagccactgaaagaacagcccgccctgaacgacagccggtactgcctgagcagcagactgagagtgtccgccaccttctggcagaacccccggaaccacttcagatgccaggtgcagttctacggcctgagcgagaacgacgagtggacccaggacagagccaagcccgtgacccagatcgtgtctgccgaagcctggggcagagccgattgcgacgtgaagctggtggaaaagagcttcgagacagacaccaacctgaacttccagaacctgagcgtgatcggcttcagaatcctgctgctgaaagtggccggctttaacctgctgatgaccctgcggctgtggtccagc

SEQ ID NO: 37052 - DNA, 2673 bp, synthetic construct
  source 1..2673: mol_type = other DNA
atggccttaccagtgaccgccttgctcctgccgctggccttgctgctccacgccgccaggccggaagtgcagctggttgaatctggcggaggactggttcagcctggcggatctctgagactgtcttgtgccgccagcggcttcagcttcagcgacttttggatgagctgggtccgacaggcccctggcaaaggacttgaatgggtcgccacaatcagccaggccggcagcgagaaggactacgtggactctgtgaagggcagattcaccatcagccgggacaacgccaagaagtccctgtacctccagatgaacagcctgagagccgaggacaccgccgtgtactattgtgcctctggcgtgtacagcttcgactacagaggccagggcaccctggtcacagtctcttctggtaccggcggaggcggatctggcggcggaggtagcggtggcggaggatctgaattcgacatccagatgacacagagccctagcagcctgtctgccagcgtgggagacagagtgaccatcacatgcaagagcagccagagcctgctggactccgatggcaagacctacctgaactggtatcagcagaagcccggcaaggcccctaagctgctgatctacctggtgtccaagctggatagcggcgtgcccagcagattttctggcagcggcagcggaaccgacttcaccctgacaatatccagcctccagcctgaggacttcgccacctactactgcttccaaggcacccactttccatacaccttcggccagggcaccaaggtggaaatcaaaagactcgaggacctgaagaacgtgttcccacctgaggtggccgtgttcgagcctagcgaggccgagatcagccacacccagaaagccaccctcgtgtgcctggctaccggcttctaccccgaccatgtggaactgtcttggtgggtcaacggcaaagaggtgcacagcggcgtgtgtaccgacccccagccactgaaagaacagcccgccctgaacgacagccggtactgcctgagcagcagactgagagtgtccgccaccttctggcagaacccccggaaccacttcagatgccaggtgcagttctacggcctgagcgagaacgacgagtggacccaggacagagccaagcccgtgacccagatcgtgtctgccgaagcctggggcagagccgattgcgacgtgaagctggtggaaaagagcttcgagacagacaccaacctgaacttccagaacctgagcgtgatcggcttcagaatcctgctgctgaaagtggccggctttaacctgctgatgaccctgcggctgtggtccagcagggccaagcgatctggatctggagcaacaaacttctcactactcaaacaagcaggtgacgtggaggagaatcccgggcctactagtatggactggatttggcgcatccttttccttgtcggcgctgctaccggcgcgcattccgggccccagctccagctgcaagagtctggacctggcctggtcaagcctagcgagacactgagcctgacctgtaccgtgtccggcgatagcatcagcagcggcgattactactggggctggatcagacagcctcctggcaaaggactggaatggatcggccacatctactacagcggcgtgacctactacaaccccagcctgaagtccagagtgaccatcagcgtggacaccagccggaaccagttctccctgaagctgtctagcgtgacagccgccgataccgccgtgtactactgcaccagagaggacagcagcaactggcggagtagaggccagggaacactggtcacagttagctctggatccggcggaggcggaagtggaggcggaggatctggcggcggaggctctttcgaagaagtgcagctggttgaatcaggcggaggactggttcagcctggcggatctctgagactgtcttgtgccgccagcggctacaccttcaccagctactggatgaactgggtccgacaggcccctggcaaaggactggaatgggtcggaatgatcgaccccagcgacagcgagacacactacaaccacatcttcaaggaccgcttcaccatcagcgccgacaccagcaagaataccgcctacctccagatgaactccctgagagccgaggacaccgccgtgtactactgcgccagaaacctgtatctgttcggccagggaaccctggtcacagtgtcatctacgcgtatccagaaccctgatcctgccgtgtaccagctgcgggatagcaagagcagcgacaagagcgtgtgtctgttcaccgacttcgacagccagaccaacgtgtcccagagcaaggactccgacgtgtacatcaccgataagtgcgtgctggacatgcggagcatggacttcaagagcaactccgccgtggcctggtccaacaagtccgatttcgcctgcgccaacgccttcaacaacagcattatccccgaggacacattcttcccaagccccgagagcagctgcggctttaccagcgagagctaccagcagggcgtgctgagcgccaccatcctgtacgagatcctgctgggcaaggccaccctgtacgccgtgctggtgtctgccctggtgctgatggctatggtcaagcggaaggacagccgggga

SEQ ID NO: 37053 - DNA, 2685 bp, synthetic construct
  source 1..2685: mol_type = other DNA
atggccttaccagtgaccgccttgctcctgccgctggccttgctgctccacgccgccaggccggaagtgcagctggttgaatctggcggaggactggttcagcctggcggatctctgagactgtcttgtgccgccagcggcttcagcttcagcgacttttggatgagctgggtccgacaggcccctggcaaaggacttgaatgggtcgccacaatcagccaggccggcagcgagaaggactacgtggactctgtgaagggcagattcaccatcagccgggacaacgccaagaagtccctgtacctccagatgaacagcctgagagccgaggacaccgccgtgtactattgtgcctctggcgtgtacagcttcgactacagaggccagggcaccctggtcacagtctcttctggtaccggcggaggcggatctggcggcggaggtagcggtggcggaggatctgaattcgacatccagatgacacagagccctagcagcctgtctgccagcgtgggagacagagtgaccatcacatgcaagagcagccagagcctgctggactccgatggcaagacctacctgaactggtatcagcagaagcccggcaaggcccctaagctgctgatctacctggtgtccaagctggatagcggcgtgcccagcagattttctggcagcggcagcggaaccgacttcaccctgacaatatccagcctccagcctgaggacttcgccacctactactgcttccaaggcacccactttccatacaccttcggccagggcaccaaggtggaaatcaaaagactcgagatccagaaccctgatcctgccgtgtaccagctgcgggatagcaagagcagcgacaagagcgtgtgtctgttcaccgacttcgacagccagaccaacgtgtcccagagcaaggactccgacgtgtacatcaccgataagtgcgtgctggacatgcggagcatggacttcaagagcaactccgccgtggcctggtccaacaagtccgatttcgcctgcgccaacgccttcaacaacagcattatccccgaggacacattcttcccaagccccgagagcagctgcggctttaccagcgagagctaccagcagggcgtgctgagcgccaccatcctgtacgagatcctgctgggcaaggccaccctgtacgccgtgctggtgtctgccctggtgctgatggctatggtcaagcggaaggacagccggggacgcgccaagagaagcggatctggcgtgaagcagaccctgaatttcgacctgctgaagctggctggcgacgtggaatccaacccaggccctactagtatggactggatttggcgcatccttttccttgtcggcgctgctaccggcgcgcattccgggccccagctccagctgcaagagtctggacctggcctggtcaagcctagcgagacactgagcctgacctgtaccgtgtccggcgatagcatcagcagcggcgattactactggggctggatcagacagcctcctggcaaaggactggaatggatcggccacatctactacagcggcgtgacctactacaaccccagcctgaagtccagagtgaccatcagcgtggacaccagccggaaccagttctccctgaagctgtctagcgtgacagccgccgataccgccgtgtactactgcaccagagaggacagcagcaactggcggagtagaggccagggaacactggtcacagttagctctggatccggcggaggcggaagtggaggcggaggatctggcggcggaggctctttcgaagaagtgcagctggttgaatcaggcggaggactggttcagcctggcggatctctgagactgtcttgtgccgccagcggctacaccttcaccagctactggatgaactgggtccgacaggcccctggcaaaggactggaatgggtcggaatgatcgaccccagcgacagcgagacacactacaaccacatcttcaaggaccgcttcaccatcagcgccgacaccagcaagaataccgcctacctccagatgaactccctgagagccgaggacaccgccgtgtactactgcgccagaaacctgtatctgttcggccagggaaccctggtcacagtgtcatctacgcgtgaggacctgaagaacgtgttcccacctgaggtggccgtgttcgagcctagcgaggccgagatcagccacacccagaaagccaccctcgtgtgcctggctaccggcttctaccccgaccatgtggaactgtcttggtgggtcaacggcaaagaggtgcacagcggcgtgtgtaccgacccccagccactgaaagaacagcccgccctgaacgacagccggtactgcctgagcagcagactgagagtgtccgccaccttctggcagaacccccggaaccacttcagatgccaggtgcagttctacggcctgagcgagaacgacgagtggacccaggacagagccaagcccgtgacccagatcgtgtctgccgaagcctggggcagagccgattgcgacgtgaagctggtggaaaagagcttcgagacagacaccaacctgaacttccagaacctgagcgtgatcggcttcagaatcctgctgctgaaagtggccggctttaacctgctgatgaccctgcggctgtggtccagc

SEQ ID NO: 37054 - DNA, 2067 bp, synthetic construct
  source 1..2067: mol_type = other DNA
atggccttaccagtgaccgccttgctcctgccgctggccttgctgctccacgccgccaggccggacatccagatgacacagagccctagcagcctgtctgccagcgtgggagacagagtgaccatcacatgcaagagcagccagagcctgctggactccgatggcaagacctacctgaactggtatcagcagaagcccggcaaggcccctaagctgctgatctacctggtgtccaagctggatagcggcgtgcccagcagattttctggcagcggcagcggaaccgacttcaccctgacaatatccagcctccagcctgaggacttcgccacctactactgcttccaaggcacccactttccatacaccttcggccagggcaccaaggtggaaatcaaaagactcgaggacctgaagaacgtgttcccacctgaggtggccgtgttcgagcctagcgaggccgagatcagccacacccagaaagccaccctcgtgtgcctggctaccggcttctaccccgaccatgtggaactgtcttggtgggtcaacggcaaagaggtgcacagcggcgtgtgtaccgacccccagccactgaaagaacagcccgccctgaacgacagccggtactgcctgagcagcagactgagagtgtccgccaccttctggcagaacccccggaaccacttcagatgccaggtgcagttctacggcctgagcgagaacgacgagtggacccaggacagagccaagcccgtgacccagatcgtgtctgccgaagcctggggcagagccgattgcgacgtgaagctggtggaaaagagcttcgagacagacaccaacctgaacttccagaacctgagcgtgatcggcttcagaatcctgctgctgaaagtggccggctttaacctgctgatgaccctgcggctgtggtccagcagggccaagcgatctggatctggagcaacaaacttctcactactcaaacaagcaggtgacgtggaggagaatcccgggcctactagtatggactggatttggcgcatccttttccttgtcggcgctgctaccggcgcccattccgggcccatggaccccgacctggaaatcagagccgccttcctgcggcagagaaacacagccctgagaacagaggtggccgagctggaacaagaggtgcagcggctggaaaacgaggtgtcccagtacgagacaagatacggccctctcggaggcggaaaaggatccggcggcggaggatctggcggaggcggatctgggggcggaggctctttcgaagaagtgcagctggttgaatcaggcggaggactggttcagcctggcggatctctgagactgtcttgtgccgccagcggctacaccttcaccagctactggatgaactgggtccgacaggcccctggcaaaggactggaatgggtcggaatgatcgaccccagcgacagcgagacacactacaaccacatcttcaaggaccgcttcaccatcagcgccgacaccagcaagaataccgcctacctccagatgaactccctgagagccgaggacaccgccgtgtactactgcgccagaaacctgtatctgttcggccagggaaccctggtcacagtgtcatctacgcgtatccagaaccctgatcctgccgtgtaccagctgcgggatagcaagagcagcgacaagagcgtgtgtctgttcaccgacttcgacagccagaccaacgtgtcccagagcaaggactccgacgtgtacatcaccgataagtgcgtgctggacatgcggagcatggacttcaagagcaactccgccgtggcctggtccaacaagtccgatttcgcctgcgccaacgccttcaacaacagcattatccccgaggacacattcttcccaagccccgagagcagctgcggctttaccagcgagagctaccagcagggcgtgctgagcgccaccatcctgtacgagatcctgctgggcaaggccaccctgtacgccgtgctggtgtctgccctggtgctgatggctatggtcaagcggaaggacagccgggga

SEQ ID NO: 37055 - DNA, 2079 bp, synthetic construct
  source 1..2079: mol_type = other DNA
atggccttaccagtgaccgccttgctcctgccgctggccttgctgctccacgccgccaggccggacatccagatgacacagagccctagcagcctgtctgccagcgtgggagacagagtgaccatcacatgcaagagcagccagagcctgctggactccgatggcaagacctacctgaactggtatcagcagaagcccggcaaggcccctaagctgctgatctacctggtgtccaagctggatagcggcgtgcccagcagattttctggcagcggcagcggaaccgacttcaccctgacaatatccagcctccagcctgaggacttcgccacctactactgcttccaaggcacccactttccatacaccttcggccagggcaccaaggtggaaatcaaaagactcgagatccagaaccctgatcctgccgtgtaccagctgcgggatagcaagagcagcgacaagagcgtgtgtctgttcaccgacttcgacagccagaccaacgtgtcccagagcaaggactccgacgtgtacatcaccgataagtgcgtgctggacatgcggagcatggacttcaagagcaactccgccgtggcctggtccaacaagtccgatttcgcctgcgccaacgccttcaacaacagcattatccccgaggacacattcttcccaagccccgagagcagctgcggctttaccagcgagagctaccagcagggcgtgctgagcgccaccatcctgtacgagatcctgctgggcaaggccaccctgtacgccgtgctggtgtctgccctggtgctgatggctatggtcaagcggaaggacagccggggacgcgccaagagaagcggatctggcgtgaagcagaccctgaatttcgacctgctgaagctggctggcgacgtggaatccaacccaggccctactagtatggactggatttggcgcatccttttccttgtcggcgctgctaccggcgcccattccgggcccatggaccccgacctggaaatcagagccgccttcctgcggcagagaaacacagccctgagaacagaggtggccgagctggaacaagaggtgcagcggctggaaaacgaggtgtcccagtacgagacaagatacggccctctcggaggcggaaaaggatccggcggcggaggatctggcggaggcggatctgggggcggaggctctttcgaagaagtgcagctggttgaatcaggcggaggactggttcagcctggcggatctctgagactgtcttgtgccgccagcggctacaccttcaccagctactggatgaactgggtccgacaggcccctggcaaaggactggaatgggtcggaatgatcgaccccagcgacagcgagacacactacaaccacatcttcaaggaccgcttcaccatcagcgccgacaccagcaagaataccgcctacctccagatgaactccctgagagccgaggacaccgccgtgtactactgcgccagaaacctgtatctgttcggccagggaaccctggtcacagtgtcatctacgcgtgaggacctgaagaacgtgttcccacctgaggtggccgtgttcgagcctagcgaggccgagatcagccacacccagaaagccaccctcgtgtgcctggctaccggcttctaccccgaccatgtggaactgtcttggtgggtcaacggcaaagaggtgcacagcggcgtgtgtaccgacccccagccactgaaagaacagcccgccctgaacgacagccggtactgcctgagcagcagactgagagtgtccgccaccttctggcagaacccccggaaccacttcagatgccaggtgcagttctacggcctgagcgagaacgacgagtggacccaggacagagccaagcccgtgacccagatcgtgtctgccgaagcctggggcagagccgattgcgacgtgaagctggtggaaaagagcttcgagacagacaccaacctgaacttccagaacctgagcgtgatcggcttcagaatcctgctgctgaaagtggccggctttaacctgctgatgaccctgcggctgtggtccagc

SEQ ID NO: 37056 - DNA, 1998 bp, synthetic construct
  source 1..1998: mol_type = other DNA
atggccttaccagtgaccgccttgctcctgccgctggccttgctgctccacgccgccaggccggacatccagatgacacagagccctagcagcctgtctgccagcgtgggagacagagtgaccatcacatgcaagagcagccagagcctgctggactccgatggcaagacctacctgaactggtatcagcagaagcccggcaaggcccctaagctgctgatctacctggtgtccaagctggatagcggcgtgcccagcagattttctggcagcggcagcggaaccgacttcaccctgacaatatccagcctccagcctgaggacttcgccacctactactgcttccaaggcacccactttccatacaccttcggccagggcaccaaggtggaaatcaaaagactcgaggacctgaagaacgtgttcccacctgaggtggccgtgttcgagcctagcgaggccgagatcagccacacccagaaagccaccctcgtgtgcctggctaccggcttctaccccgaccatgtggaactgtcttggtgggtcaacggcaaagaggtgcacagcggcgtgtgtaccgacccccagccactgaaagaacagcccgccctgaacgacagccggtactgcctgagcagcagactgagagtgtccgccaccttctggcagaacccccggaaccacttcagatgccaggtgcagttctacggcctgagcgagaacgacgagtggacccaggacagagccaagcccgtgacccagatcgtgtctgccgaagcctggggcagagccgattgcgacgtgaagctggtggaaaagagcttcgagacagacaccaacctgaacttccagaacctgagcgtgatcggcttcagaatcctgctgctgaaagtggccggctttaacctgctgatgaccctgcggctgtggtccagcagggccaagcgatctggatctggagcaacaaacttctcactactcaaacaagcaggtgacgtggaggagaatcccgggcctactagtatggactggatttggcgcatccttttccttgtcggcgctgctaccggcgcccattccgggcccgaagttgctgccctcgagaaggaggtagcagctttggaaaaagaagtcgcagcccttgagaaagaagttgcggctctggagaagggatccggcggcggaggatctggcggaggcggatctgggggcggaggctctttcgaagaagtgcagctggttgaatcaggcggaggactggttcagcctggcggatctctgagactgtcttgtgccgccagcggctacaccttcaccagctactggatgaactgggtccgacaggcccctggcaaaggactggaatgggtcggaatgatcgaccccagcgacagcgagacacactacaaccacatcttcaaggaccgcttcaccatcagcgccgacaccagcaagaataccgcctacctccagatgaactccctgagagccgaggacaccgccgtgtactactgcgccagaaacctgtatctgttcggccagggaaccctggtcacagtgtcatctacgcgtatccagaaccctgatcctgccgtgtaccagctgcgggatagcaagagcagcgacaagagcgtgtgtctgttcaccgacttcgacagccagaccaacgtgtcccagagcaaggactccgacgtgtacatcaccgataagtgcgtgctggacatgcggagcatggacttcaagagcaactccgccgtggcctggtccaacaagtccgatttcgcctgcgccaacgccttcaacaacagcattatccccgaggacacattcttcccaagccccgagagcagctgcggctttaccagcgagagctaccagcagggcgtgctgagcgccaccatcctgtacgagatcctgctgggcaaggccaccctgtacgccgtgctggtgtctgccctggtgctgatggctatggtcaagcggaaggacagccgggga

SEQ ID NO: 37057 - DNA, 2010 bp, synthetic construct
  source 1..2010: mol_type = other DNA
atggccttaccagtgaccgccttgctcctgccgctggccttgctgctccacgccgccaggccggacatccagatgacacagagccctagcagcctgtctgccagcgtgggagacagagtgaccatcacatgcaagagcagccagagcctgctggactccgatggcaagacctacctgaactggtatcagcagaagcccggcaaggcccctaagctgctgatctacctggtgtccaagctggatagcggcgtgcccagcagattttctggcagcggcagcggaaccgacttcaccctgacaatatccagcctccagcctgaggacttcgccacctactactgcttccaaggcacccactttccatacaccttcggccagggcaccaaggtggaaatcaaaagactcgagatccagaaccctgatcctgccgtgtaccagctgcgggatagcaagagcagcgacaagagcgtgtgtctgttcaccgacttcgacagccagaccaacgtgtcccagagcaaggactccgacgtgtacatcaccgataagtgcgtgctggacatgcggagcatggacttcaagagcaactccgccgtggcctggtccaacaagtccgatttcgcctgcgccaacgccttcaacaacagcattatccccgaggacacattcttcccaagccccgagagcagctgcggctttaccagcgagagctaccagcagggcgtgctgagcgccaccatcctgtacgagatcctgctgggcaaggccaccctgtacgccgtgctggtgtctgccctggtgctgatggctatggtcaagcggaaggacagccggggacgcgccaagagaagcggatctggcgtgaagcagaccctgaatttcgacctgctgaagctggctggcgacgtggaatccaacccaggccctactagtatggactggatttggcgcatccttttccttgtcggcgctgctaccggcgcccattccgggcccgaagttgctgccctcgagaaggaggtagcagctttggaaaaagaagtcgcagcccttgagaaagaagttgcggctctggagaagggatccggcggcggaggatctggcggaggcggatctgggggcggaggctctttcgaagaagtgcagctggttgaatcaggcggaggactggttcagcctggcggatctctgagactgtcttgtgccgccagcggctacaccttcaccagctactggatgaactgggtccgacaggcccctggcaaaggactggaatgggtcggaatgatcgaccccagcgacagcgagacacactacaaccacatcttcaaggaccgcttcaccatcagcgccgacaccagcaagaataccgcctacctccagatgaactccctgagagccgaggacaccgccgtgtactactgcgccagaaacctgtatctgttcggccagggaaccctggtcacagtgtcatctacgcgtgaggacctgaagaacgtgttcccacctgaggtggccgtgttcgagcctagcgaggccgagatcagccacacccagaaagccaccctcgtgtgcctggctaccggcttctaccccgaccatgtggaactgtcttggtgggtcaacggcaaagaggtgcacagcggcgtgtgtaccgacccccagccactgaaagaacagcccgccctgaacgacagccggtactgcctgagcagcagactgagagtgtccgccaccttctggcagaacccccggaaccacttcagatgccaggtgcagttctacggcctgagcgagaacgacgagtggacccaggacagagccaagcccgtgacccagatcgtgtctgccgaagcctggggcagagccgattgcgacgtgaagctggtggaaaagagcttcgagacagacaccaacctgaacttccagaacctgagcgtgatcggcttcagaatcctgctgctgaaagtggccggctttaacctgctgatgaccctgcggctgtggtccagc

SEQ ID NO: 37058 - DNA, 2268 bp, synthetic construct
  source 1..2268: mol_type = other DNA
atggccttaccagtgaccgccttgctcctgccgctggccttgctgctccacgccgccaggccggacatccagatgacacagagccctagcagcctgtctgccagcgtgggagacagagtgaccatcacatgcaagagcagccagagcctgctggactccgatggcaagacctacctgaactggtatcagcagaagcccggcaaggcccctaagctgctgatctacctggtgtccaagctggatagcggcgtgcccagcagattttctggcagcggcagcggaaccgacttcaccctgacaatatccagcctccagcctgaggacttcgccacctactactgcttccaaggcacccactttccatacaccttcggccagggcaccaaggtggaaatcaaaagactcgaggacctgaagaacgtgttcccacctgaggtggccgtgttcgagcctagcgaggccgagatcagccacacccagaaagccaccctcgtgtgcctggctaccggcttctaccccgaccatgtggaactgtcttggtgggtcaacggcaaagaggtgcacagcggcgtgtgtaccgacccccagccactgaaagaacagcccgccctgaacgacagccggtactgcctgagcagcagactgagagtgtccgccaccttctggcagaacccccggaaccacttcagatgccaggtgcagttctacggcctgagcgagaacgacgagtggacccaggacagagccaagcccgtgacccagatcgtgtctgccgaagcctggggcagagccgattgcgacgtgaagctggtggaaaagagcttcgagacagacaccaacctgaacttccagaacctgagcgtgatcggcttcagaatcctgctgctgaaagtggccggctttaacctgctgatgaccctgcggctgtggtccagcagggccaagcgatctggatctggagcaacaaacttctcactactcaaacaagcaggtgacgtggaggagaatcccgggcctactagtatggactggatttggcgcatccttttccttgtcggcgctgctaccggcgcccattccgggccccaggttcagctgcaagagtctggcggaggacttgctcaagctggcggaagcctgagactgtcttgtgccgcctctggcagaaccttcagcatgggctggtttagacaggcccctggcaaagagagagagttcgtcgccgccatcacatacagcggcggcagcccttactacgcctcttctgtcagaggccggttcaccatcagccgggacaacgccaagaacaccgtgtacctccagatgaacagcctgaagccagaggacaccgccgtgtactactgtgccgccaatccaacctacggcagcgactggaatgccgagaattggggccagggcacccaagtgacagtgtctagtggatccggcggcggaggatctggcggaggcggatctgggggcggaggctctttcgaagaagtgcagctggttgaatcaggcggaggactggttcagcctggcggatctctgagactgtcttgtgccgccagcggctacaccttcaccagctactggatgaactgggtccgacaggcccctggcaaaggactggaatgggtcggaatgatcgaccccagcgacagcgagacacactacaaccacatcttcaaggaccgcttcaccatcagcgccgacaccagcaagaataccgcctacctccagatgaactccctgagagccgaggacaccgccgtgtactactgcgccagaaacctgtatctgttcggccagggaaccctggtcacagtgtcatctacgcgtatccagaaccctgatcctgccgtgtaccagctgcgggatagcaagagcagcgacaagagcgtgtgtctgttcaccgacttcgacagccagaccaacgtgtcccagagcaaggactccgacgtgtacatcaccgataagtgcgtgctggacatgcggagcatggacttcaagagcaactccgccgtggcctggtccaacaagtccgatttcgcctgcgccaacgccttcaacaacagcattatccccgaggacacattcttcccaagccccgagagcagctgcggctttaccagcgagagctaccagcagggcgtgctgagcgccaccatcctgtacgagatcctgctgggcaaggccaccctgtacgccgtgctggtgtctgccctggtgctgatggctatggtcaagcggaaggacagccgggga

SEQ ID NO: 37059 - DNA, 2280 bp, synthetic construct
  source 1..2280: mol_type = other DNA
atggccttaccagtgaccgccttgctcctgccgctggccttgctgctccacgccgccaggccggacatccagatgacacagagccctagcagcctgtctgccagcgtgggagacagagtgaccatcacatgcaagagcagccagagcctgctggactccgatggcaagacctacctgaactggtatcagcagaagcccggcaaggcccctaagctgctgatctacctggtgtccaagctggatagcggcgtgcccagcagattttctggcagcggcagcggaaccgacttcaccctgacaatatccagcctccagcctgaggacttcgccacctactactgcttccaaggcacccactttccatacaccttcggccagggcaccaaggtggaaatcaaaagactcgagatccagaaccctgatcctgccgtgtaccagctgcgggatagcaagagcagcgacaagagcgtgtgtctgttcaccgacttcgacagccagaccaacgtgtcccagagcaaggactccgacgtgtacatcaccgataagtgcgtgctggacatgcggagcatggacttcaagagcaactccgccgtggcctggtccaacaagtccgatttcgcctgcgccaacgccttcaacaacagcattatccccgaggacacattcttcccaagccccgagagcagctgcggctttaccagcgagagctaccagcagggcgtgctgagcgccaccatcctgtacgagatcctgctgggcaaggccaccctgtacgccgtgctggtgtctgccctggtgctgatggctatggtcaagcggaaggacagccggggacgcgccaagagaagcggatctggcgtgaagcagaccctgaatttcgacctgctgaagctggctggcgacgtggaatccaacccaggccctactagtatggactggatttggcgcatccttttccttgtcggcgctgctaccggcgcccattccgggccccaggttcagctgcaagagtctggcggaggacttgctcaagctggcggaagcctgagactgtcttgtgccgcctctggcagaaccttcagcatgggctggtttagacaggcccctggcaaagagagagagttcgtcgccgccatcacatacagcggcggcagcccttactacgcctcttctgtcagaggccggttcaccatcagccgggacaacgccaagaacaccgtgtacctccagatgaacagcctgaagccagaggacaccgccgtgtactactgtgccgccaatccaacctacggcagcgactggaatgccgagaattggggccagggcacccaagtgacagtgtctagtggatccggcggcggaggatctggcggaggcggatctgggggcggaggctctttcgaagaagtgcagctggttgaatcaggcggaggactggttcagcctggcggatctctgagactgtcttgtgccgccagcggctacaccttcaccagctactggatgaactgggtccgacaggcccctggcaaaggactggaatgggtcggaatgatcgaccccagcgacagcgagacacactacaaccacatcttcaaggaccgcttcaccatcagcgccgacaccagcaagaataccgcctacctccagatgaactccctgagagccgaggacaccgccgtgtactactgcgccagaaacctgtatctgttcggccagggaaccctggtcacagtgtcatctacgcgtgaggacctgaagaacgtgttcccacctgaggtggccgtgttcgagcctagcgaggccgagatcagccacacccagaaagccaccctcgtgtgcctggctaccggcttctaccccgaccatgtggaactgtcttggtgggtcaacggcaaagaggtgcacagcggcgtgtgtaccgacccccagccactgaaagaacagcccgccctgaacgacagccggtactgcctgagcagcagactgagagtgtccgccaccttctggcagaacccccggaaccacttcagatgccaggtgcagttctacggcctgagcgagaacgacgagtggacccaggacagagccaagcccgtgacccagatcgtgtctgccgaagcctggggcagagccgattgcgacgtgaagctggtggaaaagagcttcgagacagacaccaacctgaacttccagaacctgagcgtgatcggcttcagaatcctgctgctgaaagtggccggctttaacctgctgatgaccctgcggctgtggtccagc

SEQ ID NO: 37060 - DNA, 2286 bp, synthetic construct
  source 1..2286: mol_type = other DNA
atggccttaccagtgaccgccttgctcctgccgctggccttgctgctccacgccgccaggccggaagtgcaactggtggaatctggaggctctctggtgcagccagggggaagcctgagactgtcttgtgccgcttccggcttcaccttcgacgactacgccatgagctgggtgcgccaggtgccaggcaaaggcctggaatgggtgtccagcatcaactggagcggcacccacaccgattacgccgactccgtgaaaggcagattcacaatcagcagaaacaacgccaacaataccctgtacctgcagatgaactccctgaagtctgaggatacagcagtgtattattgcgccaagaactggcgggacgccggcaccacttggtttgagaaaagcggctctgccggacagggaacccaagtgacagtgtcctccggtaccggcggaggcggatctggcggcggaggtagcggtggcggaggatctgaattcgacatccagatgacacagagccctagcagcctgtctgccagcgtgggagacagagtgaccatcacatgcaagagcagccagagcctgctggactccgatggcaagacctacctgaactggtatcagcagaagcccggcaaggcccctaagctgctgatctacctggtgtccaagctggatagcggcgtgcccagcagattttctggcagcggcagcggaaccgacttcaccctgacaatatccagcctccagcctgaggacttcgccacctactactgcttccaaggcacccactttccatacaccttcggccagggcaccaaggtggaaatcaaaagactcgaggacctgaagaacgtgttcccacctgaggtggccgtgttcgagcctagcgaggccgagatcagccacacccagaaagccaccctcgtgtgcctggctaccggcttctaccccgaccatgtggaactgtcttggtgggtcaacggcaaagaggtgcacagcggcgtgtgtaccgacccccagccactgaaagaacagcccgccctgaacgacagccggtactgcctgagcagcagactgagagtgtccgccaccttctggcagaacccccggaaccacttcagatgccaggtgcagttctacggcctgagcgagaacgacgagtggacccaggacagagccaagcccgtgacccagatcgtgtctgccgaagcctggggcagagccgattgcgacgtgaagctggtggaaaagagcttcgagacagacaccaacctgaacttccagaacctgagcgtgatcggcttcagaatcctgctgctgaaagtggccggctttaacctgctgatgaccctgcggctgtggtccagcagggccaagcgatctggatctggagcaacaaacttctcactactcaaacaagcaggtgacgtggaggagaatcccgggcctactagtatggactggatttggcgcatccttttccttgtcggcgctgctaccggcgcgcattccttcgaagaagtgcagctggttgaatcaggcggaggactggttcagcctggcggatctctgagactgtcttgtgccgccagcggctacaccttcaccagctactggatgaactgggtccgacaggcccctggcaaaggactggaatgggtcggaatgatcgaccccagcgacagcgagacacactacaaccacatcttcaaggaccgcttcaccatcagcgccgacaccagcaagaataccgcctacctccagatgaactccctgagagccgaggacaccgccgtgtactactgcgccagaaacctgtatctgttcggccagggaaccctggtcacagtgtcatctacgcgtatccagaaccctgatcctgccgtgtaccagctgcgggatagcaagagcagcgacaagagcgtgtgtctgttcaccgacttcgacagccagaccaacgtgtcccagagcaaggactccgacgtgtacatcaccgataagtgcgtgctggacatgcggagcatggacttcaagagcaactccgccgtggcctggtccaacaagtccgatttcgcctgcgccaacgccttcaacaacagcattatccccgaggacacattcttcccaagccccgagagcagctgcggctttaccagcgagagctaccagcagggcgtgctgagcgccaccatcctgtacgagatcctgctgggcaaggccaccctgtacgccgtgctggtgtctgccctggtgctgatggctatggtcaagcggaaggacagccgggga

SEQ ID NO: 37061 - DNA, 2298 bp, synthetic construct
  source 1..2298: mol_type = other DNA
atggccttaccagtgaccgccttgctcctgccgctggccttgctgctccacgccgccaggccggaagtgcaactggtggaatctggaggctctctggtgcagccagggggaagcctgagactgtcttgtgccgcttccggcttcaccttcgacgactacgccatgagctgggtgcgccaggtgccaggcaaaggcctggaatgggtgtccagcatcaactggagcggcacccacaccgattacgccgactccgtgaaaggcagattcacaatcagcagaaacaacgccaacaataccctgtacctgcagatgaactccctgaagtctgaggatacagcagtgtattattgcgccaagaactggcgggacgccggcaccacttggtttgagaaaagcggctctgccggacagggaacccaagtgacagtgtcctccggtaccggcggaggcggatctggcggcggaggtagcggtggcggaggatctgaattcgacatccagatgacacagagccctagcagcctgtctgccagcgtgggagacagagtgaccatcacatgcaagagcagccagagcctgctggactccgatggcaagacctacctgaactggtatcagcagaagcccggcaaggcccctaagctgctgatctacctggtgtccaagctggatagcggcgtgcccagcagattttctggcagcggcagcggaaccgacttcaccctgacaatatccagcctccagcctgaggacttcgccacctactactgcttccaaggcacccactttccatacaccttcggccagggcaccaaggtggaaatcaaaagactcgagatccagaaccctgatcctgccgtgtaccagctgcgggatagcaagagcagcgacaagagcgtgtgtctgttcaccgacttcgacagccagaccaacgtgtcccagagcaaggactccgacgtgtacatcaccgataagtgcgtgctggacatgcggagcatggacttcaagagcaactccgccgtggcctggtccaacaagtccgatttcgcctgcgccaacgccttcaacaacagcattatccccgaggacacattcttcccaagccccgagagcagctgcggctttaccagcgagagctaccagcagggcgtgctgagcgccaccatcctgtacgagatcctgctgggcaaggccaccctgtacgccgtgctggtgtctgccctggtgctgatggctatggtcaagcggaaggacagccggggacgcgccaagagaagcggatctggcgtgaagcagaccctgaatttcgacctgctgaagctggctggcgacgtggaatccaacccaggccctactagtatggactggatttggcgcatccttttccttgtcggcgctgctaccggcgcgcattccttcgaagaagtgcagctggttgaatcaggcggaggactggttcagcctggcggatctctgagactgtcttgtgccgccagcggctacaccttcaccagctactggatgaactgggtccgacaggcccctggcaaaggactggaatgggtcggaatgatcgaccccagcgacagcgagacacactacaaccacatcttcaaggaccgcttcaccatcagcgccgacaccagcaagaataccgcctacctccagatgaactccctgagagccgaggacaccgccgtgtactactgcgccagaaacctgtatctgttcggccagggaaccctggtcacagtgtcatctacgcgtgaggacctgaagaacgtgttcccacctgaggtggccgtgttcgagcctagcgaggccgagatcagccacacccagaaagccaccctcgtgtgcctggctaccggcttctaccccgaccatgtggaactgtcttggtgggtcaacggcaaagaggtgcacagcggcgtgtgtaccgacccccagccactgaaagaacagcccgccctgaacgacagccggtactgcctgagcagcagactgagagtgtccgccaccttctggcagaacccccggaaccacttcagatgccaggtgcagttctacggcctgagcgagaacgacgagtggacccaggacagagccaagcccgtgacccagatcgtgtctgccgaagcctggggcagagccgattgcgacgtgaagctggtggaaaagagcttcgagacagacaccaacctgaacttccagaacctgagcgtgatcggcttcagaatcctgctgctgaaagtggccggctttaacctgctgatgaccctgcggctgtggtccagc

SEQ ID NO: 37062 - DNA, 2280 bp, synthetic construct
  source 1..2280: mol_type = other DNA
atggccttaccagtgaccgccttgctcctgccgctggccttgctgctccacgccgccaggccggaagttcagctgcttgagtctggcggaggactggttcaacctggcggaagcctgagactgtcttgtgccgccagcggcttcatcttcagcagctacgccatgagctgggtccgacaggctcctggaaagggccaagaatgggtttccggcgttagcggcacaggcgtgaacacctactacgccgatagcgtgaagggcagattcaccatcagccgggacaacagcaagaacaccctgtacctccagatgaacagcctgagagccgaggacaccgccgtgtactattgtgcctctggcaaaggctgggacagcggctcttggtacgaggactatagaggccagggcaccctggtcacagtttcttcaggtaccggcggaggcggatctggcggcggaggtagcggtggcggaggatctgaattcgacatccagatgacacagagccctagcagcctgtctgccagcgtgggagacagagtgaccatcacatgcaagagcagccagagcctgctggactccgatggcaagacctacctgaactggtatcagcagaagcccggcaaggcccctaagctgctgatctacctggtgtccaagctggatagcggcgtgcccagcagattttctggcagcggcagcggaaccgacttcaccctgacaatatccagcctccagcctgaggacttcgccacctactactgcttccaaggcacccactttccatacaccttcggccagggcaccaaggtggaaatcaaaagactcgaggacctgaagaacgtgttcccacctgaggtggccgtgttcgagcctagcgaggccgagatcagccacacccagaaagccaccctcgtgtgcctggctaccggcttctaccccgaccatgtggaactgtcttggtgggtcaacggcaaagaggtgcacagcggcgtgtgtaccgacccccagccactgaaagaacagcccgccctgaacgacagccggtactgcctgagcagcagactgagagtgtccgccaccttctggcagaacccccggaaccacttcagatgccaggtgcagttctacggcctgagcgagaacgacgagtggacccaggacagagccaagcccgtgacccagatcgtgtctgccgaagcctggggcagagccgattgcgacgtgaagctggtggaaaagagcttcgagacagacaccaacctgaacttccagaacctgagcgtgatcggcttcagaatcctgctgctgaaagtggccggctttaacctgctgatgaccctgcggctgtggtccagcagggccaagcgatctggatctggagcaacaaacttctcactactcaaacaagcaggtgacgtggaggagaatcccgggcctactagtatggactggatttggcgcatccttttccttgtcggcgctgctaccggcgcgcattccttcgaagaagtgcagctggttgaatcaggcggaggactggttcagcctggcggatctctgagactgtcttgtgccgccagcggctacaccttcaccagctactggatgaactgggtccgacaggcccctggcaaaggactggaatgggtcggaatgatcgaccccagcgacagcgagacacactacaaccacatcttcaaggaccgcttcaccatcagcgccgacaccagcaagaataccgcctacctccagatgaactccctgagagccgaggacaccgccgtgtactactgcgccagaaacctgtatctgttcggccagggaaccctggtcacagtgtcatctacgcgtatccagaaccctgatcctgccgtgtaccagctgcgggatagcaagagcagcgacaagagcgtgtgtctgttcaccgacttcgacagccagaccaacgtgtcccagagcaaggactccgacgtgtacatcaccgataagtgcgtgctggacatgcggagcatggacttcaagagcaactccgccgtggcctggtccaacaagtccgatttcgcctgcgccaacgccttcaacaacagcattatccccgaggacacattcttcccaagccccgagagcagctgcggctttaccagcgagagctaccagcagggcgtgctgagcgccaccatcctgtacgagatcctgctgggcaaggccaccctgtacgccgtgctggtgtctgccctggtgctgatggctatggtcaagcggaaggacagccgggga

SEQ ID NO: 37063 - DNA, 2292 bp, synthetic construct
  source 1..2292: mol_type = other DNA
atggccttaccagtgaccgccttgctcctgccgctggccttgctgctccacgccgccaggccggaagttcagctgcttgagtctggcggaggactggttcaacctggcggaagcctgagactgtcttgtgccgccagcggcttcatcttcagcagctacgccatgagctgggtccgacaggctcctggaaagggccaagaatgggtttccggcgttagcggcacaggcgtgaacacctactacgccgatagcgtgaagggcagattcaccatcagccgggacaacagcaagaacaccctgtacctccagatgaacagcctgagagccgaggacaccgccgtgtactattgtgcctctggcaaaggctgggacagcggctcttggtacgaggactatagaggccagggcaccctggtcacagtttcttcaggtaccggcggaggcggatctggcggcggaggtagcggtggcggaggatctgaattcgacatccagatgacacagagccctagcagcctgtctgccagcgtgggagacagagtgaccatcacatgcaagagcagccagagcctgctggactccgatggcaagacctacctgaactggtatcagcagaagcccggcaaggcccctaagctgctgatctacctggtgtccaagctggatagcggcgtgcccagcagattttctggcagcggcagcggaaccgacttcaccctgacaatatccagcctccagcctgaggacttcgccacctactactgcttccaaggcacccactttccatacaccttcggccagggcaccaaggtggaaatcaaaagactcgagatccagaaccctgatcctgccgtgtaccagctgcgggatagcaagagcagcgacaagagcgtgtgtctgttcaccgacttcgacagccagaccaacgtgtcccagagcaaggactccgacgtgtacatcaccgataagtgcgtgctggacatgcggagcatggacttcaagagcaactccgccgtggcctggtccaacaagtccgatttcgcctgcgccaacgccttcaacaacagcattatccccgaggacacattcttcccaagccccgagagcagctgcggctttaccagcgagagctaccagcagggcgtgctgagcgccaccatcctgtacgagatcctgctgggcaaggccaccctgtacgccgtgctggtgtctgccctggtgctgatggctatggtcaagcggaaggacagccggggacgcgccaagagaagcggatctggcgtgaagcagaccctgaatttcgacctgctgaagctggctggcgacgtggaatccaacccaggccctactagtatggactggatttggcgcatccttttccttgtcggcgctgctaccggcgcgcattccttcgaagaagtgcagctggttgaatcaggcggaggactggttcagcctggcggatctctgagactgtcttgtgccgccagcggctacaccttcaccagctactggatgaactgggtccgacaggcccctggcaaaggactggaatgggtcggaatgatcgaccccagcgacagcgagacacactacaaccacatcttcaaggaccgcttcaccatcagcgccgacaccagcaagaataccgcctacctccagatgaactccctgagagccgaggacaccgccgtgtactactgcgccagaaacctgtatctgttcggccagggaaccctggtcacagtgtcatctacgcgtgaggacctgaagaacgtgttcccacctgaggtggccgtgttcgagcctagcgaggccgagatcagccacacccagaaagccaccctcgtgtgcctggctaccggcttctaccccgaccatgtggaactgtcttggtgggtcaacggcaaagaggtgcacagcggcgtgtgtaccgacccccagccactgaaagaacagcccgccctgaacgacagccggtactgcctgagcagcagactgagagtgtccgccaccttctggcagaacccccggaaccacttcagatgccaggtgcagttctacggcctgagcgagaacgacgagtggacccaggacagagccaagcccgtgacccagatcgtgtctgccgaagcctggggcagagccgattgcgacgtgaagctggtggaaaagagcttcgagacagacaccaacctgaacttccagaacctgagcgtgatcggcttcagaatcctgctgctgaaagtggccggctttaacctgctgatgaccctgcggctgtggtccagc

SEQ ID NO: 37064 - DNA, 2184 bp, synthetic construct
  source 1..2184: mol_type = other DNA
atggccttaccagtgaccgccttgctcctgccgctggccttgctgctccacgccgccaggccgatgctgcccgctcctaagaatctggtggtgtccagaatcaccgaggacagcgccagactgtcttggacagctcctgatgccgccttcgacagcttccccatccggtacatcgagacactgatctggggcgaagccatctggctggatgtgcctggaagcgagagaagctacgacctgaccggactgaagcctggcacagagtatgccgtggtcatcaccggcgtgaaaggcggcagattctctagccctctggtggcctctttcaccaccggtaccggcggaggcggatctggcggcggaggtagcggtggcggaggatctgaattcgacatccagatgacacagagccctagcagcctgtctgccagcgtgggagacagagtgaccatcacatgcaagagcagccagagcctgctggactccgatggcaagacctacctgaactggtatcagcagaagcccggcaaggcccctaagctgctgatctacctggtgtccaagctggatagcggcgtgcccagcagattttctggcagcggcagcggaaccgacttcaccctgacaatatccagcctccagcctgaggacttcgccacctactactgcttccaaggcacccactttccatacaccttcggccagggcaccaaggtggaaatcaaaagactcgaggacctgaagaacgtgttcccacctgaggtggccgtgttcgagcctagcgaggccgagatcagccacacccagaaagccaccctcgtgtgcctggctaccggcttctaccccgaccatgtggaactgtcttggtgggtcaacggcaaagaggtgcacagcggcgtgtgtaccgacccccagccactgaaagaacagcccgccctgaacgacagccggtactgcctgagcagcagactgagagtgtccgccaccttctggcagaacccccggaaccacttcagatgccaggtgcagttctacggcctgagcgagaacgacgagtggacccaggacagagccaagcccgtgacccagatcgtgtctgccgaagcctggggcagagccgattgcgacgtgaagctggtggaaaagagcttcgagacagacaccaacctgaacttccagaacctgagcgtgatcggcttcagaatcctgctgctgaaagtggccggctttaacctgctgatgaccctgcggctgtggtccagcagggccaagcgatctggatctggagcaacaaacttctcactactcaaacaagcaggtgacgtggaggagaatcccgggcctactagtatggactggatttggcgcatccttttccttgtcggcgctgctaccggcgcgcattccttcgaagaagtgcagctggttgaatcaggcggaggactggttcagcctggcggatctctgagactgtcttgtgccgccagcggctacaccttcaccagctactggatgaactgggtccgacaggcccctggcaaaggactggaatgggtcggaatgatcgaccccagcgacagcgagacacactacaaccacatcttcaaggaccgcttcaccatcagcgccgacaccagcaagaataccgcctacctccagatgaactccctgagagccgaggacaccgccgtgtactactgcgccagaaacctgtatctgttcggccagggaaccctggtcacagtgtcatctacgcgtatccagaaccctgatcctgccgtgtaccagctgcgggatagcaagagcagcgacaagagcgtgtgtctgttcaccgacttcgacagccagaccaacgtgtcccagagcaaggactccgacgtgtacatcaccgataagtgcgtgctggacatgcggagcatggacttcaagagcaactccgccgtggcctggtccaacaagtccgatttcgcctgcgccaacgccttcaacaacagcattatccccgaggacacattcttcccaagccccgagagcagctgcggctttaccagcgagagctaccagcagggcgtgctgagcgccaccatcctgtacgagatcctgctgggcaaggccaccctgtacgccgtgctggtgtctgccctggtgctgatggctatggtcaagcggaaggacagccgggga

SEQ ID NO: 37065 - DNA, 2196 bp, synthetic construct
  source 1..2196: mol_type = other DNA
atggccttaccagtgaccgccttgctcctgccgctggccttgctgctccacgccgccaggccgatgctgcccgctcctaagaatctggtggtgtccagaatcaccgaggacagcgccagactgtcttggacagctcctgatgccgccttcgacagcttccccatccggtacatcgagacactgatctggggcgaagccatctggctggatgtgcctggaagcgagagaagctacgacctgaccggactgaagcctggcacagagtatgccgtggtcatcaccggcgtgaaaggcggcagattctctagccctctggtggcctctttcaccaccggtaccggcggaggcggatctggcggcggaggtagcggtggcggaggatctgaattcgacatccagatgacacagagccctagcagcctgtctgccagcgtgggagacagagtgaccatcacatgcaagagcagccagagcctgctggactccgatggcaagacctacctgaactggtatcagcagaagcccggcaaggcccctaagctgctgatctacctggtgtccaagctggatagcggcgtgcccagcagattttctggcagcggcagcggaaccgacttcaccctgacaatatccagcctccagcctgaggacttcgccacctactactgcttccaaggcacccactttccatacaccttcggccagggcaccaaggtggaaatcaaaagactcgagatccagaaccctgatcctgccgtgtaccagctgcgggatagcaagagcagcgacaagagcgtgtgtctgttcaccgacttcgacagccagaccaacgtgtcccagagcaaggactccgacgtgtacatcaccgataagtgcgtgctggacatgcggagcatggacttcaagagcaactccgccgtggcctggtccaacaagtccgatttcgcctgcgccaacgccttcaacaacagcattatccccgaggacacattcttcccaagccccgagagcagctgcggctttaccagcgagagctaccagcagggcgtgctgagcgccaccatcctgtacgagatcctgctgggcaaggccaccctgtacgccgtgctggtgtctgccctggtgctgatggctatggtcaagcggaaggacagccggggacgcgccaagagaagcggatctggcgtgaagcagaccctgaatttcgacctgctgaagctggctggcgacgtggaatccaacccaggccctactagtatggactggatttggcgcatccttttccttgtcggcgctgctaccggcgcgcattccttcgaagaagtgcagctggttgaatcaggcggaggactggttcagcctggcggatctctgagactgtcttgtgccgccagcggctacaccttcaccagctactggatgaactgggtccgacaggcccctggcaaaggactggaatgggtcggaatgatcgaccccagcgacagcgagacacactacaaccacatcttcaaggaccgcttcaccatcagcgccgacaccagcaagaataccgcctacctccagatgaactccctgagagccgaggacaccgccgtgtactactgcgccagaaacctgtatctgttcggccagggaaccctggtcacagtgtcatctacgcgtgaggacctgaagaacgtgttcccacctgaggtggccgtgttcgagcctagcgaggccgagatcagccacacccagaaagccaccctcgtgtgcctggctaccggcttctaccccgaccatgtggaactgtcttggtgggtcaacggcaaagaggtgcacagcggcgtgtgtaccgacccccagccactgaaagaacagcccgccctgaacgacagccggtactgcctgagcagcagactgagagtgtccgccaccttctggcagaacccccggaaccacttcagatgccaggtgcagttctacggcctgagcgagaacgacgagtggacccaggacagagccaagcccgtgacccagatcgtgtctgccgaagcctggggcagagccgattgcgacgtgaagctggtggaaaagagcttcgagacagacaccaacctgaacttccagaacctgagcgtgatcggcttcagaatcctgctgctgaaagtggccggctttaacctgctgatgaccctgcggctgtggtccagc

SEQ ID NO: 37066 - DNA, 2271 bp, synthetic construct
  source 1..2271: mol_type = other DNA
atggccttaccagtgaccgccttgctcctgccgctggccttgctgctccacgccgccaggccggaggtgcagctggttgaatctggcggaggactggttcagcctggcggatctctgagactgtcttgtgccgccagcggcttcaacatcaaggatacctgtatcggctgggttcgcagagcccctggcaaagaggaagaactggtcgccaaaatctgcaagtacagcggccacaccagatacgccgacagcgtgaagggcagattcaccatcagcgccgacaccagcaagaacaccgcctacctccagatgaacagcctgagagccgaggacaccgccgtgtactattgtgccgctgtgtccgtcagagatgggcactacaattactggggccagggcaccaccgtgaccgtttcttcaggtaccggcggaggcggatctggcggcggaggtagcggtggcggaggatctgaattcgacatccagatgacacagagccctagcagcctgtctgccagcgtgggagacagagtgaccatcacatgcaagagcagccagagcctgctggactccgatggcaagacctacctgaactggtatcagcagaagcccggcaaggcccctaagctgctgatctacctggtgtccaagctggatagcggcgtgcccagcagattttctggcagcggcagcggaaccgacttcaccctgacaatatccagcctccagcctgaggacttcgccacctactactgcttccaaggcacccactttccatacaccttcggccagggcaccaaggtggaaatcaaaagactcgaggacctgaagaacgtgttcccacctgaggtggccgtgttcgagcctagcgaggccgagatcagccacacccagaaagccaccctcgtgtgcctggctaccggcttctaccccgaccatgtggaactgtcttggtgggtcaacggcaaagaggtgcacagcggcgtgtgtaccgacccccagccactgaaagaacagcccgccctgaacgacagccggtactgcctgagcagcagactgagagtgtccgccaccttctggcagaacccccggaaccacttcagatgccaggtgcagttctacggcctgagcgagaacgacgagtggacccaggacagagccaagcccgtgacccagatcgtgtctgccgaagcctggggcagagccgattgcgacgtgaagctggtggaaaagagcttcgagacagacaccaacctgaacttccagaacctgagcgtgatcggcttcagaatcctgctgctgaaagtggccggctttaacctgctgatgaccctgcggctgtggtccagcagggccaagcgatctggatctggagcaacaaacttctcactactcaaacaagcaggtgacgtggaggagaatcccgggcctactagtatggactggatttggcgcatccttttccttgtcggcgctgctaccggcgcgcattccttcgaagaagtgcagctggttgaatcaggcggaggactggttcagcctggcggatctctgagactgtcttgtgccgccagcggctacaccttcaccagctactggatgaactgggtccgacaggcccctggcaaaggactggaatgggtcggaatgatcgaccccagcgacagcgagacacactacaaccacatcttcaaggaccgcttcaccatcagcgccgacaccagcaagaataccgcctacctccagatgaactccctgagagccgaggacaccgccgtgtactactgcgccagaaacctgtatctgttcggccagggaaccctggtcacagtgtcatctacgcgtatccagaaccctgatcctgccgtgtaccagctgcgggatagcaagagcagcgacaagagcgtgtgtctgttcaccgacttcgacagccagaccaacgtgtcccagagcaaggactccgacgtgtacatcaccgataagtgcgtgctggacatgcggagcatggacttcaagagcaactccgccgtggcctggtccaacaagtccgatttcgcctgcgccaacgccttcaacaacagcattatccccgaggacacattcttcccaagccccgagagcagctgcggctttaccagcgagagctaccagcagggcgtgctgagcgccaccatcctgtacgagatcctgctgggcaaggccaccctgtacgccgtgctggtgtctgccctggtgctgatggctatggtcaagcggaaggacagccgggga

SEQ ID NO: 37067 - DNA, 2283 bp, synthetic construct
  source 1..2283: mol_type = other DNA
atggccttaccagtgaccgccttgctcctgccgctggccttgctgctccacgccgccaggccggaggtgcagctggttgaatctggcggaggactggttcagcctggcggatctctgagactgtcttgtgccgccagcggcttcaacatcaaggatacctgtatcggctgggttcgcagagcccctggcaaagaggaagaactggtcgccaaaatctgcaagtacagcggccacaccagatacgccgacagcgtgaagggcagattcaccatcagcgccgacaccagcaagaacaccgcctacctccagatgaacagcctgagagccgaggacaccgccgtgtactattgtgccgctgtgtccgtcagagatgggcactacaattactggggccagggcaccaccgtgaccgtttcttcaggtaccggcggaggcggatctggcggcggaggtagcggtggcggaggatctgaattcgacatccagatgacacagagccctagcagcctgtctgccagcgtgggagacagagtgaccatcacatgcaagagcagccagagcctgctggactccgatggcaagacctacctgaactggtatcagcagaagcccggcaaggcccctaagctgctgatctacctggtgtccaagctggatagcggcgtgcccagcagattttctggcagcggcagcggaaccgacttcaccctgacaatatccagcctccagcctgaggacttcgccacctactactgcttccaaggcacccactttccatacaccttcggccagggcaccaaggtggaaatcaaaagactcgagatccagaaccctgatcctgccgtgtaccagctgcgggatagcaagagcagcgacaagagcgtgtgtctgttcaccgacttcgacagccagaccaacgtgtcccagagcaaggactccgacgtgtacatcaccgataagtgcgtgctggacatgcggagcatggacttcaagagcaactccgccgtggcctggtccaacaagtccgatttcgcctgcgccaacgccttcaacaacagcattatccccgaggacacattcttcccaagccccgagagcagctgcggctttaccagcgagagctaccagcagggcgtgctgagcgccaccatcctgtacgagatcctgctgggcaaggccaccctgtacgccgtgctggtgtctgccctggtgctgatggctatggtcaagcggaaggacagccggggacgcgccaagagaagcggatctggcgtgaagcagaccctgaatttcgacctgctgaagctggctggcgacgtggaatccaacccaggccctactagtatggactggatttggcgcatccttttccttgtcggcgctgctaccggcgcgcattccttcgaagaagtgcagctggttgaatcaggcggaggactggttcagcctggcggatctctgagactgtcttgtgccgccagcggctacaccttcaccagctactggatgaactgggtccgacaggcccctggcaaaggactggaatgggtcggaatgatcgaccccagcgacagcgagacacactacaaccacatcttcaaggaccgcttcaccatcagcgccgacaccagcaagaataccgcctacctccagatgaactccctgagagccgaggacaccgccgtgtactactgcgccagaaacctgtatctgttcggccagggaaccctggtcacagtgtcatctacgcgtgaggacctgaagaacgtgttcccacctgaggtggccgtgttcgagcctagcgaggccgagatcagccacacccagaaagccaccctcgtgtgcctggctaccggcttctaccccgaccatgtggaactgtcttggtgggtcaacggcaaagaggtgcacagcggcgtgtgtaccgacccccagccactgaaagaacagcccgccctgaacgacagccggtactgcctgagcagcagactgagagtgtccgccaccttctggcagaacccccggaaccacttcagatgccaggtgcagttctacggcctgagcgagaacgacgagtggacccaggacagagccaagcccgtgacccagatcgtgtctgccgaagcctggggcagagccgattgcgacgtgaagctggtggaaaagagcttcgagacagacaccaacctgaacttccagaacctgagcgtgatcggcttcagaatcctgctgctgaaagtggccggctttaacctgctgatgaccctgcggctgtggtccagc

SEQ ID NO: 37068 - DNA, 3387 bp, synthetic construct
  source 1..3387: mol_type = other DNA
atggccttaccagtgaccgccttgctcctgccgctggccttgctgctccacgccgccaggccggaagtgcagctggttgaatctggcggaggactggttcaggctggcggatctctgagactgtcttgtgccgccagcggcagaacctttagcatgggctggtttagacaggcccctggcaaagagagagagttcgtcgccgccatcacatactctggcggcagcccttactacgccgactctgtgaagggcagattcaccatcagccgggacaacgccaagaacaccgtgtacctccagatgaacagcctgaagcctgaggacaccgccgtgtactactgcgccgccaatccaacatacggcagcgactggaacgccgagaattggggccagggaacccaagtgacagtgtctagcggtaccggcggaggcggatctggcggcggaggtagcggtggcggaggatctgaattcgacatccagatgacacagagccctagcagcctgtctgccagcgtgggagacagagtgaccatcacatgcaagagcagccagagcctgctggactccgatggcaagacctacctgaactggtatcagcagaagcccggcaaggcccctaagctgctgatctacctggtgtccaagctggatagcggcgtgcccagcagattttctggcagcggcagcggaaccgacttcaccctgacaatatccagcctccagcctgaggacttcgccacctactactgcttccaaggcacccactttccatacaccttcggccagggcaccaaggtggaaatcaaaagactcgaggacctgaagaacgtgttcccacctgaggtggccgtgttcgagcctagcgaggccgagatcagccacacccagaaagccaccctcgtgtgcctggctaccggcttctaccccgaccatgtggaactgtcttggtgggtcaacggcaaagaggtgcacagcggcgtgtgtaccgacccccagccactgaaagaacagcccgccctgaacgacagccggtactgcctgagcagcagactgagagtgtccgccaccttctggcagaacccccggaaccacttcagatgccaggtgcagttctacggcctgagcgagaacgacgagtggacccaggacagagccaagcccgtgacccagatcgtgtctgccgaagcctggggcagagccgattgcgacgtgaagctggtggaaaagagcttcgagacagacaccaacctgaacttccagaacctgagcgtgatcggcttcagaatcctgctgctgaaagtggccggctttaacctgctgatgaccctgcggctgtggtccagcagggccaagcgatctggatctggagcaacaaacttctcactactcaaacaagcaggtgacgtggaggagaatcccgggcctactagtgccaccatggactggatttggcgcatccttttccttgtcggcgctgctaccggcgcccattccgggcccgaagtgcaactggttgaatccggtggcggcctggtgcaagcaggcggatctctcagacttagctgtgccgcctccggcagaaccttcacaatgggatggtttaggcaggctccagggaaagagagagagttcgtcgccgccatctctctgtctcccacactggcctactacgccgactctgtgaaaggccggttcaccatctccagagataatgccaagaacaccgtggtgctgcaaatgaactctctgaaacccgaggatacagccctgtactattgtgccgctgaccggaagtccgtgatgagcatcagacccgattactggggacagggcacacaagtcacagtgtcctctggatccggcggcggaggatctggcggaggcggatctgggggcggaggctctttcgaagaagtgcagctggttgaatcaggcggaggactggttcagcctggcggatctctgagactgtcttgtgccgccagcggctacaccttcaccagctactggatgaactgggtccgacaggcccctggcaaaggactggaatgggtcggaatgatcgaccccagcgacagcgagacacactacaaccacatcttcaaggaccgcttcaccatcagcgccgacaccagcaagaataccgcctacctccagatgaactccctgagagccgaggacaccgccgtgtactactgcgccagaaacctgtatctgttcggccagggaaccctggtcacagtgtcatctacgcgtatccagaaccctgatcctgccgtgtaccagctgcgggatagcaagagcagcgacaagagcgtgtgtctgttcaccgacttcgacagccagaccaacgtgtcccagagcaaggactccgacgtgtacatcaccgataagtgcgtgctggacatgcggagcatggacttcaagagcaactccgccgtggcctggtccaacaagtccgatttcgcctgcgccaacgccttcaacaacagcattatccccgaggacacattcttcccaagccccgagagcagctgcggctttaccagcgagagctaccagcagggcgtgctgagcgccaccatcctgtacgagatcctgctgggcaaggccaccctgtacgccgtgctggtgtctgccctggtgctgatggctatggtcaagcggaaggacagccggggacgcgccaagagaagcggatctggcgtgaagcagaccctgaatttcgacctgctgaagctggctggcgacgtggaatccaacccaggcccttctagaggccatatgaccgagtacaagcccacggtgcgcctcgccacccgcgacgacgtccccagggccgtacgcaccctcgccgccgcgttcgccgactaccccgccacgcgccacaccgtcgatccggaccgccacatcgagcgggtcaccgagctgcaagaactcttcctcacgcgcgtcgggctcgacatcggcaaggtgtgggtcgcggacgacggcgccgcggtggcggtctggaccacgccggagagcgtcgaagcgggggcggtgttcgccgagatcggcccgcgcatggccgagttgagcggttcccggctggccgcgcagcaacagatggaaggcctcctggcgccgcaccggcccaaggagcccgcgtggttcctggccaccgtcggcgtctcgcccgaccaccagggcaagggtctgggcagcgccgtcgtgctccccggagtggaggcggccgagcgcgccggggtgcccgccttcctggagacctccgcgccccgcaacctccccttctacgagcggctcggcttcaccgtcaccgccgacgtcgaggtgcccgaaggaccgcgcacctggtgcatgacccgcaagcccggtgcctga

SEQ ID NO: 37069 - DNA, 2301 bp, synthetic construct
  source 1..2301: mol_type = other DNA
atggccttaccagtgaccgccttgctcctgccgctggccttgctgctccacgccgccaggccggaagtgcagctggttgaatctggcggaggactggttcagcctggcggatctctgagactgtcttgtgccgcctctggcttcgccagcgactactatatcatcggctggttcagacaggcccctggcaaagagagagagggcgtcagctgtatcagcagcagatacgccaacaccaactacgccgacagcgtgaagggcagattcaccatcagccgggacaacgccaagaacaccgtgtacctccagatgaacagcctgaagcctgaggacaccgccgtgtactactgtgccgccgacaccagaagatacacctgtcctgacattgccaccatgcaccggaacttcgattcttggggccagggcacactggtcaccgtttcttctggtaccggcggaggcggatctggcggcggaggtagcggtggcggaggatctgaattcgacatccagatgacacagagccctagcagcctgtctgccagcgtgggagacagagtgaccatcacatgcaagagcagccagagcctgctggactccgatggcaagacctacctgaactggtatcagcagaagcccggcaaggcccctaagctgctgatctacctggtgtccaagctggatagcggcgtgcccagcagattttctggcagcggcagcggaaccgacttcaccctgacaatatccagcctccagcctgaggacttcgccacctactactgcttccaaggcacccactttccatacaccttcggccagggcaccaaggtggaaatcaaaagactcgaggacctgaagaacgtgttcccacctgaggtggccgtgttcgagcctagcgaggccgagatcagccacacccagaaagccaccctcgtgtgcctggctaccggcttctaccccgaccatgtggaactgtcttggtgggtcaacggcaaagaggtgcacagcggcgtgtgtaccgacccccagccactgaaagaacagcccgccctgaacgacagccggtactgcctgagcagcagactgagagtgtccgccaccttctggcagaacccccggaaccacttcagatgccaggtgcagttctacggcctgagcgagaacgacgagtggacccaggacagagccaagcccgtgacccagatcgtgtctgccgaagcctggggcagagccgattgcgacgtgaagctggtggaaaagagcttcgagacagacaccaacctgaacttccagaacctgagcgtgatcggcttcagaatcctgctgctgaaagtggccggctttaacctgctgatgaccctgcggctgtggtccagcagggccaagcgatctggatctggagcaacaaacttctcactactcaaacaagcaggtgacgtggaggagaatcccgggcctactagtatggactggatttggcgcatccttttccttgtcggcgctgctaccggcgcgcattccttcgaagaagtgcagctggttgaatcaggcggaggactggttcagcctggcggatctctgagactgtcttgtgccgccagcggctacaccttcaccagctactggatgaactgggtccgacaggcccctggcaaaggactggaatgggtcggaatgatcgaccccagcgacagcgagacacactacaaccacatcttcaaggaccgcttcaccatcagcgccgacaccagcaagaataccgcctacctccagatgaactccctgagagccgaggacaccgccgtgtactactgcgccagaaacctgtatctgttcggccagggaaccctggtcacagtgtcatctacgcgtatccagaaccctgatcctgccgtgtaccagctgcgggatagcaagagcagcgacaagagcgtgtgtctgttcaccgacttcgacagccagaccaacgtgtcccagagcaaggactccgacgtgtacatcaccgataagtgcgtgctggacatgcggagcatggacttcaagagcaactccgccgtggcctggtccaacaagtccgatttcgcctgcgccaacgccttcaacaacagcattatccccgaggacacattcttcccaagccccgagagcagctgcggctttaccagcgagagctaccagcagggcgtgctgagcgccaccatcctgtacgagatcctgctgggcaaggccaccctgtacgccgtgctggtgtctgccctggtgctgatggctatggtcaagcggaaggacagccggggataa

SEQ ID NO: 37070 - DNA, 2301 bp, synthetic construct
  source 1..2301: mol_type = other DNA
atggccttaccagtgaccgccttgctcctgccgctggccttgctgctccacgccgccaggccggaagtgcagctggttgaatctggcggaggactggttcagcctggcggatctctgagactgagctgtgaagccagcggcttcgccagcgacgattacatcatcggctggttcagacaggcccctggcaaagagagagagggcgtcagctgcatcagctctaagtacgccaacaccgtgtacaccgacagcgtgaagggcagattcagactgagcagaggcaccgccaagaataccgtgtacctccagatgagcgccctgaagcctgaggataccgccgtgtactactgcgctatggacagccgcagagtgacatgccctgagatcagcaccatgcaccggaacttcgattcttggggccagggcacactggtcacagtgtcatctggtaccggcggaggcggatctggcggcggaggtagcggtggcggaggatctgaattcgacatccagatgacacagagccctagcagcctgtctgccagcgtgggagacagagtgaccatcacatgcaagagcagccagagcctgctggactccgatggcaagacctacctgaactggtatcagcagaagcccggcaaggcccctaagctgctgatctacctggtgtccaagctggatagcggcgtgcccagcagattttctggcagcggcagcggaaccgacttcaccctgacaatatccagcctccagcctgaggacttcgccacctactactgcttccaaggcacccactttccatacaccttcggccagggcaccaaggtggaaatcaaaagactcgaggacctgaagaacgtgttcccacctgaggtggccgtgttcgagcctagcgaggccgagatcagccacacccagaaagccaccctcgtgtgcctggctaccggcttctaccccgaccatgtggaactgtcttggtgggtcaacggcaaagaggtgcacagcggcgtgtgtaccgacccccagccactgaaagaacagcccgccctgaacgacagccggtactgcctgagcagcagactgagagtgtccgccaccttctggcagaacccccggaaccacttcagatgccaggtgcagttctacggcctgagcgagaacgacgagtggacccaggacagagccaagcccgtgacccagatcgtgtctgccgaagcctggggcagagccgattgcgacgtgaagctggtggaaaagagcttcgagacagacaccaacctgaacttccagaacctgagcgtgatcggcttcagaatcctgctgctgaaagtggccggctttaacctgctgatgaccctgcggctgtggtccagcagggccaagcgatctggatctggagcaacaaacttctcactactcaaacaagcaggtgacgtggaggagaatcccgggcctactagtatggactggatttggcgcatccttttccttgtcggcgctgctaccggcgcgcattccttcgaagaagtgcagctggttgaatcaggcggaggactggttcagcctggcggatctctgagactgtcttgtgccgccagcggctacaccttcaccagctactggatgaactgggtccgacaggcccctggcaaaggactggaatgggtcggaatgatcgaccccagcgacagcgagacacactacaaccacatcttcaaggaccgcttcaccatcagcgccgacaccagcaagaataccgcctacctccagatgaactccctgagagccgaggacaccgccgtgtactactgcgccagaaacctgtatctgttcggccagggaaccctggtcacagtgtcatctacgcgtatccagaaccctgatcctgccgtgtaccagctgcgggatagcaagagcagcgacaagagcgtgtgtctgttcaccgacttcgacagccagaccaacgtgtcccagagcaaggactccgacgtgtacatcaccgataagtgcgtgctggacatgcggagcatggacttcaagagcaactccgccgtggcctggtccaacaagtccgatttcgcctgcgccaacgccttcaacaacagcattatccccgaggacacattcttcccaagccccgagagcagctgcggctttaccagcgagagctaccagcagggcgtgctgagcgccaccatcctgtacgagatcctgctgggcaaggccaccctgtacgccgtgctggtgtctgccctggtgctgatggctatggtcaagcggaaggacagccggggataa

SEQ ID NO: 37071 - DNA, 2298 bp, synthetic construct
  source 1..2298: mol_type = other DNA
atggccttaccagtgaccgccttgctcctgccgctggccttgctgctccacgccgccaggccggaagtgcagctggttgaatctggcggaggactggttcagcctggcggatctctgagactgtcttgtgccgcctctggcttcgccagcgactactatatcatcggctggttcagacaggcccctggcaaagagagagagggcgtcagctgtatcagcagcagatacgccaacaccaactacgccgacagcgtgaagggcagattcaccatcagccgggacaacgccaagaacaccgtgtacctccagatgaacagcctgaagcctgaggacaccgccgtgtactactgtgccgccgacaccagaagatacacctgtcctgacattgccaccatgcaccggaacttcgattcttggggccagggcacactggtcaccgtttcttctggtaccggcggaggcggatctggcggcggaggtagcggtggcggaggatctgaattcgacatccagatgacacagagccctagcagcctgtctgccagcgtgggagacagagtgaccatcacatgcaagagcagccagagcctgctggactccgatggcaagacctacctgaactggtatcagcagaagcccggcaaggcccctaagctgctgatctacctggtgtccaagctggatagcggcgtgcccagcagattttctggcagcggcagcggaaccgacttcaccctgacaatatccagcctccagcctgaggacttcgccacctactactgcttccaaggcacccactttccatacaccttcggccagggcaccaaggtggaaatcaaaagactcgagatccagaaccctgatcctgccgtgtaccagctgcgggatagcaagagcagcgacaagagcgtgtgtctgttcaccgacttcgacagccagaccaacgtgtcccagagcaaggactccgacgtgtacatcaccgataagtgcgtgctggacatgcggagcatggacttcaagagcaactccgccgtggcctggtccaacaagtccgatttcgcctgcgccaacgccttcaacaacagcattatccccgaggacacattcttcccaagccccgagagcagctgcggctttaccagcgagagctaccagcagggcgtgctgagcgccaccatcctgtacgagatcctgctgggcaaggccaccctgtacgccgtgctggtgtctgccctggtgctgatggctatggtcaagcggaaggacagccggggaagggccaagcgatctggatctggagcaacaaacttctcactactcaaacaagcaggtgacgtggaggagaatcccgggcctactagtatggactggatttggcgcatccttttccttgtcggcgctgctaccggcgcgcattccttcgaagaagtgcagctggttgaatcaggcggaggactggttcagcctggcggatctctgagactgtcttgtgccgccagcggctacaccttcaccagctactggatgaactgggtccgacaggcccctggcaaaggactggaatgggtcggaatgatcgaccccagcgacagcgagacacactacaaccacatcttcaaggaccgcttcaccatcagcgccgacaccagcaagaataccgcctacctccagatgaactccctgagagccgaggacaccgccgtgtactactgcgccagaaacctgtatctgttcggccagggaaccctggtcacagtgtcatctacgcgtgacctgaagaacgtgttcccacctgaggtggccgtgttcgagcctagcgaggccgagatcagccacacccagaaagccaccctcgtgtgcctggctaccggcttctaccccgaccatgtggaactgtcttggtgggtcaacggcaaagaggtgcacagcggcgtgtgtaccgacccccagccactgaaagaacagcccgccctgaacgacagccggtactgcctgagcagcagactgagagtgtccgccaccttctggcagaacccccggaaccacttcagatgccaggtgcagttctacggcctgagcgagaacgacgagtggacccaggacagagccaagcccgtgacccagatcgtgtctgccgaagcctggggcagagccgattgcgacgtgaagctggtggaaaagagcttcgagacagacaccaacctgaacttccagaacctgagcgtgatcggcttcagaatcctgctgctgaaagtggccggctttaacctgctgatgaccctgcggctgtggtccagc

SEQ ID NO: 37072 - DNA, 2298 bp, synthetic construct
  source 1..2298: mol_type = other DNA
atggccttaccagtgaccgccttgctcctgccgctggccttgctgctccacgccgccaggccggaagtgcagctggttgaatctggcggaggactggttcagcctggcggatctctgagactgagctgtgaagccagcggcttcgccagcgacgattacatcatcggctggttcagacaggcccctggcaaagagagagagggcgtcagctgcatcagctctaagtacgccaacaccgtgtacaccgacagcgtgaagggcagattcagactgagcagaggcaccgccaagaataccgtgtacctccagatgagcgccctgaagcctgaggataccgccgtgtactactgcgctatggacagccgcagagtgacatgccctgagatcagcaccatgcaccggaacttcgattcttggggccagggcacactggtcacagtgtcatctggtaccggcggaggcggatctggcggcggaggtagcggtggcggaggatctgaattcgacatccagatgacacagagccctagcagcctgtctgccagcgtgggagacagagtgaccatcacatgcaagagcagccagagcctgctggactccgatggcaagacctacctgaactggtatcagcagaagcccggcaaggcccctaagctgctgatctacctggtgtccaagctggatagcggcgtgcccagcagattttctggcagcggcagcggaaccgacttcaccctgacaatatccagcctccagcctgaggacttcgccacctactactgcttccaaggcacccactttccatacaccttcggccagggcaccaaggtggaaatcaaaagactcgagatccagaaccctgatcctgccgtgtaccagctgcgggatagcaagagcagcgacaagagcgtgtgtctgttcaccgacttcgacagccagaccaacgtgtcccagagcaaggactccgacgtgtacatcaccgataagtgcgtgctggacatgcggagcatggacttcaagagcaactccgccgtggcctggtccaacaagtccgatttcgcctgcgccaacgccttcaacaacagcattatccccgaggacacattcttcccaagccccgagagcagctgcggctttaccagcgagagctaccagcagggcgtgctgagcgccaccatcctgtacgagatcctgctgggcaaggccaccctgtacgccgtgctggtgtctgccctggtgctgatggctatggtcaagcggaaggacagccggggaagggccaagcgatctggatctggagcaacaaacttctcactactcaaacaagcaggtgacgtggaggagaatcccgggcctactagtatggactggatttggcgcatccttttccttgtcggcgctgctaccggcgcgcattccttcgaagaagtgcagctggttgaatcaggcggaggactggttcagcctggcggatctctgagactgtcttgtgccgccagcggctacaccttcaccagctactggatgaactgggtccgacaggcccctggcaaaggactggaatgggtcggaatgatcgaccccagcgacagcgagacacactacaaccacatcttcaaggaccgcttcaccatcagcgccgacaccagcaagaataccgcctacctccagatgaactccctgagagccgaggacaccgccgtgtactactgcgccagaaacctgtatctgttcggccagggaaccctggtcacagtgtcatctacgcgtgacctgaagaacgtgttcccacctgaggtggccgtgttcgagcctagcgaggccgagatcagccacacccagaaagccaccctcgtgtgcctggctaccggcttctaccccgaccatgtggaactgtcttggtgggtcaacggcaaagaggtgcacagcggcgtgtgtaccgacccccagccactgaaagaacagcccgccctgaacgacagccggtactgcctgagcagcagactgagagtgtccgccaccttctggcagaacccccggaaccacttcagatgccaggtgcagttctacggcctgagcgagaacgacgagtggacccaggacagagccaagcccgtgacccagatcgtgtctgccgaagcctggggcagagccgattgcgacgtgaagctggtggaaaagagcttcgagacagacaccaacctgaacttccagaacctgagcgtgatcggcttcagaatcctgctgctgaaagtggccggctttaacctgctgatgaccctgcggctgtggtccagc

SEQ ID NO: 37073 - DNA, 2271 bp, synthetic construct
  source 1..2271: mol_type = other DNA
atggccttaccagtgaccgccttgctcctgccgctggccttgctgctccacgccgccaggccgcaagtcaaactggaagaaagcggtggcggcctggtgcaacctggcgaatctctgagactgagctgtagcgccagcggctccatcttcaaggtgttcagagtgttcgccatgagctggtacaggcaaggccctggcaagcagagagagctggtcgcctctatcagcagcggcgagacaaccacatacgccgaatctgtgaaaggccggttcaccatcagccgggataatgccaagaataccgcctatctccagatggactccctgaagcctgaagatacagctgtgtactactgcaacgccgaccataccttcaccggcgatttttggggccagggaacccaagtgaccgtgtctagtggtaccggcggaggcggatctggcggcggaggtagcggtggcggaggatctgaattcgacatccagatgacacagagccctagcagcctgtctgccagcgtgggagacagagtgaccatcacatgcaagagcagccagagcctgctggactccgatggcaagacctacctgaactggtatcagcagaagcccggcaaggcccctaagctgctgatctacctggtgtccaagctggatagcggcgtgcccagcagattttctggcagcggcagcggaaccgacttcaccctgacaatatccagcctccagcctgaggacttcgccacctactactgcttccaaggcacccactttccatacaccttcggccagggcaccaaggtggaaatcaaaagactcgagatccagaaccctgatcctgccgtgtaccagctgcgggatagcaagagcagcgacaagagcgtgtgtctgttcaccgacttcgacagccagaccaacgtgtcccagagcaaggactccgacgtgtacatcaccgataagtgcgtgctggacatgcggagcatggacttcaagagcaactccgccgtggcctggtccaacaagtccgatttcgcctgcgccaacgccttcaacaacagcattatccccgaggacacattcttcccaagccccgagagcagctgcggctttaccagcgagagctaccagcagggcgtgctgagcgccaccatcctgtacgagatcctgctgggcaaggccaccctgtacgccgtgctggtgtctgccctggtgctgatggctatggtcaagcggaaggacagccggggaagggccaagcgatctggatctggagcaacaaacttctcactactcaaacaagcaggtgacgtggaggagaatcccgggcctactagtatggactggatttggcgcatccttttccttgtcggcgctgctaccggcgcgcattccttcgaagaagtgcagctggttgaatcaggcggaggactggttcagcctggcggatctctgagactgtcttgtgccgccagcggctacaccttcaccagctactggatgaactgggtccgacaggcccctggcaaaggactggaatgggtcggaatgatcgaccccagcgacagcgagacacactacaaccacatcttcaaggaccgcttcaccatcagcgccgacaccagcaagaataccgcctacctccagatgaactccctgagagccgaggacaccgccgtgtactactgcgccagaaacctgtatctgttcggccagggaaccctggtcacagtgtcatctacgcgtgacctgaagaacgtgttcccacctgaggtggccgtgttcgagcctagcgaggccgagatcagccacacccagaaagccaccctcgtgtgcctggctaccggcttctaccccgaccatgtggaactgtcttggtgggtcaacggcaaagaggtgcacagcggcgtgtgtaccgacccccagccactgaaagaacagcccgccctgaacgacagccggtactgcctgagcagcagactgagagtgtccgccaccttctggcagaacccccggaaccacttcagatgccaggtgcagttctacggcctgagcgagaacgacgagtggacccaggacagagccaagcccgtgacccagatcgtgtctgccgaagcctggggcagagccgattgcgacgtgaagctggtggaaaagagcttcgagacagacaccaacctgaacttccagaacctgagcgtgatcggcttcagaatcctgctgctgaaagtggccggctttaacctgctgatgaccctgcggctgtggtccagc

SEQ ID NO: 37074 - DNA, 2277 bp, synthetic construct
  source 1..2277: mol_type = other DNA
atggccttaccagtgaccgccttgctcctgccgctggccttgctgctccacgccgccaggccggacatccagatgacacagagccctagcagcctgtctgccagcgtgggagacagagtgaccatcacatgcaagagcagccagagcctgctggactccgatggcaagacctacctgaactggtatcagcagaagcccggcaaggcccctaagctgctgatctacctggtgtccaagctggatagcggcgtgcccagcagattttctggcagcggcagcggaaccgacttcaccctgacaatatccagcctccagcctgaggacttcgccacctactactgcttccaaggcacccactttccatacaccttcggccagggcaccaaggtggaaatcaaaagactcgaggacctgaagaacgtgttcccacctgaggtggccgtgttcgagcctagcgaggccgagatcagccacacccagaaagccaccctcgtgtgcctggctaccggcttctaccccgaccatgtggaactgtcttggtgggtcaacggcaaagaggtgcacagcggcgtgtgtaccgacccccagccactgaaagaacagcccgccctgaacgacagccggtactgcctgagcagcagactgagagtgtccgccaccttctggcagaacccccggaaccacttcagatgccaggtgcagttctacggcctgagcgagaacgacgagtggacccaggacagagccaagcccgtgacccagatcgtgtctgccgaagcctggggcagagccgattgcgacgtgaagctggtggaaaagagcttcgagacagacaccaacctgaacttccagaacctgagcgtgatcggcttcagaatcctgctgctgaaagtggccggctttaacctgctgatgaccctgcggctgtggtccagcagggccaagcgatctggatctggagcaacaaacttctcactactcaaacaagcaggtgacgtggaggagaatcccgggcctactagtgccaccatggactggatttggcgcatccttttccttgtcggcgctgctaccggcgcccattccgggcccgaagtgcagctggttgaatctggcggaggactggttcaggctggcggatctctgagactgtcttgtgccgccagcggcagaacctttagcatgggctggtttagacaggcccctggcaaagagagagagttcgtcgccgccatcacatactctggcggcagcccttactacgccgactctgtgaagggcagattcaccatcagccgggacaacgccaagaacaccgtgtacctccagatgaacagcctgaagcctgaggacaccgccgtgtactactgcgccgccaatccaacatacggcagcgactggaacgccgagaattggggccagggaacccaagtgacagtgtctagcggatccggcggcggaggatctggcggaggcggatctgggggcggaggctctttcgaagaagtgcagctggttgaatcaggcggaggactggttcagcctggcggatctctgagactgtcttgtgccgccagcggctacaccttcaccagctactggatgaactgggtccgacaggcccctggcaaaggactggaatgggtcggaatgatcgaccccagcgacagcgagacacactacaaccacatcttcaaggaccgcttcaccatcagcgccgacaccagcaagaataccgcctacctccagatgaactccctgagagccgaggacaccgccgtgtactactgcgccagaaacctgtatctgttcggccagggaaccctggtcacagtgtcatctacgcgtatccagaaccctgatcctgccgtgtaccagctgcgggatagcaagagcagcgacaagagcgtgtgtctgttcaccgacttcgacagccagaccaacgtgtcccagagcaaggactccgacgtgtacatcaccgataagtgcgtgctggacatgcggagcatggacttcaagagcaactccgccgtggcctggtccaacaagtccgatttcgcctgcgccaacgccttcaacaacagcattatccccgaggacacattcttcccaagccccgagagcagctgcggctttaccagcgagagctaccagcagggcgtgctgagcgccaccatcctgtacgagatcctgctgggcaaggccaccctgtacgccgtgctggtgtctgccctggtgctgatggctatggtcaagcggaaggacagccggggataa

SEQ ID NO: 37075 - DNA, 2280 bp, synthetic construct
  source 1..2280: mol_type = other DNA
atggccttaccagtgaccgccttgctcctgccgctggccttgctgctccacgccgccaggccggacatccagatgacacagagccctagcagcctgtctgccagcgtgggagacagagtgaccatcacatgcaagagcagccagagcctgctggactccgatggcaagacctacctgaactggtatcagcagaagcccggcaaggcccctaagctgctgatctacctggtgtccaagctggatagcggcgtgcccagcagattttctggcagcggcagcggaaccgacttcaccctgacaatatccagcctccagcctgaggacttcgccacctactactgcttccaaggcacccactttccatacaccttcggccagggcaccaaggtggaaatcaaaagactcgaggacctgaagaacgtgttcccacctgaggtggccgtgttcgagcctagcgaggccgagatcagccacacccagaaagccaccctcgtgtgcctggctaccggcttctaccccgaccatgtggaactgtcttggtgggtcaacggcaaagaggtgcacagcggcgtgtgtaccgacccccagccactgaaagaacagcccgccctgaacgacagccggtactgcctgagcagcagactgagagtgtccgccaccttctggcagaacccccggaaccacttcagatgccaggtgcagttctacggcctgagcgagaacgacgagtggacccaggacagagccaagcccgtgacccagatcgtgtctgccgaagcctggggcagagccgattgcgacgtgaagctggtggaaaagagcttcgagacagacaccaacctgaacttccagaacctgagcgtgatcggcttcagaatcctgctgctgaaagtggccggctttaacctgctgatgaccctgcggctgtggtccagcagggccaagcgatctggatctggagcaacaaacttctcactactcaaacaagcaggtgacgtggaggagaatcccgggcctactagtgccaccatggactggatttggcgcatccttttccttgtcggcgctgctaccggcgcccattccgggcccgaagtgcaactggtggaatctgggggcggactggtgcagccaggcggaagtctgaggctgtcttgtgccgcctccggcagcatcttcggcttcaacgacatggcctggtatcggcaggctcccggaaaacagcgcgagctggtggctctgattagcagagtgggcgtgaccagcagcgccgactctgtgaagggcagattcacaatctccagagtgaacgccaaggatacagtgtacctccagatgaactctctgaaacctgaggatacagcagtgtactattgctacatggaccagcggctggacggcagcacactggcctactggggacagggaactcaagtgacagtgtctagcggatccggcggcggaggatctggcggaggcggatctgggggcggaggctctttcgaagaagtgcagctggttgaatcaggcggaggactggttcagcctggcggatctctgagactgtcttgtgccgccagcggctacaccttcaccagctactggatgaactgggtccgacaggcccctggcaaaggactggaatgggtcggaatgatcgaccccagcgacagcgagacacactacaaccacatcttcaaggaccgcttcaccatcagcgccgacaccagcaagaataccgcctacctccagatgaactccctgagagccgaggacaccgccgtgtactactgcgccagaaacctgtatctgttcggccagggaaccctggtcacagtgtcatctacgcgtatccagaaccctgatcctgccgtgtaccagctgcgggatagcaagagcagcgacaagagcgtgtgtctgttcaccgacttcgacagccagaccaacgtgtcccagagcaaggactccgacgtgtacatcaccgataagtgcgtgctggacatgcggagcatggacttcaagagcaactccgccgtggcctggtccaacaagtccgatttcgcctgcgccaacgccttcaacaacagcattatccccgaggacacattcttcccaagccccgagagcagctgcggctttaccagcgagagctaccagcagggcgtgctgagcgccaccatcctgtacgagatcctgctgggcaaggccaccctgtacgccgtgctggtgtctgccctggtgctgatggctatggtcaagcggaaggacagccggggataa

SEQ ID NO: 37076 - DNA, 2268 bp, synthetic construct
  source 1..2268: mol_type = other DNA
atggccttaccagtgaccgccttgctcctgccgctggccttgctgctccacgccgccaggccggacatccagatgacacagagccctagcagcctgtctgccagcgtgggagacagagtgaccatcacatgcaagagcagccagagcctgctggactccgatggcaagacctacctgaactggtatcagcagaagcccggcaaggcccctaagctgctgatctacctggtgtccaagctggatagcggcgtgcccagcagattttctggcagcggcagcggaaccgacttcaccctgacaatatccagcctccagcctgaggacttcgccacctactactgcttccaaggcacccactttccatacaccttcggccagggcaccaaggtggaaatcaaaagactcgaggacctgaagaacgtgttcccacctgaggtggccgtgttcgagcctagcgaggccgagatcagccacacccagaaagccaccctcgtgtgcctggctaccggcttctaccccgaccatgtggaactgtcttggtgggtcaacggcaaagaggtgcacagcggcgtgtgtaccgacccccagccactgaaagaacagcccgccctgaacgacagccggtactgcctgagcagcagactgagagtgtccgccaccttctggcagaacccccggaaccacttcagatgccaggtgcagttctacggcctgagcgagaacgacgagtggacccaggacagagccaagcccgtgacccagatcgtgtctgccgaagcctggggcagagccgattgcgacgtgaagctggtggaaaagagcttcgagacagacaccaacctgaacttccagaacctgagcgtgatcggcttcagaatcctgctgctgaaagtggccggctttaacctgctgatgaccctgcggctgtggtccagcagggccaagcgatctggatctggagcaacaaacttctcactactcaaacaagcaggtgacgtggaggagaatcccgggcctactagtgccaccatggactggatttggcgcatccttttccttgtcggcgctgctaccggcgcccattccgggcccgaggtgcagctggttgaatctggcggaggactggttcaggctggcggatctctgagactgtcttgtgccgccagcggctctgtgttcagcggcaatgtgatgggctggtacagacaggcccctggcaaagaaagagagtgggttgccgccattgccagcggcggcagcatctactacagagactctgtgaagggcagattcaccatcagccgggacaacgccaagaacaccgtgtacctccagatgaacagcctgaagcctgaggacaccgccgtgtactactgcaactctcaccctcctacactgccctattggggcctgggaacccaagtgacagtgtcctctggatccggcggcggaggatctggcggaggcggatctgggggcggaggctctttcgaagaagtgcagctggttgaatcaggcggaggactggttcagcctggcggatctctgagactgtcttgtgccgccagcggctacaccttcaccagctactggatgaactgggtccgacaggcccctggcaaaggactggaatgggtcggaatgatcgaccccagcgacagcgagacacactacaaccacatcttcaaggaccgcttcaccatcagcgccgacaccagcaagaataccgcctacctccagatgaactccctgagagccgaggacaccgccgtgtactactgcgccagaaacctgtatctgttcggccagggaaccctggtcacagtgtcatctacgcgtatccagaaccctgatcctgccgtgtaccagctgcgggatagcaagagcagcgacaagagcgtgtgtctgttcaccgacttcgacagccagaccaacgtgtcccagagcaaggactccgacgtgtacatcaccgataagtgcgtgctggacatgcggagcatggacttcaagagcaactccgccgtggcctggtccaacaagtccgatttcgcctgcgccaacgccttcaacaacagcattatccccgaggacacattcttcccaagccccgagagcagctgcggctttaccagcgagagctaccagcagggcgtgctgagcgccaccatcctgtacgagatcctgctgggcaaggccaccctgtacgccgtgctggtgtctgccctggtgctgatggctatggtcaagcggaaggacagccggggataa

SEQ ID NO: 37077 - DNA, 2262 bp, synthetic construct
  source 1..2262: mol_type = other DNA
atggccttaccagtgaccgccttgctcctgccgctggccttgctgctccacgccgccaggccggacatccagatgacacagagccctagcagcctgtctgccagcgtgggagacagagtgaccatcacatgcaagagcagccagagcctgctggactccgatggcaagacctacctgaactggtatcagcagaagcccggcaaggcccctaagctgctgatctacctggtgtccaagctggatagcggcgtgcccagcagattttctggcagcggcagcggaaccgacttcaccctgacaatatccagcctccagcctgaggacttcgccacctactactgcttccaaggcacccactttccatacaccttcggccagggcaccaaggtggaaatcaaaagactcgaggacctgaagaacgtgttcccacctgaggtggccgtgttcgagcctagcgaggccgagatcagccacacccagaaagccaccctcgtgtgcctggctaccggcttctaccccgaccatgtggaactgtcttggtgggtcaacggcaaagaggtgcacagcggcgtgtgtaccgacccccagccactgaaagaacagcccgccctgaacgacagccggtactgcctgagcagcagactgagagtgtccgccaccttctggcagaacccccggaaccacttcagatgccaggtgcagttctacggcctgagcgagaacgacgagtggacccaggacagagccaagcccgtgacccagatcgtgtctgccgaagcctggggcagagccgattgcgacgtgaagctggtggaaaagagcttcgagacagacaccaacctgaacttccagaacctgagcgtgatcggcttcagaatcctgctgctgaaagtggccggctttaacctgctgatgaccctgcggctgtggtccagcagggccaagcgatctggatctggagcaacaaacttctcactactcaaacaagcaggtgacgtggaggagaatcccgggcctactagtgccaccatggactggatttggcgcatccttttccttgtcggcgctgctaccggcgcccattccgggcccgaagttcagctgctggaatctggcggaggactcgttcaacctggcggctctctgagactgagctgtgccgcttctggcttcagcttctctagctacgccctgagctgggttcgacaagctcccggaaagggccttgaatgggtgtccagcatcggcgagaatgacggcaccacagactatgccgatgccgtgaaaggccggtttaccatcagcagagacaattccaagaacacgctctatctgcaaatgaactccctgcgcgtggaagatacagccgtgtattattgcgtgaaggacggcatccactggggacagggaaccctggttacagtgtctagcggatccggcggcggaggatctggcggaggcggatctgggggcggaggctctttcgaagaagtgcagctggttgaatcaggcggaggactggttcagcctggcggatctctgagactgtcttgtgccgccagcggctacaccttcaccagctactggatgaactgggtccgacaggcccctggcaaaggactggaatgggtcggaatgatcgaccccagcgacagcgagacacactacaaccacatcttcaaggaccgcttcaccatcagcgccgacaccagcaagaataccgcctacctccagatgaactccctgagagccgaggacaccgccgtgtactactgcgccagaaacctgtatctgttcggccagggaaccctggtcacagtgtcatctacgcgtatccagaaccctgatcctgccgtgtaccagctgcgggatagcaagagcagcgacaagagcgtgtgtctgttcaccgacttcgacagccagaccaacgtgtcccagagcaaggactccgacgtgtacatcaccgataagtgcgtgctggacatgcggagcatggacttcaagagcaactccgccgtggcctggtccaacaagtccgatttcgcctgcgccaacgccttcaacaacagcattatccccgaggacacattcttcccaagccccgagagcagctgcggctttaccagcgagagctaccagcagggcgtgctgagcgccaccatcctgtacgagatcctgctgggcaaggccaccctgtacgccgtgctggtgtctgccctggtgctgatggctatggtcaagcggaaggacagccggggataa

SEQ ID NO: 37078 - DNA, 3369 bp, synthetic construct
  source 1..3369: mol_type = other DNA
atgggacccagactgctgttttgggctctgctgtgtctgctcggcacaggacctgttgaagctggcgtgacacagagccccacacacctgattaagaccagaggccagcaggccacactgagatgcagccctatcagcggccacaccagcgtgtactggtatcagcaggctctcggactgggcctccagttcctgctttggtacgacgagggcgaagagagaaaccggggcaacttccctcctcggttttccggcagacagttccccaactacagcagcgagctgaacgtgaacgccctggaactggaagatagcgccctgtacctgtgtgcctcttctcttggtggacctcgcggactggctggactgagaggggatgagcagtttttcggccctggcaccagactgaccgtgctggaaggtaccggcggaggcggatctggcggcggagaattcgacatccagatgacacagagccctagcagcctgtctgccagcgtgggagacagagtgaccatcacatgcaagagcagccagagcctgctggactccgatggcaagacctacctgaactggtatcagcagaagcccggcaaggcccctaagctgctgatctacctggtgtccaagctggatagcggcgtgcccagcagattttctggcagcggcagcggaaccgacttcaccctgacaatatccagcctccagcctgaggacttcgccacctactactgcttccaaggcacccactttccatacaccttcggccagggcaccaaggtggaaatcaaaagactcgaggacctgaagaacgtgttcccacctgaggtggccgtgttcgagcctagcgaggccgagatcagccacacccagaaagccaccctcgtgtgcctggctaccggcttctaccccgaccatgtggaactgtcttggtgggtcaacggcaaagaggtgcacagcggcgtgtgtaccgacccccagccactgaaagaacagcccgccctgaacgacagccggtactgcctgagcagcagactgagagtgtccgccaccttctggcagaacccccggaaccacttcagatgccaggtgcagttctacggcctgagcgagaacgacgagtggacccaggacagagccaagcccgtgacccagatcgtgtctgccgaagcctggggcagagccgattgcgacgtgaagctggtggaaaagagcttcgagacagacaccaacctgaacttccagaacctgagcgtgatcggcttcagaatcctgctgctgaaagtggccggctttaacctgctgatgaccctgcggctgtggtccagcagggccaagcgatctggatctggagcaacaaacttctcactactcaaacaagcaggtgacgtggaggagaatcccgggcctactagtgccaccatggactggatttggcgcatccttttccttgtcggcgctgctaccggcgcccattccgggcccgaagtgcagctggttgaatctggcggaggactggttcaggctggcggatctctgagactgtcttgtgccgccagcggcagaacctttagcatgggctggtttagacaggcccctggcaaagagagagagttcgtcgccgccatcacatactctggcggcagcccttactacgccgactctgtgaagggcagattcaccatcagccgggacaacgccaagaacaccgtgtacctccagatgaacagcctgaagcctgaggacaccgccgtgtactactgcgccgccaatccaacatacggcagcgactggaacgccgagaattggggccagggaacccaagtgacagtgtctagcggatccggcggcggaggatctggcggaggcggatctgggggcggaggctctttcgaagaagtgcagctggttgaatcaggcggaggactggttcagcctggcggatctctgagactgtcttgtgccgccagcggctacaccttcaccagctactggatgaactgggtccgacaggcccctggcaaaggactggaatgggtcggaatgatcgaccccagcgacagcgagacacactacaaccacatcttcaaggaccgcttcaccatcagcgccgacaccagcaagaataccgcctacctccagatgaactccctgagagccgaggacaccgccgtgtactactgcgccagaaacctgtatctgttcggccagggaaccctggtcacagtgtcatctacgcgtatccagaaccctgatcctgccgtgtaccagctgcgggatagcaagagcagcgacaagagcgtgtgtctgttcaccgacttcgacagccagaccaacgtgtcccagagcaaggactccgacgtgtacatcaccgataagtgcgtgctggacatgcggagcatggacttcaagagcaactccgccgtggcctggtccaacaagtccgatttcgcctgcgccaacgccttcaacaacagcattatccccgaggacacattcttcccaagccccgagagcagctgcggctttaccagcgagagctaccagcagggcgtgctgagcgccaccatcctgtacgagatcctgctgggcaaggccaccctgtacgccgtgctggtgtctgccctggtgctgatggctatggtcaagcggaaggacagccggggacgcgccaagagaagcggatctggcgtgaagcagaccctgaatttcgacctgctgaagctggctggcgacgtggaatccaacccaggcccttctagaggccatatgaccgagtacaagcccacggtgcgcctcgccacccgcgacgacgtccccagggccgtacgcaccctcgccgccgcgttcgccgactaccccgccacgcgccacaccgtcgatccggaccgccacatcgagcgggtcaccgagctgcaagaactcttcctcacgcgcgtcgggctcgacatcggcaaggtgtgggtcgcggacgacggcgccgcggtggcggtctggaccacgccggagagcgtcgaagcgggggcggtgttcgccgagatcggcccgcgcatggccgagttgagcggttcccggctggccgcgcagcaacagatggaaggcctcctggcgccgcaccggcccaaggagcccgcgtggttcctggccaccgtcggcgtctcgcccgaccaccagggcaagggtctgggcagcgccgtcgtgctccccggagtggaggcggccgagcgcgccggggtgcccgccttcctggagacctccgcgccccgcaacctccccttctacgagcggctcggcttcaccgtcaccgccgacgtcgaggtgcccgaaggaccgcgcacctggtgcatgacccgcaagcccggtgcctga

SEQ ID NO: 37079 - DNA, 3366 bp, synthetic construct
  source 1..3366: mol_type = other DNA
atgggacccagactgctgttttgggctctgctgtgtctgctcggcacaggacctgttgaagctggcgtgacacagagccccacacacctgattaagaccagaggccagcaggccacactgagatgcagccctatcagcggccacaccagcgtgtactggtatcagcaggctctcggactgggcctccagttcctgctttggtacgacgagggcgaagagagaaaccggggcaacttccctcctcggttttccggcagacagttccccaactacagcagcgagctgaacgtgaacgccctggaactggaagatagcgccctgtacctgtgtgccagctctctcggcggagatgaactgggagccgatggcaacgagcagttctttggccctggcaccagactgaccgtgctggaaggtaccggcggaggcggatctggcggcggaagcgaattcgacatccagatgacacagagccctagcagcctgtctgccagcgtgggagacagagtgaccatcacatgcaagagcagccagagcctgctggactccgatggcaagacctacctgaactggtatcagcagaagcccggcaaggcccctaagctgctgatctacctggtgtccaagctggatagcggcgtgcccagcagattttctggcagcggcagcggaaccgacttcaccctgacaatatccagcctccagcctgaggacttcgccacctactactgcttccaaggcacccactttccatacaccttcggccagggcaccaaggtggaaatcaaaagactcgaggacctgaagaacgtgttcccacctgaggtggccgtgttcgagcctagcgaggccgagatcagccacacccagaaagccaccctcgtgtgcctggctaccggcttctaccccgaccatgtggaactgtcttggtgggtcaacggcaaagaggtgcacagcggcgtgtgtaccgacccccagccactgaaagaacagcccgccctgaacgacagccggtactgcctgagcagcagactgagagtgtccgccaccttctggcagaacccccggaaccacttcagatgccaggtgcagttctacggcctgagcgagaacgacgagtggacccaggacagagccaagcccgtgacccagatcgtgtctgccgaagcctggggcagagccgattgcgacgtgaagctggtggaaaagagcttcgagacagacaccaacctgaacttccagaacctgagcgtgatcggcttcagaatcctgctgctgaaagtggccggctttaacctgctgatgaccctgcggctgtggtccagcagggccaagcgatctggatctggagcaacaaacttctcactactcaaacaagcaggtgacgtggaggagaatcccgggcctactagtgccaccatggactggatttggcgcatccttttccttgtcggcgctgctaccggcgcccattccgggcccgaagtgcagctggttgaatctggcggaggactggttcaggctggcggatctctgagactgtcttgtgccgccagcggcagaacctttagcatgggctggtttagacaggcccctggcaaagagagagagttcgtcgccgccatcacatactctggcggcagcccttactacgccgactctgtgaagggcagattcaccatcagccgggacaacgccaagaacaccgtgtacctccagatgaacagcctgaagcctgaggacaccgccgtgtactactgcgccgccaatccaacatacggcagcgactggaacgccgagaattggggccagggaacccaagtgacagtgtctagcggatccggcggcggaggatctggcggaggcggatctgggggcggaggctctttcgaagaagtgcagctggttgaatcaggcggaggactggttcagcctggcggatctctgagactgtcttgtgccgccagcggctacaccttcaccagctactggatgaactgggtccgacaggcccctggcaaaggactggaatgggtcggaatgatcgaccccagcgacagcgagacacactacaaccacatcttcaaggaccgcttcaccatcagcgccgacaccagcaagaataccgcctacctccagatgaactccctgagagccgaggacaccgccgtgtactactgcgccagaaacctgtatctgttcggccagggaaccctggtcacagtgtcatctacgcgtatccagaaccctgatcctgccgtgtaccagctgcgggatagcaagagcagcgacaagagcgtgtgtctgttcaccgacttcgacagccagaccaacgtgtcccagagcaaggactccgacgtgtacatcaccgataagtgcgtgctggacatgcggagcatggacttcaagagcaactccgccgtggcctggtccaacaagtccgatttcgcctgcgccaacgccttcaacaacagcattatccccgaggacacattcttcccaagccccgagagcagctgcggctttaccagcgagagctaccagcagggcgtgctgagcgccaccatcctgtacgagatcctgctgggcaaggccaccctgtacgccgtgctggtgtctgccctggtgctgatggctatggtcaagcggaaggacagccggggacgcgccaagagaagcggatctggcgtgaagcagaccctgaatttcgacctgctgaagctggctggcgacgtggaatccaacccaggcccttctagaggccatatgaccgagtacaagcccacggtgcgcctcgccacccgcgacgacgtccccagggccgtacgcaccctcgccgccgcgttcgccgactaccccgccacgcgccacaccgtcgatccggaccgccacatcgagcgggtcaccgagctgcaagaactcttcctcacgcgcgtcgggctcgacatcggcaaggtgtgggtcgcggacgacggcgccgcggtggcggtctggaccacgccggagagcgtcgaagcgggggcggtgttcgccgagatcggcccgcgcatggccgagttgagcggttcccggctggccgcgcagcaacagatggaaggcctcctggcgccgcaccggcccaaggagcccgcgtggttcctggccaccgtcggcgtctcgcccgaccaccagggcaagggtctgggcagcgccgtcgtgctccccggagtggaggcggccgagcgcgccggggtgcccgccttcctggagacctccgcgccccgcaacctccccttctacgagcggctcggcttcaccgtcaccgccgacgtcgaggtgcccgaaggaccgcgcacctggtgcatgacccgcaagcccggtgcctga

SEQ ID NO: 37080 - DNA, 2841 bp, synthetic construct
  source 1..2841: mol_type = other DNA
atggccttaccagtgaccgccttgctcctgccgctggccttgctgctccacgccgccaggccggacatccagatgacacagagccctagcagcctgtctgccagcgtgggagacagagtgaccatcacatgcaagagcagccagagcctgctggactccgatggcaagacctacctgaactggtatcagcagaagcccggcaaggcccctaagctgctgatctacctggtgtccaagctggatagcggcgtgcccagcagattttctggcagcggcagcggaaccgacttcaccctgacaatatccagcctccagcctgaggacttcgccacctactactgcttccaaggcacccactttccatacaccttcggccagggcaccaaggtggaaatcaaaagactcgaggacctgaagaacgtgttcccacctgaggtggccgtgttcgagcctagcgaggccgagatcagccacacccagaaagccaccctcgtgtgcctggctaccggcttctaccccgaccatgtggaactgtcttggtgggtcaacggcaaagaggtgcacagcggcgtgtgtaccgacccccagccactgaaagaacagcccgccctgaacgacagccggtactgcctgagcagcagactgagagtgtccgccaccttctggcagaacccccggaaccacttcagatgccaggtgcagttctacggcctgagcgagaacgacgagtggacccaggacagagccaagcccgtgacccagatcgtgtctgccgaagcctggggcagagccgattgcgacgtgaagctggtggaaaagagcttcgagacagacaccaacctgaacttccagaacctgagcgtgatcggcttcagaatcctgctgctgaaagtggccggctttaacctgctgatgaccctgcggctgtggtccagcagggccaagcgatctggatctggagcaacaaacttctcactactcaaacaagcaggtgacgtggaggagaatcccgggcctactagtgccaccatggactggatttggcgcatccttttccttgtcggcgctgctaccggcgcccattccgggcccatgggaagctggcttgagttctaccacagactcaacgccattgacagcaggctgtgggcacttggcggaagcgaagctgaactcgccgcttttgaaaaagaaattgccgctttcgagtccgagcttcaggcttacaaaggcaaagggaatcctgaggtcgagagcctgagagatcacgctgcccacattagagagtggttgcaggcataccggcacaatggatccggcggcggaggatctggcggaggcggatctgggggcggaggctctttcgaagaagtgcagctggttgaatcaggcggaggactggttcagcctggcggatctctgagactgtcttgtgccgccagcggctacaccttcaccagctactggatgaactgggtccgacaggcccctggcaaaggactggaatgggtcggaatgatcgaccccagcgacagcgagacacactacaaccacatcttcaaggaccgcttcaccatcagcgccgacaccagcaagaataccgcctacctccagatgaactccctgagagccgaggacaccgccgtgtactactgcgccagaaacctgtatctgttcggccagggaaccctggtcacagtgtcatctacgcgtatccagaaccctgatcctgccgtgtaccagctgcgggatagcaagagcagcgacaagagcgtgtgtctgttcaccgacttcgacagccagaccaacgtgtcccagagcaaggactccgacgtgtacatcaccgataagtgcgtgctggacatgcggagcatggacttcaagagcaactccgccgtggcctggtccaacaagtccgatttcgcctgcgccaacgccttcaacaacagcattatccccgaggacacattcttcccaagccccgagagcagctgcggctttaccagcgagagctaccagcagggcgtgctgagcgccaccatcctgtacgagatcctgctgggcaaggccaccctgtacgccgtgctggtgtctgccctggtgctgatggctatggtcaagcggaaggacagccggggacgcgccaagagaagcggatctggcgtgaagcagaccctgaatttcgacctgctgaagctggctggcgacgtggaatccaacccaggcccttctagaggccatatgaccgagtacaagcccacggtgcgcctcgccacccgcgacgacgtccccagggccgtacgcaccctcgccgccgcgttcgccgactaccccgccacgcgccacaccgtcgatccggaccgccacatcgagcgggtcaccgagctgcaagaactcttcctcacgcgcgtcgggctcgacatcggcaaggtgtgggtcgcggacgacggcgccgcggtggcggtctggaccacgccggagagcgtcgaagcgggggcggtgttcgccgagatcggcccgcgcatggccgagttgagcggttcccggctggccgcgcagcaacagatggaaggcctcctggcgccgcaccggcccaaggagcccgcgtggttcctggccaccgtcggcgtctcgcccgaccaccagggcaagggtctgggcagcgccgtcgtgctccccggagtggaggcggccgagcgcgccggggtgcccgccttcctggagacctccgcgccccgcaacctccccttctacgagcggctcggcttcaccgtcaccgccgacgtcgaggtgcccgaaggaccgcgcacctggtgcatgacccgcaagcccggtgcctga

SEQ ID NO: 37081 - DNA, 2841 bp, synthetic construct
  source 1..2841: mol_type = other DNA
atggccttaccagtgaccgccttgctcctgccgctggccttgctgctccacgccgccaggccggcatgcatgggcagttggttcgagttctacgaccggctgaatgccatcgacgccagactgtgggctctcggaggatctgaagctgagctggccgccttcgagaaagagatcgccgcctttgagagcgagctgcaagcctacaaaggcaagggcaaccccgaggtggaaaacctgagagtgcacgccgctgccatcagagaatggctccaggcttacagacacaacggtaccggcggaggcggatctggcggcggaggtagcggtggcggaggatctgaattcgacatccagatgacacagagccctagcagcctgtctgccagcgtgggagacagagtgaccatcacatgcaagagcagccagagcctgctggactccgatggcaagacctacctgaactggtatcagcagaagcccggcaaggcccctaagctgctgatctacctggtgtccaagctggatagcggcgtgcccagcagattttctggcagcggcagcggaaccgacttcaccctgacaatatccagcctccagcctgaggacttcgccacctactactgcttccaaggcacccactttccatacaccttcggccagggcaccaaggtggaaatcaaaagactcgaggacctgaagaacgtgttcccacctgaggtggccgtgttcgagcctagcgaggccgagatcagccacacccagaaagccaccctcgtgtgcctggctaccggcttctaccccgaccatgtggaactgtcttggtgggtcaacggcaaagaggtgcacagcggcgtgtgtaccgacccccagccactgaaagaacagcccgccctgaacgacagccggtactgcctgagcagcagactgagagtgtccgccaccttctggcagaacccccggaaccacttcagatgccaggtgcagttctacggcctgagcgagaacgacgagtggacccaggacagagccaagcccgtgacccagatcgtgtctgccgaagcctggggcagagccgattgcgacgtgaagctggtggaaaagagcttcgagacagacaccaacctgaacttccagaacctgagcgtgatcggcttcagaatcctgctgctgaaagtggccggctttaacctgctgatgaccctgcggctgtggtccagcagggccaagcgatctggatctggagcaacaaacttctcactactcaaacaagcaggtgacgtggaggagaatcccgggcctactagtatggactggatttggcgcatccttttccttgtcggcgctgctaccggcgcgcattccttcgaagaagtgcagctggttgaatcaggcggaggactggttcagcctggcggatctctgagactgtcttgtgccgccagcggctacaccttcaccagctactggatgaactgggtccgacaggcccctggcaaaggactggaatgggtcggaatgatcgaccccagcgacagcgagacacactacaaccacatcttcaaggaccgcttcaccatcagcgccgacaccagcaagaataccgcctacctccagatgaactccctgagagccgaggacaccgccgtgtactactgcgccagaaacctgtatctgttcggccagggaaccctggtcacagtgtcatctacgcgtatccagaaccctgatcctgccgtgtaccagctgcgggatagcaagagcagcgacaagagcgtgtgtctgttcaccgacttcgacagccagaccaacgtgtcccagagcaaggactccgacgtgtacatcaccgataagtgcgtgctggacatgcggagcatggacttcaagagcaactccgccgtggcctggtccaacaagtccgatttcgcctgcgccaacgccttcaacaacagcattatccccgaggacacattcttcccaagccccgagagcagctgcggctttaccagcgagagctaccagcagggcgtgctgagcgccaccatcctgtacgagatcctgctgggcaaggccaccctgtacgccgtgctggtgtctgccctggtgctgatggctatggtcaagcggaaggacagccggggacgcgccaagagaagcggatctggcgtgaagcagaccctgaatttcgacctgctgaagctggctggcgacgtggaatccaacccaggcccttctagaggccatatgaccgagtacaagcccacggtgcgcctcgccacccgcgacgacgtccccagggccgtacgcaccctcgccgccgcgttcgccgactaccccgccacgcgccacaccgtcgatccggaccgccacatcgagcgggtcaccgagctgcaagaactcttcctcacgcgcgtcgggctcgacatcggcaaggtgtgggtcgcggacgacggcgccgcggtggcggtctggaccacgccggagagcgtcgaagcgggggcggtgttcgccgagatcggcccgcgcatggccgagttgagcggttcccggctggccgcgcagcaacagatggaaggcctcctggcgccgcaccggcccaaggagcccgcgtggttcctggccaccgtcggcgtctcgcccgaccaccagggcaagggtctgggcagcgccgtcgtgctccccggagtggaggcggccgagcgcgccggggtgcccgccttcctggagacctccgcgccccgcaacctccccttctacgagcggctcggcttcaccgtcaccgccgacgtcgaggtgcccgaaggaccgcgcacctggtgcatgacccgcaagcccggtgcctga

SEQ ID NO: 37082 - DNA, 3192 bp, synthetic construct
  source 1..3192: mol_type = other DNA
atggccttaccagtgaccgccttgctcctgccgctggccttgctgctccacgccgccaggccggcatgcatggaccccgacctggaaatcagagccgccttcctgcggcagagaaacacagccctgagaacagaggtggccgagctggaacaagaggtgcagcggctggaaaacgaggtgtcccagtacgagacaagatacggccctctcggaggcggaaaaggtaccggcggaggcggatctggcggcggaggtagcggtggcggaggatctgaattcgacatccagatgacacagagccctagcagcctgtctgccagcgtgggagacagagtgaccatcacatgcaagagcagccagagcctgctggactccgatggcaagacctacctgaactggtatcagcagaagcccggcaaggcccctaagctgctgatctacctggtgtccaagctggatagcggcgtgcccagcagattttctggcagcggcagcggaaccgacttcaccctgacaatatccagcctccagcctgaggacttcgccacctactactgcttccaaggcacccactttccatacaccttcggccagggcaccaaggtggaaatcaaaagactcgaggacctgaagaacgtgttcccacctgaggtggccgtgttcgagcctagcgaggccgagatcagccacacccagaaagccaccctcgtgtgcctggctaccggcttctaccccgaccatgtggaactgtcttggtgggtcaacggcaaagaggtgcacagcggcgtgtgtaccgacccccagccactgaaagaacagcccgccctgaacgacagccggtactgcctgagcagcagactgagagtgtccgccaccttctggcagaacccccggaaccacttcagatgccaggtgcagttctacggcctgagcgagaacgacgagtggacccaggacagagccaagcccgtgacccagatcgtgtctgccgaagcctggggcagagccgattgcgacgtgaagctggtggaaaagagcttcgagacagacaccaacctgaacttccagaacctgagcgtgatcggcttcagaatcctgctgctgaaagtggccggctttaacctgctgatgaccctgcggctgtggtccagcagggccaagcgatctggatctggagcaacaaacttctcactactcaaacaagcaggtgacgtggaggagaatcccgggcctactagtgccaccatggactggatttggcgcatccttttccttgtcggcgctgctaccggcgcccattccgggcccgaagtgcagctggttgaatctggcggaggactggttcaggctggcggatctctgagactgtcttgtgccgccagcggcagaacctttagcatgggctggtttagacaggcccctggcaaagagagagagttcgtcgccgccatcacatactctggcggcagcccttactacgccgactctgtgaagggcagattcaccatcagccgggacaacgccaagaacaccgtgtacctccagatgaacagcctgaagcctgaggacaccgccgtgtactactgcgccgccaatccaacatacggcagcgactggaacgccgagaattggggccagggaacccaagtgacagtgtctagcggatccggcggcggaggatctggcggaggcggatctgggggcggaggctctttcgaagaagtgcagctggttgaatcaggcggaggactggttcagcctggcggatctctgagactgtcttgtgccgccagcggctacaccttcaccagctactggatgaactgggtccgacaggcccctggcaaaggactggaatgggtcggaatgatcgaccccagcgacagcgagacacactacaaccacatcttcaaggaccgcttcaccatcagcgccgacaccagcaagaataccgcctacctccagatgaactccctgagagccgaggacaccgccgtgtactactgcgccagaaacctgtatctgttcggccagggaaccctggtcacagtgtcatctacgcgtatccagaaccctgatcctgccgtgtaccagctgcgggatagcaagagcagcgacaagagcgtgtgtctgttcaccgacttcgacagccagaccaacgtgtcccagagcaaggactccgacgtgtacatcaccgataagtgcgtgctggacatgcggagcatggacttcaagagcaactccgccgtggcctggtccaacaagtccgatttcgcctgcgccaacgccttcaacaacagcattatccccgaggacacattcttcccaagccccgagagcagctgcggctttaccagcgagagctaccagcagggcgtgctgagcgccaccatcctgtacgagatcctgctgggcaaggccaccctgtacgccgtgctggtgtctgccctggtgctgatggctatggtcaagcggaaggacagccggggacgcgccaagagaagcggatctggcgtgaagcagaccctgaatttcgacctgctgaagctggctggcgacgtggaatccaacccaggcccttctagaggccatatgaccgagtacaagcccacggtgcgcctcgccacccgcgacgacgtccccagggccgtacgcaccctcgccgccgcgttcgccgactaccccgccacgcgccacaccgtcgatccggaccgccacatcgagcgggtcaccgagctgcaagaactcttcctcacgcgcgtcgggctcgacatcggcaaggtgtgggtcgcggacgacggcgccgcggtggcggtctggaccacgccggagagcgtcgaagcgggggcggtgttcgccgagatcggcccgcgcatggccgagttgagcggttcccggctggccgcgcagcaacagatggaaggcctcctggcgccgcaccggcccaaggagcccgcgtggttcctggccaccgtcggcgtctcgcccgaccaccagggcaagggtctgggcagcgccgtcgtgctccccggagtggaggcggccgagcgcgccggggtgcccgccttcctggagacctccgcgccccgcaacctccccttctacgagcggctcggcttcaccgtcaccgccgacgtcgaggtgcccgaaggaccgcgcacctggtgcatgacccgcaagcccggtgcctga

SEQ ID NO: 37083 - DNA, 2841 bp, synthetic construct
  source 1..2841: mol_type = other DNA
atggccttaccagtgaccgccttgctcctgccgctggccttgctgctccacgccgccaggccggacatccagatgacacagagccctagcagcctgtctgccagcgtgggagacagagtgaccatcacatgcaagagcagccagagcctgctggactccgatggcaagacctacctgaactggtatcagcagaagcccggcaaggcccctaagctgctgatctacctggtgtccaagctggatagcggcgtgcccagcagattttctggcagcggcagcggaaccgacttcaccctgacaatatccagcctccagcctgaggacttcgccacctactactgcttccaaggcacccactttccatacaccttcggccagggcaccaaggtggaaatcaaaagactcgaggacctgaagaacgtgttcccacctgaggtggccgtgttcgagcctagcgaggccgagatcagccacacccagaaagccaccctcgtgtgcctggctaccggcttctaccccgaccatgtggaactgtcttggtgggtcaacggcaaagaggtgcacagcggcgtgtgtaccgacccccagccactgaaagaacagcccgccctgaacgacagccggtactgcctgagcagcagactgagagtgtccgccaccttctggcagaacccccggaaccacttcagatgccaggtgcagttctacggcctgagcgagaacgacgagtggacccaggacagagccaagcccgtgacccagatcgtgtctgccgaagcctggggcagagccgattgcgacgtgaagctggtggaaaagagcttcgagacagacaccaacctgaacttccagaacctgagcgtgatcggcttcagaatcctgctgctgaaagtggccggctttaacctgctgatgaccctgcggctgtggtccagcagggccaagcgatctggatctggagcaacaaacttctcactactcaaacaagcaggtgacgtggaggagaatcccgggcctactagtgccaccatggactggatttggcgcatccttttccttgtcggcgctgctaccggcgcccattccgggcccatgggatcttggagcgagttttacgatcggctgcacgccattcaccaccggctgtatgctctcggaggaagcgaagctgagctggccgcttttgaaaaagaaattgccgctttcgagtccgagcttcaggcttacaaaggcaaagggaatcctgaggtcgaggccctgagagataccgccgccttcatcagaacccggttgcaggcataccggcacaacggatccggcggcggaggatctggcggaggcggatctgggggcggaggctctttcgaagaagtgcagctggttgaatcaggcggaggactggttcagcctggcggatctctgagactgtcttgtgccgccagcggctacaccttcaccagctactggatgaactgggtccgacaggcccctggcaaaggactggaatgggtcggaatgatcgaccccagcgacagcgagacacactacaaccacatcttcaaggaccgcttcaccatcagcgccgacaccagcaagaataccgcctacctccagatgaactccctgagagccgaggacaccgccgtgtactactgcgccagaaacctgtatctgttcggccagggaaccctggtcacagtgtcatctacgcgtatccagaaccctgatcctgccgtgtaccagctgcgggatagcaagagcagcgacaagagcgtgtgtctgttcaccgacttcgacagccagaccaacgtgtcccagagcaaggactccgacgtgtacatcaccgataagtgcgtgctggacatgcggagcatggacttcaagagcaactccgccgtggcctggtccaacaagtccgatttcgcctgcgccaacgccttcaacaacagcattatccccgaggacacattcttcccaagccccgagagcagctgcggctttaccagcgagagctaccagcagggcgtgctgagcgccaccatcctgtacgagatcctgctgggcaaggccaccctgtacgccgtgctggtgtctgccctggtgctgatggctatggtcaagcggaaggacagccggggacgcgccaagagaagcggatctggcgtgaagcagaccctgaatttcgacctgctgaagctggctggcgacgtggaatccaacccaggcccttctagaggccatatgaccgagtacaagcccacggtgcgcctcgccacccgcgacgacgtccccagggccgtacgcaccctcgccgccgcgttcgccgactaccccgccacgcgccacaccgtcgatccggaccgccacatcgagcgggtcaccgagctgcaagaactcttcctcacgcgcgtcgggctcgacatcggcaaggtgtgggtcgcggacgacggcgccgcggtggcggtctggaccacgccggagagcgtcgaagcgggggcggtgttcgccgagatcggcccgcgcatggccgagttgagcggttcccggctggccgcgcagcaacagatggaaggcctcctggcgccgcaccggcccaaggagcccgcgtggttcctggccaccgtcggcgtctcgcccgaccaccagggcaagggtctgggcagcgccgtcgtgctccccggagtggaggcggccgagcgcgccggggtgcccgccttcctggagacctccgcgccccgcaacctccccttctacgagcggctcggcttcaccgtcaccgccgacgtcgaggtgcccgaaggaccgcgcacctggtgcatgacccgcaagcccggtgcctga

SEQ ID NO: 37084 - DNA, 3471 bp, synthetic construct
  source 1..3471: mol_type = other DNA
atggccttaccagtgaccgccttgctcctgccgctggccttgctgctccacgccgccaggccggacatccagatgacacagagccctagcagcctgtctgccagcgtgggagacagagtgaccatcacatgcaagagcagccagagcctgctggactccgatggcaagacctacctgaactggtatcagcagaagcccggcaaggcccctaagctgctgatctacctggtgtccaagctggatagcggcgtgcccagcagattttctggcagcggcagcggaaccgacttcaccctgacaatatccagcctccagcctgaggacttcgccacctactactgcttccaaggcacccactttccatacaccttcggccagggcaccaaggtggaaatcaaaagactcgaggacctgaagaacgtgttcccacctgaggtggccgtgttcgagcctagcgaggccgagatcagccacacccagaaagccaccctcgtgtgcctggctaccggcttctaccccgaccatgtggaactgtcttggtgggtcaacggcaaagaggtgcacagcggcgtgtgtaccgacccccagccactgaaagaacagcccgccctgaacgacagccggtactgcctgagcagcagactgagagtgtccgccaccttctggcagaacccccggaaccacttcagatgccaggtgcagttctacggcctgagcgagaacgacgagtggacccaggacagagccaagcccgtgacccagatcgtgtctgccgaagcctggggcagagccgattgcgacgtgaagctggtggaaaagagcttcgagacagacaccaacctgaacttccagaacctgagcgtgatcggcttcagaatcctgctgctgaaagtggccggctttaacctgctgatgaccctgcggctgtggtccagcagggccaagcgatctggatctggagcaacaaacttctcactactcaaacaagcaggtgacgtggaggagaatcccgggcctactagtaccatggactggatttggcgcatccttttccttgtcggcgctgctaccggcgcccattccctgttcaatcaagaggtgcagatccctctgaccgagagctactgtggcccctgtcctaagaactggatctgctacaagaacaactgctaccagttcttcgacgagagcaagaattggtacgagagccaggccagctgcatgagccagaatgccagcctgctgaaggtgtacagcaaagaggaccaggacctgctgaaactggtcaagagcgcccactggatgggccttgtgcacatccccaccaatggctcttggcagtgggaggacggcagcattctgagccctaacctgctgaccatcatcgagatgcagaagggcgactgcgccctgtacgccagcagctttaagggctacatcgagaattgcagcaccccgaacacctacatctgtatgcagagaaccgtttctggcggaggcggctctggaggaggcggaagtggcggcggaggcgacctctttaatcaagaagtccagattccactcaccgaatcctactgcggaccttgtccaaaaaattggatttgttataagaacaactgttatcaattctttgatgagtctaaaaattggtatgagtcccaggcttcctgcatgtctcagaacgcttctctgctgaaagtctactctaaagaagatcaggatctcctgaagctcgtcaagtctgcccattggatggggctcgtccacattcctaccaacggaagctggcaatgggaagatggctccatcctgtctccaaatctgctcacgattattgaaatgcagaaaggggattgtgctctctacgccagctccttcaagggatatattgagaactgtagcacgcccaatacttatatctgtatgcaacggaccgtgggatccggcggcggaggatctggcggaggcggatctgggggcggaggctctttcgaagaagtgcagctggttgaatcaggcggaggactggttcagcctggcggatctctgagactgtcttgtgccgccagcggctacaccttcaccagctactggatgaactgggtccgacaggcccctggcaaaggactggaatgggtcggaatgatcgaccccagcgacagcgagacacactacaaccacatcttcaaggaccgcttcaccatcagcgccgacaccagcaagaataccgcctacctccagatgaactccctgagagccgaggacaccgccgtgtactactgcgccagaaacctgtatctgttcggccagggaaccctggtcacagtgtcatctacgcgtatccagaaccctgatcctgccgtgtaccagctgcgggatagcaagagcagcgacaagagcgtgtgtctgttcaccgacttcgacagccagaccaacgtgtcccagagcaaggactccgacgtgtacatcaccgataagtgcgtgctggacatgcggagcatggacttcaagagcaactccgccgtggcctggtccaacaagtccgatttcgcctgcgccaacgccttcaacaacagcattatccccgaggacacattcttcccaagccccgagagcagctgcggctttaccagcgagagctaccagcagggcgtgctgagcgccaccatcctgtacgagatcctgctgggcaaggccaccctgtacgccgtgctggtgtctgccctggtgctgatggctatggtcaagcggaaggacagccggggacgcgccaagagaagcggatctggcgtgaagcagaccctgaatttcgacctgctgaagctggctggcgacgtggaatccaacccaggcccttctagaggccatatgaccgagtacaagcccacggtgcgcctcgccacccgcgacgacgtccccagggccgtacgcaccctcgccgccgcgttcgccgactaccccgccacgcgccacaccgtcgatccggaccgccacatcgagcgggtcaccgagctgcaagaactcttcctcacgcgcgtcgggctcgacatcggcaaggtgtgggtcgcggacgacggcgccgcggtggcggtctggaccacgccggagagcgtcgaagcgggggcggtgttcgccgagatcggcccgcgcatggccgagttgagcggttcccggctggccgcgcagcaacagatggaaggcctcctggcgccgcaccggcccaaggagcccgcgtggttcctggccaccgtcggcgtctcgcccgaccaccagggcaagggtctgggcagcgccgtcgtgctccccggagtggaggcggccgagcgcgccggggtgcccgccttcctggagacctccgcgccccgcaacctccccttctacgagcggctcggcttcaccgtcaccgccgacgtcgaggtgcccgaaggaccgcgcacctggtgcatgacccgcaagcccggtgcctga

SEQ ID NO: 37085 - DNA, 1857 bp, synthetic construct
  source 1..1857: mol_type = other DNA
atggccttaccagtgaccgccttgctcctgccgctggccttgctgctccacgccgccaggccggacatccagatgacacagagccctagcagcctgtctgccagcgtgggagacagagtgaccatcacatgcaagagcagccagagcctgctggactccgatggcaagacctacctgaactggtatcagcagaagcccggcaaggcccctaagctgctgatctacctggtgtccaagctggatagcggcgtgcccagcagattttctggcagcggcagcggaaccgacttcaccctgacaatatccagcctccagcctgaggacttcgccacctactactgcttccaaggcacccactttccatacaccttcggccagggcaccaaggtggaaatcaaaagactcgaggacctgaagaacgtgttcccacctgaggtggccgtgttcgagcctagcgaggccgagatcagccacacccagaaagccaccctcgtgtgcctggctaccggcttctaccccgaccatgtggaactgtcttggtgggtcaacggcaaagaggtgcacagcggcgtgtgtaccgacccccagccactgaaagaacagcccgccctgaacgacagccggtactgcctgagcagcagactgagagtgtccgccaccttctggcagaacccccggaaccacttcagatgccaggtgcagttctacggcctgagcgagaacgacgagtggacccaggacagagccaagcccgtgacccagatcgtgtctgccgaagcctggggcagagccgattgcggctttaccagcgagagctaccagcagggcgtgctgagcgccaccaacctgagcgtgatcggcttcagaatcctgctgctgaaagtggccggctttaacctgctgatgaccctgcggctgtggtccagcagggccaagcgatctggatctggagcaacaaacttctcactactcaaacaagcaggtgacgtggaggagaatcccgggcctactagtatggactggatttggcgcatccttttccttgtcggcgctgctaccggcgcgcattccttcgaagaagtgcagctggttgaatcaggcggaggactggttcagcctggcggatctctgagactgtcttgtgccgccagcggctacaccttcaccagctactggatgaactgggtccgacaggcccctggcaaaggactggaatgggtcggaatgatcgaccccagcgacagcgagacacactacaaccacatcttcaaggaccgcttcaccatcagcgccgacaccagcaagaataccgcctacctccagatgaactccctgagagccgaggacaccgccgtgtactactgcgccagaaacctgtatctgttcggccagggaaccctggtcacagtgtcatctacgcgtatccagaaccctgatcctgccgtgtaccagctgcgggatagcaagagcagcgacaagagcgtgtgtctgttcaccgacttcgacagccagaccaacgtgtcccagagcaaggactccgacgtgtacatcaccgataagtgcgtgctggacatgcggagcatggacttcaagagcaactccgccgtggcctggtccaacaagtccgatttcgcctgcgccaacgccttcaacaacagcattatccccgaggacacattcttcccaagccccgagagcagctgcgacgtgaagctggtggaaaagagcttcgagacagacaccaacctgaacttccagatcctgtacgagatcctgctgggcaaggccaccctgtacgccgtgctggtgtctgccctggtgctgatggctatggtcaagcggaaggacagccgggga

SEQ ID NO: 37086 - DNA, 1869 bp, synthetic construct
  source 1..1869: mol_type = other DNA
atggccttaccagtgaccgccttgctcctgccgctggccttgctgctccacgccgccaggccggacatccagatgacacagagccctagcagcctgtctgccagcgtgggagacagagtgaccatcacatgcaagagcagccagagcctgctggactccgatggcaagacctacctgaactggtatcagcagaagcccggcaaggcccctaagctgctgatctacctggtgtccaagctggatagcggcgtgcccagcagattttctggcagcggcagcggaaccgacttcaccctgacaatatccagcctccagcctgaggacttcgccacctactactgcttccaaggcacccactttccatacaccttcggccagggcaccaaggtggaaatcaaaagactcgagatccagaaccctgatcctgccgtgtaccagctgcgggatagcaagagcagcgacaagagcgtgtgtctgttcaccgacttcgacagccagaccaacgtgtcccagagcaaggactccgacgtgtacatcaccgataagtgcgtgctggacatgcggagcatggacttcaagagcaactccgccgtggcctggtccaacaagtccgatttcgcctgcgccaacgccttcaacaacagcattatccccgaggacacattcttcccaagccccgagagcagctgcgacgtgaagctggtggaaaagagcttcgagacagacaccaacctgaacttccagatcctgtacgagatcctgctgggcaaggccaccctgtacgccgtgctggtgtctgccctggtgctgatggctatggtcaagcggaaggacagccggggacgcgccaagagaagcggatctggcgtgaagcagaccctgaatttcgacctgctgaagctggctggcgacgtggaatccaacccaggccctactagtatggactggatttggcgcatccttttccttgtcggcgctgctaccggcgcgcattccttcgaagaagtgcagctggttgaatcaggcggaggactggttcagcctggcggatctctgagactgtcttgtgccgccagcggctacaccttcaccagctactggatgaactgggtccgacaggcccctggcaaaggactggaatgggtcggaatgatcgaccccagcgacagcgagacacactacaaccacatcttcaaggaccgcttcaccatcagcgccgacaccagcaagaataccgcctacctccagatgaactccctgagagccgaggacaccgccgtgtactactgcgccagaaacctgtatctgttcggccagggaaccctggtcacagtgtcatctacgcgtgaggacctgaagaacgtgttcccacctgaggtggccgtgttcgagcctagcgaggccgagatcagccacacccagaaagccaccctcgtgtgcctggctaccggcttctaccccgaccatgtggaactgtcttggtgggtcaacggcaaagaggtgcacagcggcgtgtgtaccgacccccagccactgaaagaacagcccgccctgaacgacagccggtactgcctgagcagcagactgagagtgtccgccaccttctggcagaacccccggaaccacttcagatgccaggtgcagttctacggcctgagcgagaacgacgagtggacccaggacagagccaagcccgtgacccagatcgtgtctgccgaagcctggggcagagccgattgcggctttaccagcgagagctaccagcagggcgtgctgagcgccaccaacctgagcgtgatcggcttcagaatcctgctgctgaaagtggccggctttaacctgctgatgaccctgcggctgtggtccagc

SEQ ID NO: 37087 - DNA, 2262 bp, synthetic construct
  source 1..2262: mol_type = other DNA
atggccttaccagtgaccgccttgctcctgccgctggccttgctgctccacgccgccaggccggaagtgcagctggttgaatctggcggaggactggttcagcctggcggatctctgagactgtcttgtgccgccagcggcttcagcttcagcgacttttggatgagctgggtccgacaggcccctggcaaaggacttgaatgggtcgccacaatcagccaggccggcagcgagaaggactacgtggactctgtgaagggcagattcaccatcagccgggacaacgccaagaagtccctgtacctccagatgaacagcctgagagccgaggacaccgccgtgtactattgtgcctctggcgtgtacagcttcgactacagaggccagggcaccctggtcacagtctcttctggtaccggcggaggcggatctggcggcggaggtagcggtggcggaggatctgaattcgacatccagatgacacagagccctagcagcctgtctgccagcgtgggagacagagtgaccatcacatgcaagagcagccagagcctgctggactccgatggcaagacctacctgaactggtatcagcagaagcccggcaaggcccctaagctgctgatctacctggtgtccaagctggatagcggcgtgcccagcagattttctggcagcggcagcggaaccgacttcaccctgacaatatccagcctccagcctgaggacttcgccacctactactgcttccaaggcacccactttccatacaccttcggccagggcaccaaggtggaaatcaaaagactcgaggacctgaagaacgtgttcccacctgaggtggccgtgttcgagcctagcgaggccgagatcagccacacccagaaagccaccctcgtgtgcctggctaccggcttctaccccgaccatgtggaactgtcttggtgggtcaacggcaaagaggtgcacagcggcgtgtgtaccgacccccagccactgaaagaacagcccgccctgaacgacagccggtactgcctgagcagcagactgagagtgtccgccaccttctggcagaacccccggaaccacttcagatgccaggtgcagttctacggcctgagcgagaacgacgagtggacccaggacagagccaagcccgtgacccagatcgtgtctgccgaagcctggggcagagccgattgcggctttaccagcgagagctaccagcagggcgtgctgagcgccaccaacctgagcgtgatcggcttcagaatcctgctgctgaaagtggccggctttaacctgctgatgaccctgcggctgtggtccagcagggccaagcgatctggatctggagcaacaaacttctcactactcaaacaagcaggtgacgtggaggagaatcccgggcctactagtatggactggatttggcgcatccttttccttgtcggcgctgctaccggcgcgcattccttcgaagaagtgcagctggttgaatcaggcggaggactggttcagcctggcggatctctgagactgtcttgtgccgccagcggctacaccttcaccagctactggatgaactgggtccgacaggcccctggcaaaggactggaatgggtcggaatgatcgaccccagcgacagcgagacacactacaaccacatcttcaaggaccgcttcaccatcagcgccgacaccagcaagaataccgcctacctccagatgaactccctgagagccgaggacaccgccgtgtactactgcgccagaaacctgtatctgttcggccagggaaccctggtcacagtgtcatctacgcgtatccagaaccctgatcctgccgtgtaccagctgcgggatagcaagagcagcgacaagagcgtgtgtctgttcaccgacttcgacagccagaccaacgtgtcccagagcaaggactccgacgtgtacatcaccgataagtgcgtgctggacatgcggagcatggacttcaagagcaactccgccgtggcctggtccaacaagtccgatttcgcctgcgccaacgccttcaacaacagcattatccccgaggacacattcttcccaagccccgagagcagctgcgacgtgaagctggtggaaaagagcttcgagacagacaccaacctgaacttccagatcctgtacgagatcctgctgggcaaggccaccctgtacgccgtgctggtgtctgccctggtgctgatggctatggtcaagcggaaggacagccgggga

SEQ ID NO: 37088 - DNA, 2274 bp, synthetic construct
  source 1..2274: mol_type = other DNA
atggccttaccagtgaccgccttgctcctgccgctggccttgctgctccacgccgccaggccggaagtgcagctggttgaatctggcggaggactggttcagcctggcggatctctgagactgtcttgtgccgccagcggcttcagcttcagcgacttttggatgagctgggtccgacaggcccctggcaaaggacttgaatgggtcgccacaatcagccaggccggcagcgagaaggactacgtggactctgtgaagggcagattcaccatcagccgggacaacgccaagaagtccctgtacctccagatgaacagcctgagagccgaggacaccgccgtgtactattgtgcctctggcgtgtacagcttcgactacagaggccagggcaccctggtcacagtctcttctggtaccggcggaggcggatctggcggcggaggtagcggtggcggaggatctgaattcgacatccagatgacacagagccctagcagcctgtctgccagcgtgggagacagagtgaccatcacatgcaagagcagccagagcctgctggactccgatggcaagacctacctgaactggtatcagcagaagcccggcaaggcccctaagctgctgatctacctggtgtccaagctggatagcggcgtgcccagcagattttctggcagcggcagcggaaccgacttcaccctgacaatatccagcctccagcctgaggacttcgccacctactactgcttccaaggcacccactttccatacaccttcggccagggcaccaaggtggaaatcaaaagactcgagatccagaaccctgatcctgccgtgtaccagctgcgggatagcaagagcagcgacaagagcgtgtgtctgttcaccgacttcgacagccagaccaacgtgtcccagagcaaggactccgacgtgtacatcaccgataagtgcgtgctggacatgcggagcatggacttcaagagcaactccgccgtggcctggtccaacaagtccgatttcgcctgcgccaacgccttcaacaacagcattatccccgaggacacattcttcccaagccccgagagcagctgcgacgtgaagctggtggaaaagagcttcgagacagacaccaacctgaacttccagatcctgtacgagatcctgctgggcaaggccaccctgtacgccgtgctggtgtctgccctggtgctgatggctatggtcaagcggaaggacagccggggacgcgccaagagaagcggatctggcgtgaagcagaccctgaatttcgacctgctgaagctggctggcgacgtggaatccaacccaggccctactagtatggactggatttggcgcatccttttccttgtcggcgctgctaccggcgcgcattccttcgaagaagtgcagctggttgaatcaggcggaggactggttcagcctggcggatctctgagactgtcttgtgccgccagcggctacaccttcaccagctactggatgaactgggtccgacaggcccctggcaaaggactggaatgggtcggaatgatcgaccccagcgacagcgagacacactacaaccacatcttcaaggaccgcttcaccatcagcgccgacaccagcaagaataccgcctacctccagatgaactccctgagagccgaggacaccgccgtgtactactgcgccagaaacctgtatctgttcggccagggaaccctggtcacagtgtcatctacgcgtgaggacctgaagaacgtgttcccacctgaggtggccgtgttcgagcctagcgaggccgagatcagccacacccagaaagccaccctcgtgtgcctggctaccggcttctaccccgaccatgtggaactgtcttggtgggtcaacggcaaagaggtgcacagcggcgtgtgtaccgacccccagccactgaaagaacagcccgccctgaacgacagccggtactgcctgagcagcagactgagagtgtccgccaccttctggcagaacccccggaaccacttcagatgccaggtgcagttctacggcctgagcgagaacgacgagtggacccaggacagagccaagcccgtgacccagatcgtgtctgccgaagcctggggcagagccgattgcggctttaccagcgagagctaccagcagggcgtgctgagcgccaccaacctgagcgtgatcggcttcagaatcctgctgctgaaagtggccggctttaacctgctgatgaccctgcggctgtggtccagc

SEQ ID NO: 37089 - DNA, 2673 bp, synthetic construct
  source 1..2673: mol_type = other DNA
atggccttaccagtgaccgccttgctcctgccgctggccttgctgctccacgccgccaggccggaagtgcagctggttgaatctggcggaggactggttcagcctggcggatctctgagactgtcttgtgccgccagcggcttcagcttcagcgacttttggatgagctgggtccgacaggcccctggcaaaggacttgaatgggtcgccacaatcagccaggccggcagcgagaaggactacgtggactctgtgaagggcagattcaccatcagccgggacaacgccaagaagtccctgtacctccagatgaacagcctgagagccgaggacaccgccgtgtactattgtgcctctggcgtgtacagcttcgactacagaggccagggcaccctggtcacagtctcttctggtaccggcggaggcggatctggcggcggaggtagcggtggcggaggatctgaattcgacatccagatgacacagagccctagcagcctgtctgccagcgtgggagacagagtgaccatcacatgcaagagcagccagagcctgctggactccgatggcaagacctacctgaactggtatcagcagaagcccggcaaggcccctaagctgctgatctacctggtgtccaagctggatagcggcgtgcccagcagattttctggcagcggcagcggaaccgacttcaccctgacaatatccagcctccagcctgaggacttcgccacctactactgcttccaaggcacccactttccatacaccttcggccagggcaccaaggtggaaatcaaaagactcgaggacctgaagaacgtgttcccacctgaggtggccgtgttcgagcctagcgaggccgagatcagccacacccagaaagccaccctcgtgtgcctggctaccggcttctaccccgaccatgtggaactgtcttggtgggtcaacggcaaagaggtgcacagcggcgtgtgtaccgacccccagccactgaaagaacagcccgccctgaacgacagccggtactgcctgagcagcagactgagagtgtccgccaccttctggcagaacccccggaaccacttcagatgccaggtgcagttctacggcctgagcgagaacgacgagtggacccaggacagagccaagcccgtgacccagatcgtgtctgccgaagcctggggcagagccgattgcggctttaccagcgagagctaccagcagggcgtgctgagcgccaccaacctgagcgtgatcggcttcagaatcctgctgctgaaagtggccggctttaacctgctgatgaccctgcggctgtggtccagcagggccaagcgatctggatctggagcaacaaacttctcactactcaaacaagcaggtgacgtggaggagaatcccgggcctactagtatggactggatttggcgcatccttttccttgtcggcgctgctaccggcgcgcattccgggccccagctccagctgcaagagtctggacctggcctggtcaagcctagcgagacactgagcctgacctgtaccgtgtccggcgatagcatcagcagcggcgattactactggggctggatcagacagcctcctggcaaaggactggaatggatcggccacatctactacagcggcgtgacctactacaaccccagcctgaagtccagagtgaccatcagcgtggacaccagccggaaccagttctccctgaagctgtctagcgtgacagccgccgataccgccgtgtactactgcaccagagaggacagcagcaactggcggagtagaggccagggaacactggtcacagttagctctggatccggcggaggcggaagtggaggcggaggatctggcggcggaggctctttcgaagaagtgcagctggttgaatcaggcggaggactggttcagcctggcggatctctgagactgtcttgtgccgccagcggctacaccttcaccagctactggatgaactgggtccgacaggcccctggcaaaggactggaatgggtcggaatgatcgaccccagcgacagcgagacacactacaaccacatcttcaaggaccgcttcaccatcagcgccgacaccagcaagaataccgcctacctccagatgaactccctgagagccgaggacaccgccgtgtactactgcgccagaaacctgtatctgttcggccagggaaccctggtcacagtgtcatctacgcgtatccagaaccctgatcctgccgtgtaccagctgcgggatagcaagagcagcgacaagagcgtgtgtctgttcaccgacttcgacagccagaccaacgtgtcccagagcaaggactccgacgtgtacatcaccgataagtgcgtgctggacatgcggagcatggacttcaagagcaactccgccgtggcctggtccaacaagtccgatttcgcctgcgccaacgccttcaacaacagcattatccccgaggacacattcttcccaagccccgagagcagctgcgacgtgaagctggtggaaaagagcttcgagacagacaccaacctgaacttccagatcctgtacgagatcctgctgggcaaggccaccctgtacgccgtgctggtgtctgccctggtgctgatggctatggtcaagcggaaggacagccgggga

SEQ ID NO: 37090 - DNA, 2685 bp, synthetic construct
  source 1..2685: mol_type = other DNA
atggccttaccagtgaccgccttgctcctgccgctggccttgctgctccacgccgccaggccggaagtgcagctggttgaatctggcggaggactggttcagcctggcggatctctgagactgtcttgtgccgccagcggcttcagcttcagcgacttttggatgagctgggtccgacaggcccctggcaaaggacttgaatgggtcgccacaatcagccaggccggcagcgagaaggactacgtggactctgtgaagggcagattcaccatcagccgggacaacgccaagaagtccctgtacctccagatgaacagcctgagagccgaggacaccgccgtgtactattgtgcctctggcgtgtacagcttcgactacagaggccagggcaccctggtcacagtctcttctggtaccggcggaggcggatctggcggcggaggtagcggtggcggaggatctgaattcgacatccagatgacacagagccctagcagcctgtctgccagcgtgggagacagagtgaccatcacatgcaagagcagccagagcctgctggactccgatggcaagacctacctgaactggtatcagcagaagcccggcaaggcccctaagctgctgatctacctggtgtccaagctggatagcggcgtgcccagcagattttctggcagcggcagcggaaccgacttcaccctgacaatatccagcctccagcctgaggacttcgccacctactactgcttccaaggcacccactttccatacaccttcggccagggcaccaaggtggaaatcaaaagactcgagatccagaaccctgatcctgccgtgtaccagctgcgggatagcaagagcagcgacaagagcgtgtgtctgttcaccgacttcgacagccagaccaacgtgtcccagagcaaggactccgacgtgtacatcaccgataagtgcgtgctggacatgcggagcatggacttcaagagcaactccgccgtggcctggtccaacaagtccgatttcgcctgcgccaacgccttcaacaacagcattatccccgaggacacattcttcccaagccccgagagcagctgcgacgtgaagctggtggaaaagagcttcgagacagacaccaacctgaacttccagatcctgtacgagatcctgctgggcaaggccaccctgtacgccgtgctggtgtctgccctggtgctgatggctatggtcaagcggaaggacagccggggacgcgccaagagaagcggatctggcgtgaagcagaccctgaatttcgacctgctgaagctggctggcgacgtggaatccaacccaggccctactagtatggactggatttggcgcatccttttccttgtcggcgctgctaccggcgcgcattccgggccccagctccagctgcaagagtctggacctggcctggtcaagcctagcgagacactgagcctgacctgtaccgtgtccggcgatagcatcagcagcggcgattactactggggctggatcagacagcctcctggcaaaggactggaatggatcggccacatctactacagcggcgtgacctactacaaccccagcctgaagtccagagtgaccatcagcgtggacaccagccggaaccagttctccctgaagctgtctagcgtgacagccgccgataccgccgtgtactactgcaccagagaggacagcagcaactggcggagtagaggccagggaacactggtcacagttagctctggatccggcggaggcggaagtggaggcggaggatctggcggcggaggctctttcgaagaagtgcagctggttgaatcaggcggaggactggttcagcctggcggatctctgagactgtcttgtgccgccagcggctacaccttcaccagctactggatgaactgggtccgacaggcccctggcaaaggactggaatgggtcggaatgatcgaccccagcgacagcgagacacactacaaccacatcttcaaggaccgcttcaccatcagcgccgacaccagcaagaataccgcctacctccagatgaactccctgagagccgaggacaccgccgtgtactactgcgccagaaacctgtatctgttcggccagggaaccctggtcacagtgtcatctacgcgtgaggacctgaagaacgtgttcccacctgaggtggccgtgttcgagcctagcgaggccgagatcagccacacccagaaagccaccctcgtgtgcctggctaccggcttctaccccgaccatgtggaactgtcttggtgggtcaacggcaaagaggtgcacagcggcgtgtgtaccgacccccagccactgaaagaacagcccgccctgaacgacagccggtactgcctgagcagcagactgagagtgtccgccaccttctggcagaacccccggaaccacttcagatgccaggtgcagttctacggcctgagcgagaacgacgagtggacccaggacagagccaagcccgtgacccagatcgtgtctgccgaagcctggggcagagccgattgcggctttaccagcgagagctaccagcagggcgtgctgagcgccaccaacctgagcgtgatcggcttcagaatcctgctgctgaaagtggccggctttaacctgctgatgaccctgcggctgtggtccagc

SEQ ID NO: 37091 - DNA, 2169 bp, synthetic construct
  source 1..2169: mol_type = other DNA
atggccttaccagtgaccgccttgctcctgccgctggccttgctgctccacgccgccaggccggacatccagatgacacagagccctagcagcctgtctgccagcgtgggagacagagtgaccatcacatgcaagagcagccagagcctgctggactccgatggcaagacctacctgaactggtatcagcagaagcccggcaaggcccctaagctgctgatctacctggtgtccaagctggatagcggcgtgcccagcagattttctggcagcggcagcggaaccgacttcaccctgacaatatccagcctccagcctgaggacttcgccacctactactgcttccaaggcacccactttccatacaccttcggccagggcaccaaggtggaaatcaaaagactcgaggacctgaagaacgtgttcccacctgaggtggccgtgttcgagcctagcgaggccgagatcagccacacccagaaagccaccctcgtgtgcctggctaccggcttctaccccgaccatgtggaactgtcttggtgggtcaacggcaaagaggtgcacagcggcgtgtgtaccgacccccagccactgaaagaacagcccgccctgaacgacagccggtactgcctgagcagcagactgagagtgtccgccaccttctggcagaacccccggaaccacttcagatgccaggtgcagttctacggcctgagcgagaacgacgagtggacccaggacagagccaagcccgtgacccagatcgtgtctgccgaagcctggggcagagccgatgatgtgattaagatccactggcaggaaaagaagtccaacaccatcctgggcagccaggaaggcaacaccatgaagaccaacgacacctacatgaagttcagctggctgaccgtgcccgagaagtccctggacaaagaacacagatgcatcgtgcggcacgaaaacaacaagaacggcgtggaccaggaaatcatcttcccacccatcaagaccgatgtgattacaatggaccccaaggacaactgctccaaggacgccaacgataccctgctgctccagctgaccaacaccagcgcctactacatgtacttgttgctgctgctgaagtccgtggtgtacttcgccatcatcacatgctgcctgctgatggctatggtcaagcggaaggacagccggggaagggccaagcgatctggatctggagcaacaaacttctcactactcaaacaagcaggtgacgtggaggagaatcccgggcctactagtatggactggatttggcgcatccttttccttgtcggcgctgctaccggcgcgcattccttcgaagaagtgcagctggttgaatcaggcggaggactggttcagcctggcggatctctgagactgtcttgtgccgccagcggctacaccttcaccagctactggatgaactgggtccgacaggcccctggcaaaggactggaatgggtcggaatgatcgaccccagcgacagcgagacacactacaaccacatcttcaaggaccgcttcaccatcagcgccgacaccagcaagaataccgcctacctccagatgaactccctgagagccgaggacaccgccgtgtactactgcgccagaaacctgtatctgttcggccagggaaccctggtcacagtgtcatctacgcgtatccagaaccctgatcctgccgtgtaccagctgcgggatagcaagagcagcgacaagagcgtgtgtctgttcaccgacttcgacagccagaccaacgtgtcccagagcaaggactccgacgtgtacatcaccgataagtgcgtgctggacatgcggagcatggacttcaagagcaactccgccgtggcctggtccaacaagtccgatttcgcctgcgccaacgccttcaacaacagcattatccccgaggacacattcttcccaagccccgagagcagcgactccaccgaccacgtgaagcccaaagagacagagaacaccaagcagcccagcaagagctgccacaagcccaaggccatcgtgcacaccgagaaagtgaacatgatgagcctgaccgtgctgggcctgcggatgctgttcgccaaaaccgtggccgtgaacttcctgctgaccgccaagctgttcttcctcctcaccgcc

SEQ ID NO: 37092 - DNA, 2181 bp, synthetic construct
  source 1..2181: mol_type = other DNA
atggccttaccagtgaccgccttgctcctgccgctggccttgctgctccacgccgccaggccggacatccagatgacacagagccctagcagcctgtctgccagcgtgggagacagagtgaccatcacatgcaagagcagccagagcctgctggactccgatggcaagacctacctgaactggtatcagcagaagcccggcaaggcccctaagctgctgatctacctggtgtccaagctggatagcggcgtgcccagcagattttctggcagcggcagcggaaccgacttcaccctgacaatatccagcctccagcctgaggacttcgccacctactactgcttccaaggcacccactttccatacaccttcggccagggcaccaaggtggaaatcaaaagactcgagatccagaaccctgatcctgccgtgtaccagctgcgggatagcaagagcagcgacaagagcgtgtgtctgttcaccgacttcgacagccagaccaacgtgtcccagagcaaggactccgacgtgtacatcaccgataagtgcgtgctggacatgcggagcatggacttcaagagcaactccgccgtggcctggtccaacaagtccgatttcgcctgcgccaacgccttcaacaacagcattatccccgaggacacattcttcccaagccccgagagcagcgactccaccgaccacgtgaagcccaaagagacagagaacaccaagcagcccagcaagagctgccacaagcccaaggccatcgtgcacaccgagaaagtgaacatgatgagcctgaccgtgctgggcctgcggatgctgttcgccaaaaccgtggccgtgaacttcctgctgaccgccaagctgttcttcctcctcaccgcccgcgccaagagaagcggatctggcgtgaagcagaccctgaatttcgacctgctgaagctggctggcgacgtggaatccaacccaggccctactagtatggactggatttggcgcatccttttccttgtcggcgctgctaccggcgcgcattccttcgaagaagtgcagctggttgaatcaggcggaggactggttcagcctggcggatctctgagactgtcttgtgccgccagcggctacaccttcaccagctactggatgaactgggtccgacaggcccctggcaaaggactggaatgggtcggaatgatcgaccccagcgacagcgagacacactacaaccacatcttcaaggaccgcttcaccatcagcgccgacaccagcaagaataccgcctacctccagatgaactccctgagagccgaggacaccgccgtgtactactgcgccagaaacctgtatctgttcggccagggaaccctggtcacagtgtcatctacgcgtgaggacctgaagaacgtgttcccacctgaggtggccgtgttcgagcctagcgaggccgagatcagccacacccagaaagccaccctcgtgtgcctggctaccggcttctaccccgaccatgtggaactgtcttggtgggtcaacggcaaagaggtgcacagcggcgtgtgtaccgacccccagccactgaaagaacagcccgccctgaacgacagccggtactgcctgagcagcagactgagagtgtccgccaccttctggcagaacccccggaaccacttcagatgccaggtgcagttctacggcctgagcgagaacgacgagtggacccaggacagagccaagcccgtgacccagatcgtgtctgccgaagcctggggcagagccgatgatgtgattaagatccactggcaggaaaagaagtccaacaccatcctgggcagccaggaaggcaacaccatgaagaccaacgacacctacatgaagttcagctggctgaccgtgcccgagaagtccctggacaaagaacacagatgcatcgtgcggcacgaaaacaacaagaacggcgtggaccaggaaatcatcttcccacccatcaagaccgatgtgattacaatggaccccaaggacaactgctccaaggacgccaacgataccctgctgctccagctgaccaacaccagcgcctactacatgtacttgttgctgctgctgaagtccgtggtgtacttcgccatcatcacatgctgcctgctgatggctatggtcaagcggaaggacagccgggga

SEQ ID NO: 37093 - DNA, 2574 bp, synthetic construct
  source 1..2574: mol_type = other DNA
atggccttaccagtgaccgccttgctcctgccgctggccttgctgctccacgccgccaggccggaagtgcagctggttgaatctggcggaggactggttcagcctggcggatctctgagactgtcttgtgccgccagcggcttcagcttcagcgacttttggatgagctgggtccgacaggcccctggcaaaggacttgaatgggtcgccacaatcagccaggccggcagcgagaaggactacgtggactctgtgaagggcagattcaccatcagccgggacaacgccaagaagtccctgtacctccagatgaacagcctgagagccgaggacaccgccgtgtactattgtgcctctggcgtgtacagcttcgactacagaggccagggcaccctggtcacagtctcttctggtaccggcggaggcggatctggcggcggaggtagcggtggcggaggatctgaattcgacatccagatgacacagagccctagcagcctgtctgccagcgtgggagacagagtgaccatcacatgcaagagcagccagagcctgctggactccgatggcaagacctacctgaactggtatcagcagaagcccggcaaggcccctaagctgctgatctacctggtgtccaagctggatagcggcgtgcccagcagattttctggcagcggcagcggaaccgacttcaccctgacaatatccagcctccagcctgaggacttcgccacctactactgcttccaaggcacccactttccatacaccttcggccagggcaccaaggtggaaatcaaaagactcgaggacctgaagaacgtgttcccacctgaggtggccgtgttcgagcctagcgaggccgagatcagccacacccagaaagccaccctcgtgtgcctggctaccggcttctaccccgaccatgtggaactgtcttggtgggtcaacggcaaagaggtgcacagcggcgtgtgtaccgacccccagccactgaaagaacagcccgccctgaacgacagccggtactgcctgagcagcagactgagagtgtccgccaccttctggcagaacccccggaaccacttcagatgccaggtgcagttctacggcctgagcgagaacgacgagtggacccaggacagagccaagcccgtgacccagatcgtgtctgccgaagcctggggcagagccgatgatgtgattaagatccactggcaggaaaagaagtccaacaccatcctgggcagccaggaaggcaacaccatgaagaccaacgacacctacatgaagttcagctggctgaccgtgcccgagaagtccctggacaaagaacacagatgcatcgtgcggcacgaaaacaacaagaacggcgtggaccaggaaatcatcttcccacccatcaagaccgatgtgattacaatggaccccaaggacaactgctccaaggacgccaacgataccctgctgctccagctgaccaacaccagcgcctactacatgtacttgttgctgctgctgaagtccgtggtgtacttcgccatcatcacatgctgcctgctgatggctatggtcaagcggaaggacagccggggaagggccaagcgatctggatctggagcaacaaacttctcactactcaaacaagcaggtgacgtggaggagaatcccgggcctactagtatggactggatttggcgcatccttttccttgtcggcgctgctaccggcgcgcattccttcgaagaagtgcagctggttgaatcaggcggaggactggttcagcctggcggatctctgagactgtcttgtgccgccagcggctacaccttcaccagctactggatgaactgggtccgacaggcccctggcaaaggactggaatgggtcggaatgatcgaccccagcgacagcgagacacactacaaccacatcttcaaggaccgcttcaccatcagcgccgacaccagcaagaataccgcctacctccagatgaactccctgagagccgaggacaccgccgtgtactactgcgccagaaacctgtatctgttcggccagggaaccctggtcacagtgtcatctacgcgtatccagaaccctgatcctgccgtgtaccagctgcgggatagcaagagcagcgacaagagcgtgtgtctgttcaccgacttcgacagccagaccaacgtgtcccagagcaaggactccgacgtgtacatcaccgataagtgcgtgctggacatgcggagcatggacttcaagagcaactccgccgtggcctggtccaacaagtccgatttcgcctgcgccaacgccttcaacaacagcattatccccgaggacacattcttcccaagccccgagagcagcgactccaccgaccacgtgaagcccaaagagacagagaacaccaagcagcccagcaagagctgccacaagcccaaggccatcgtgcacaccgagaaagtgaacatgatgagcctgaccgtgctgggcctgcggatgctgttcgccaaaaccgtggccgtgaacttcctgctgaccgccaagctgttcttcctcctcaccgcc

SEQ ID NO: 37094 - DNA, 2586 bp, synthetic construct
  source 1..2586: mol_type = other DNA
atggccttaccagtgaccgccttgctcctgccgctggccttgctgctccacgccgccaggccggaagtgcagctggttgaatctggcggaggactggttcagcctggcggatctctgagactgtcttgtgccgccagcggcttcagcttcagcgacttttggatgagctgggtccgacaggcccctggcaaaggacttgaatgggtcgccacaatcagccaggccggcagcgagaaggactacgtggactctgtgaagggcagattcaccatcagccgggacaacgccaagaagtccctgtacctccagatgaacagcctgagagccgaggacaccgccgtgtactattgtgcctctggcgtgtacagcttcgactacagaggccagggcaccctggtcacagtctcttctggtaccggcggaggcggatctggcggcggaggtagcggtggcggaggatctgaattcgacatccagatgacacagagccctagcagcctgtctgccagcgtgggagacagagtgaccatcacatgcaagagcagccagagcctgctggactccgatggcaagacctacctgaactggtatcagcagaagcccggcaaggcccctaagctgctgatctacctggtgtccaagctggatagcggcgtgcccagcagattttctggcagcggcagcggaaccgacttcaccctgacaatatccagcctccagcctgaggacttcgccacctactactgcttccaaggcacccactttccatacaccttcggccagggcaccaaggtggaaatcaaaagactcgagatccagaaccctgatcctgccgtgtaccagctgcgggatagcaagagcagcgacaagagcgtgtgtctgttcaccgacttcgacagccagaccaacgtgtcccagagcaaggactccgacgtgtacatcaccgataagtgcgtgctggacatgcggagcatggacttcaagagcaactccgccgtggcctggtccaacaagtccgatttcgcctgcgccaacgccttcaacaacagcattatccccgaggacacattcttcccaagccccgagagcagcgactccaccgaccacgtgaagcccaaagagacagagaacaccaagcagcccagcaagagctgccacaagcccaaggccatcgtgcacaccgagaaagtgaacatgatgagcctgaccgtgctgggcctgcggatgctgttcgccaaaaccgtggccgtgaacttcctgctgaccgccaagctgttcttcctcctcaccgcccgcgccaagagaagcggatctggcgtgaagcagaccctgaatttcgacctgctgaagctggctggcgacgtggaatccaacccaggccctactagtatggactggatttggcgcatccttttccttgtcggcgctgctaccggcgcgcattccttcgaagaagtgcagctggttgaatcaggcggaggactggttcagcctggcggatctctgagactgtcttgtgccgccagcggctacaccttcaccagctactggatgaactgggtccgacaggcccctggcaaaggactggaatgggtcggaatgatcgaccccagcgacagcgagacacactacaaccacatcttcaaggaccgcttcaccatcagcgccgacaccagcaagaataccgcctacctccagatgaactccctgagagccgaggacaccgccgtgtactactgcgccagaaacctgtatctgttcggccagggaaccctggtcacagtgtcatctacgcgtgaggacctgaagaacgtgttcccacctgaggtggccgtgttcgagcctagcgaggccgagatcagccacacccagaaagccaccctcgtgtgcctggctaccggcttctaccccgaccatgtggaactgtcttggtgggtcaacggcaaagaggtgcacagcggcgtgtgtaccgacccccagccactgaaagaacagcccgccctgaacgacagccggtactgcctgagcagcagactgagagtgtccgccaccttctggcagaacccccggaaccacttcagatgccaggtgcagttctacggcctgagcgagaacgacgagtggacccaggacagagccaagcccgtgacccagatcgtgtctgccgaagcctggggcagagccgatgatgtgattaagatccactggcaggaaaagaagtccaacaccatcctgggcagccaggaaggcaacaccatgaagaccaacgacacctacatgaagttcagctggctgaccgtgcccgagaagtccctggacaaagaacacagatgcatcgtgcggcacgaaaacaacaagaacggcgtggaccaggaaatcatcttcccacccatcaagaccgatgtgattacaatggaccccaaggacaactgctccaaggacgccaacgataccctgctgctccagctgaccaacaccagcgcctactacatgtacttgttgctgctgctgaagtccgtggtgtacttcgccatcatcacatgctgcctgctgatggctatggtcaagcggaaggacagccgggga

SEQ ID NO: 37095 - DNA, 2985 bp, synthetic construct
  source 1..2985: mol_type = other DNA
atggccttaccagtgaccgccttgctcctgccgctggccttgctgctccacgccgccaggccggaagtgcagctggttgaatctggcggaggactggttcagcctggcggatctctgagactgtcttgtgccgccagcggcttcagcttcagcgacttttggatgagctgggtccgacaggcccctggcaaaggacttgaatgggtcgccacaatcagccaggccggcagcgagaaggactacgtggactctgtgaagggcagattcaccatcagccgggacaacgccaagaagtccctgtacctccagatgaacagcctgagagccgaggacaccgccgtgtactattgtgcctctggcgtgtacagcttcgactacagaggccagggcaccctggtcacagtctcttctggtaccggcggaggcggatctggcggcggaggtagcggtggcggaggatctgaattcgacatccagatgacacagagccctagcagcctgtctgccagcgtgggagacagagtgaccatcacatgcaagagcagccagagcctgctggactccgatggcaagacctacctgaactggtatcagcagaagcccggcaaggcccctaagctgctgatctacctggtgtccaagctggatagcggcgtgcccagcagattttctggcagcggcagcggaaccgacttcaccctgacaatatccagcctccagcctgaggacttcgccacctactactgcttccaaggcacccactttccatacaccttcggccagggcaccaaggtggaaatcaaaagactcgaggacctgaagaacgtgttcccacctgaggtggccgtgttcgagcctagcgaggccgagatcagccacacccagaaagccaccctcgtgtgcctggctaccggcttctaccccgaccatgtggaactgtcttggtgggtcaacggcaaagaggtgcacagcggcgtgtgtaccgacccccagccactgaaagaacagcccgccctgaacgacagccggtactgcctgagcagcagactgagagtgtccgccaccttctggcagaacccccggaaccacttcagatgccaggtgcagttctacggcctgagcgagaacgacgagtggacccaggacagagccaagcccgtgacccagatcgtgtctgccgaagcctggggcagagccgatgatgtgattaagatccactggcaggaaaagaagtccaacaccatcctgggcagccaggaaggcaacaccatgaagaccaacgacacctacatgaagttcagctggctgaccgtgcccgagaagtccctggacaaagaacacagatgcatcgtgcggcacgaaaacaacaagaacggcgtggaccaggaaatcatcttcccacccatcaagaccgatgtgattacaatggaccccaaggacaactgctccaaggacgccaacgataccctgctgctccagctgaccaacaccagcgcctactacatgtacttgttgctgctgctgaagtccgtggtgtacttcgccatcatcacatgctgcctgctgatggctatggtcaagcggaaggacagccggggaagggccaagcgatctggatctggagcaacaaacttctcactactcaaacaagcaggtgacgtggaggagaatcccgggcctactagtatggactggatttggcgcatccttttccttgtcggcgctgctaccggcgcgcattccgggccccagctccagctgcaagagtctggacctggcctggtcaagcctagcgagacactgagcctgacctgtaccgtgtccggcgatagcatcagcagcggcgattactactggggctggatcagacagcctcctggcaaaggactggaatggatcggccacatctactacagcggcgtgacctactacaaccccagcctgaagtccagagtgaccatcagcgtggacaccagccggaaccagttctccctgaagctgtctagcgtgacagccgccgataccgccgtgtactactgcaccagagaggacagcagcaactggcggagtagaggccagggaacactggtcacagttagctctggatccggcggaggcggaagtggaggcggaggatctggcggcggaggctctttcgaagaagtgcagctggttgaatcaggcggaggactggttcagcctggcggatctctgagactgtcttgtgccgccagcggctacaccttcaccagctactggatgaactgggtccgacaggcccctggcaaaggactggaatgggtcggaatgatcgaccccagcgacagcgagacacactacaaccacatcttcaaggaccgcttcaccatcagcgccgacaccagcaagaataccgcctacctccagatgaactccctgagagccgaggacaccgccgtgtactactgcgccagaaacctgtatctgttcggccagggaaccctggtcacagtgtcatctacgcgtatccagaaccctgatcctgccgtgtaccagctgcgggatagcaagagcagcgacaagagcgtgtgtctgttcaccgacttcgacagccagaccaacgtgtcccagagcaaggactccgacgtgtacatcaccgataagtgcgtgctggacatgcggagcatggacttcaagagcaactccgccgtggcctggtccaacaagtccgatttcgcctgcgccaacgccttcaacaacagcattatccccgaggacacattcttcccaagccccgagagcagcgactccaccgaccacgtgaagcccaaagagacagagaacaccaagcagcccagcaagagctgccacaagcccaaggccatcgtgcacaccgagaaagtgaacatgatgagcctgaccgtgctgggcctgcggatgctgttcgccaaaaccgtggccgtgaacttcctgctgaccgccaagctgttcttcctcctcaccgcc

SEQ ID NO: 37096 - DNA, 2997 bp, synthetic construct
  source 1..2997: mol_type = other DNA
atggccttaccagtgaccgccttgctcctgccgctggccttgctgctccacgccgccaggccggaagtgcagctggttgaatctggcggaggactggttcagcctggcggatctctgagactgtcttgtgccgccagcggcttcagcttcagcgacttttggatgagctgggtccgacaggcccctggcaaaggacttgaatgggtcgccacaatcagccaggccggcagcgagaaggactacgtggactctgtgaagggcagattcaccatcagccgggacaacgccaagaagtccctgtacctccagatgaacagcctgagagccgaggacaccgccgtgtactattgtgcctctggcgtgtacagcttcgactacagaggccagggcaccctggtcacagtctcttctggtaccggcggaggcggatctggcggcggaggtagcggtggcggaggatctgaattcgacatccagatgacacagagccctagcagcctgtctgccagcgtgggagacagagtgaccatcacatgcaagagcagccagagcctgctggactccgatggcaagacctacctgaactggtatcagcagaagcccggcaaggcccctaagctgctgatctacctggtgtccaagctggatagcggcgtgcccagcagattttctggcagcggcagcggaaccgacttcaccctgacaatatccagcctccagcctgaggacttcgccacctactactgcttccaaggcacccactttccatacaccttcggccagggcaccaaggtggaaatcaaaagactcgagatccagaaccctgatcctgccgtgtaccagctgcgggatagcaagagcagcgacaagagcgtgtgtctgttcaccgacttcgacagccagaccaacgtgtcccagagcaaggactccgacgtgtacatcaccgataagtgcgtgctggacatgcggagcatggacttcaagagcaactccgccgtggcctggtccaacaagtccgatttcgcctgcgccaacgccttcaacaacagcattatccccgaggacacattcttcccaagccccgagagcagcgactccaccgaccacgtgaagcccaaagagacagagaacaccaagcagcccagcaagagctgccacaagcccaaggccatcgtgcacaccgagaaagtgaacatgatgagcctgaccgtgctgggcctgcggatgctgttcgccaaaaccgtggccgtgaacttcctgctgaccgccaagctgttcttcctcctcaccgcccgcgccaagagaagcggatctggcgtgaagcagaccctgaatttcgacctgctgaagctggctggcgacgtggaatccaacccaggccctactagtatggactggatttggcgcatccttttccttgtcggcgctgctaccggcgcgcattccgggccccagctccagctgcaagagtctggacctggcctggtcaagcctagcgagacactgagcctgacctgtaccgtgtccggcgatagcatcagcagcggcgattactactggggctggatcagacagcctcctggcaaaggactggaatggatcggccacatctactacagcggcgtgacctactacaaccccagcctgaagtccagagtgaccatcagcgtggacaccagccggaaccagttctccctgaagctgtctagcgtgacagccgccgataccgccgtgtactactgcaccagagaggacagcagcaactggcggagtagaggccagggaacactggtcacagttagctctggatccggcggaggcggaagtggaggcggaggatctggcggcggaggctctttcgaagaagtgcagctggttgaatcaggcggaggactggttcagcctggcggatctctgagactgtcttgtgccgccagcggctacaccttcaccagctactggatgaactgggtccgacaggcccctggcaaaggactggaatgggtcggaatgatcgaccccagcgacagcgagacacactacaaccacatcttcaaggaccgcttcaccatcagcgccgacaccagcaagaataccgcctacctccagatgaactccctgagagccgaggacaccgccgtgtactactgcgccagaaacctgtatctgttcggccagggaaccctggtcacagtgtcatctacgcgtgaggacctgaagaacgtgttcccacctgaggtggccgtgttcgagcctagcgaggccgagatcagccacacccagaaagccaccctcgtgtgcctggctaccggcttctaccccgaccatgtggaactgtcttggtgggtcaacggcaaagaggtgcacagcggcgtgtgtaccgacccccagccactgaaagaacagcccgccctgaacgacagccggtactgcctgagcagcagactgagagtgtccgccaccttctggcagaacccccggaaccacttcagatgccaggtgcagttctacggcctgagcgagaacgacgagtggacccaggacagagccaagcccgtgacccagatcgtgtctgccgaagcctggggcagagccgatgatgtgattaagatccactggcaggaaaagaagtccaacaccatcctgggcagccaggaaggcaacaccatgaagaccaacgacacctacatgaagttcagctggctgaccgtgcccgagaagtccctggacaaagaacacagatgcatcgtgcggcacgaaaacaacaagaacggcgtggaccaggaaatcatcttcccacccatcaagaccgatgtgattacaatggaccccaaggacaactgctccaaggacgccaacgataccctgctgctccagctgaccaacaccagcgcctactacatgtacttgttgctgctgctgaagtccgtggtgtacttcgccatcatcacatgctgcctgctgatggctatggtcaagcggaaggacagccgggga

SEQ ID NO: 37097 - DNA, 2163 bp, synthetic construct
  source 1..2163: mol_type = other DNA
atggccttaccagtgaccgccttgctcctgccgctggccttgctgctccacgccgccaggccggacatccagatgacacagagccctagcagcctgtctgccagcgtgggagacagagtgaccatcacatgcaagagcagccagagcctgctggactccgatggcaagacctacctgaactggtatcagcagaagcccggcaaggcccctaagctgctgatctacctggtgtccaagctggatagcggcgtgcccagcagattttctggcagcggcagcggaaccgacttcaccctgacaatatccagcctccagcctgaggacttcgccacctactactgcttccaaggcacccactttccatacaccttcggccagggcaccaaggtggaaatcaaaagactcgaggacctgaagaacgtgttcccacctgaggtggccgtgttcgagcctagcgaggccgagatcagccacacccagaaagccaccctcgtgtgcctggctaccggcttctaccccgaccatgtggaactgtcttggtgggtcaacggcaaagaggtgcacagcggcgtgtgtaccgacccccagccactgaaagaacagcccgccctgaacgacagccggtactgcctgagcagcagactgagagtgtccgccaccttctggcagaacccccggaaccacttcagatgccaggtgcagttctacggcctgagcgagaacgacgagtggacccaggacagagccaagcccgtgacccagatcgtgtctgccgaagcctggggcagagccgatgatgtgattaagatccactggcaggaaaagaagtccaacaccatcctgggcagccaggaaggcaacaccatgaagaccaacgacacctacatgaagttcagctggctgaccgtgcccgagaagtccctggacaaagaacacagatgcatcgtgcggcacgaaaacaacaagaacggcgtggaccaggaaatcatcttcccacccatcaagaccgatgtgattacaatggaccccaaggacaactgctccaaggacgccaacgataccctgctgctccagctgaccaacaccagcgcctactacatgtacttgttgctgctgctgaagtccgtggtgtacttcgccatcatcacatgctgcctgctgcggagaaccgccttctgctgcaacggcgagaagtctagggccaagcgatctggatctggagcaacaaacttctcactactcaaacaagcaggtgacgtggaggagaatcccgggcctactagtatggactggatttggcgcatccttttccttgtcggcgctgctaccggcgcgcattccttcgaagaagtgcagctggttgaatcaggcggaggactggttcagcctggcggatctctgagactgtcttgtgccgccagcggctacaccttcaccagctactggatgaactgggtccgacaggcccctggcaaaggactggaatgggtcggaatgatcgaccccagcgacagcgagacacactacaaccacatcttcaaggaccgcttcaccatcagcgccgacaccagcaagaataccgcctacctccagatgaactccctgagagccgaggacaccgccgtgtactactgcgccagaaacctgtatctgttcggccagggaaccctggtcacagtgtcatctacgcgtatccagaaccctgatcctgccgtgtaccagctgcgggatagcaagagcagcgacaagagcgtgtgtctgttcaccgacttcgacagccagaccaacgtgtcccagagcaaggactccgacgtgtacatcaccgataagtgcgtgctggacatgcggagcatggacttcaagagcaactccgccgtggcctggtccaacaagtccgatttcgcctgcgccaacgccttcaacaacagcattatccccgaggacacattcttcccaagccccgagagcagcgactccaccgaccacgtgaagcccaaagagacagagaacaccaagcagcccagcaagagctgccacaagcccaaggccatcgtgcacaccgagaaagtgaacatgatgagcctgaccgtgctgggcctgcggatgctgttcgccaaaaccgtggccgtgaacttcctgctgaccgccaagctgttcttcctc

SEQ ID NO: 37098 - DNA, 2175 bp, synthetic construct
  source 1..2175: mol_type = other DNA
atggccttaccagtgaccgccttgctcctgccgctggccttgctgctccacgccgccaggccggacatccagatgacacagagccctagcagcctgtctgccagcgtgggagacagagtgaccatcacatgcaagagcagccagagcctgctggactccgatggcaagacctacctgaactggtatcagcagaagcccggcaaggcccctaagctgctgatctacctggtgtccaagctggatagcggcgtgcccagcagattttctggcagcggcagcggaaccgacttcaccctgacaatatccagcctccagcctgaggacttcgccacctactactgcttccaaggcacccactttccatacaccttcggccagggcaccaaggtggaaatcaaaagactcgagatccagaaccctgatcctgccgtgtaccagctgcgggatagcaagagcagcgacaagagcgtgtgtctgttcaccgacttcgacagccagaccaacgtgtcccagagcaaggactccgacgtgtacatcaccgataagtgcgtgctggacatgcggagcatggacttcaagagcaactccgccgtggcctggtccaacaagtccgatttcgcctgcgccaacgccttcaacaacagcattatccccgaggacacattcttcccaagccccgagagcagcgactccaccgaccacgtgaagcccaaagagacagagaacaccaagcagcccagcaagagctgccacaagcccaaggccatcgtgcacaccgagaaagtgaacatgatgagcctgaccgtgctgggcctgcggatgctgttcgccaaaaccgtggccgtgaacttcctgctgaccgccaagctgttcttcctccgcgccaagagaagcggatctggcgtgaagcagaccctgaatttcgacctgctgaagctggctggcgacgtggaatccaacccaggccctactagtatggactggatttggcgcatccttttccttgtcggcgctgctaccggcgcgcattccttcgaagaagtgcagctggttgaatcaggcggaggactggttcagcctggcggatctctgagactgtcttgtgccgccagcggctacaccttcaccagctactggatgaactgggtccgacaggcccctggcaaaggactggaatgggtcggaatgatcgaccccagcgacagcgagacacactacaaccacatcttcaaggaccgcttcaccatcagcgccgacaccagcaagaataccgcctacctccagatgaactccctgagagccgaggacaccgccgtgtactactgcgccagaaacctgtatctgttcggccagggaaccctggtcacagtgtcatctacgcgtgaggacctgaagaacgtgttcccacctgaggtggccgtgttcgagcctagcgaggccgagatcagccacacccagaaagccaccctcgtgtgcctggctaccggcttctaccccgaccatgtggaactgtcttggtgggtcaacggcaaagaggtgcacagcggcgtgtgtaccgacccccagccactgaaagaacagcccgccctgaacgacagccggtactgcctgagcagcagactgagagtgtccgccaccttctggcagaacccccggaaccacttcagatgccaggtgcagttctacggcctgagcgagaacgacgagtggacccaggacagagccaagcccgtgacccagatcgtgtctgccgaagcctggggcagagccgatgatgtgattaagatccactggcaggaaaagaagtccaacaccatcctgggcagccaggaaggcaacaccatgaagaccaacgacacctacatgaagttcagctggctgaccgtgcccgagaagtccctggacaaagaacacagatgcatcgtgcggcacgaaaacaacaagaacggcgtggaccaggaaatcatcttcccacccatcaagaccgatgtgattacaatggaccccaaggacaactgctccaaggacgccaacgataccctgctgctccagctgaccaacaccagcgcctactacatgtacttgttgctgctgctgaagtccgtggtgtacttcgccatcatcacatgctgcctgctgcggagaaccgccttctgctgcaacggcgagaagtct

SEQ ID NO: 37099 - DNA, 2568 bp, synthetic construct
  source 1..2568: mol_type = other DNA
atggccttaccagtgaccgccttgctcctgccgctggccttgctgctccacgccgccaggccggaagtgcagctggttgaatctggcggaggactggttcagcctggcggatctctgagactgtcttgtgccgccagcggcttcagcttcagcgacttttggatgagctgggtccgacaggcccctggcaaaggacttgaatgggtcgccacaatcagccaggccggcagcgagaaggactacgtggactctgtgaagggcagattcaccatcagccgggacaacgccaagaagtccctgtacctccagatgaacagcctgagagccgaggacaccgccgtgtactattgtgcctctggcgtgtacagcttcgactacagaggccagggcaccctggtcacagtctcttctggtaccggcggaggcggatctggcggcggaggtagcggtggcggaggatctgaattcgacatccagatgacacagagccctagcagcctgtctgccagcgtgggagacagagtgaccatcacatgcaagagcagccagagcctgctggactccgatggcaagacctacctgaactggtatcagcagaagcccggcaaggcccctaagctgctgatctacctggtgtccaagctggatagcggcgtgcccagcagattttctggcagcggcagcggaaccgacttcaccctgacaatatccagcctccagcctgaggacttcgccacctactactgcttccaaggcacccactttccatacaccttcggccagggcaccaaggtggaaatcaaaagactcgaggacctgaagaacgtgttcccacctgaggtggccgtgttcgagcctagcgaggccgagatcagccacacccagaaagccaccctcgtgtgcctggctaccggcttctaccccgaccatgtggaactgtcttggtgggtcaacggcaaagaggtgcacagcggcgtgtgtaccgacccccagccactgaaagaacagcccgccctgaacgacagccggtactgcctgagcagcagactgagagtgtccgccaccttctggcagaacccccggaaccacttcagatgccaggtgcagttctacggcctgagcgagaacgacgagtggacccaggacagagccaagcccgtgacccagatcgtgtctgccgaagcctggggcagagccgatgatgtgattaagatccactggcaggaaaagaagtccaacaccatcctgggcagccaggaaggcaacaccatgaagaccaacgacacctacatgaagttcagctggctgaccgtgcccgagaagtccctggacaaagaacacagatgcatcgtgcggcacgaaaacaacaagaacggcgtggaccaggaaatcatcttcccacccatcaagaccgatgtgattacaatggaccccaaggacaactgctccaaggacgccaacgataccctgctgctccagctgaccaacaccagcgcctactacatgtacttgttgctgctgctgaagtccgtggtgtacttcgccatcatcacatgctgcctgctgcggagaaccgccttctgctgcaacggcgagaagtctagggccaagcgatctggatctggagcaacaaacttctcactactcaaacaagcaggtgacgtggaggagaatcccgggcctactagtatggactggatttggcgcatccttttccttgtcggcgctgctaccggcgcgcattccttcgaagaagtgcagctggttgaatcaggcggaggactggttcagcctggcggatctctgagactgtcttgtgccgccagcggctacaccttcaccagctactggatgaactgggtccgacaggcccctggcaaaggactggaatgggtcggaatgatcgaccccagcgacagcgagacacactacaaccacatcttcaaggaccgcttcaccatcagcgccgacaccagcaagaataccgcctacctccagatgaactccctgagagccgaggacaccgccgtgtactactgcgccagaaacctgtatctgttcggccagggaaccctggtcacagtgtcatctacgcgtatccagaaccctgatcctgccgtgtaccagctgcgggatagcaagagcagcgacaagagcgtgtgtctgttcaccgacttcgacagccagaccaacgtgtcccagagcaaggactccgacgtgtacatcaccgataagtgcgtgctggacatgcggagcatggacttcaagagcaactccgccgtggcctggtccaacaagtccgatttcgcctgcgccaacgccttcaacaacagcattatccccgaggacacattcttcccaagccccgagagcagcgactccaccgaccacgtgaagcccaaagagacagagaacaccaagcagcccagcaagagctgccacaagcccaaggccatcgtgcacaccgagaaagtgaacatgatgagcctgaccgtgctgggcctgcggatgctgttcgccaaaaccgtggccgtgaacttcctgctgaccgccaagctgttcttcctc

SEQ ID NO: 37100 - DNA, 2979 bp, synthetic construct
  source 1..2979: mol_type = other DNA
atggccttaccagtgaccgccttgctcctgccgctggccttgctgctccacgccgccaggccggaagtgcagctggttgaatctggcggaggactggttcagcctggcggatctctgagactgtcttgtgccgccagcggcttcagcttcagcgacttttggatgagctgggtccgacaggcccctggcaaaggacttgaatgggtcgccacaatcagccaggccggcagcgagaaggactacgtggactctgtgaagggcagattcaccatcagccgggacaacgccaagaagtccctgtacctccagatgaacagcctgagagccgaggacaccgccgtgtactattgtgcctctggcgtgtacagcttcgactacagaggccagggcaccctggtcacagtctcttctggtaccggcggaggcggatctggcggcggaggtagcggtggcggaggatctgaattcgacatccagatgacacagagccctagcagcctgtctgccagcgtgggagacagagtgaccatcacatgcaagagcagccagagcctgctggactccgatggcaagacctacctgaactggtatcagcagaagcccggcaaggcccctaagctgctgatctacctggtgtccaagctggatagcggcgtgcccagcagattttctggcagcggcagcggaaccgacttcaccctgacaatatccagcctccagcctgaggacttcgccacctactactgcttccaaggcacccactttccatacaccttcggccagggcaccaaggtggaaatcaaaagactcgaggacctgaagaacgtgttcccacctgaggtggccgtgttcgagcctagcgaggccgagatcagccacacccagaaagccaccctcgtgtgcctggctaccggcttctaccccgaccatgtggaactgtcttggtgggtcaacggcaaagaggtgcacagcggcgtgtgtaccgacccccagccactgaaagaacagcccgccctgaacgacagccggtactgcctgagcagcagactgagagtgtccgccaccttctggcagaacccccggaaccacttcagatgccaggtgcagttctacggcctgagcgagaacgacgagtggacccaggacagagccaagcccgtgacccagatcgtgtctgccgaagcctggggcagagccgatgatgtgattaagatccactggcaggaaaagaagtccaacaccatcctgggcagccaggaaggcaacaccatgaagaccaacgacacctacatgaagttcagctggctgaccgtgcccgagaagtccctggacaaagaacacagatgcatcgtgcggcacgaaaacaacaagaacggcgtggaccaggaaatcatcttcccacccatcaagaccgatgtgattacaatggaccccaaggacaactgctccaaggacgccaacgataccctgctgctccagctgaccaacaccagcgcctactacatgtacttgttgctgctgctgaagtccgtggtgtacttcgccatcatcacatgctgcctgctgcggagaaccgccttctgctgcaacggcgagaagtctagggccaagcgatctggatctggagcaacaaacttctcactactcaaacaagcaggtgacgtggaggagaatcccgggcctactagtatggactggatttggcgcatccttttccttgtcggcgctgctaccggcgcgcattccgggccccagctccagctgcaagagtctggacctggcctggtcaagcctagcgagacactgagcctgacctgtaccgtgtccggcgatagcatcagcagcggcgattactactggggctggatcagacagcctcctggcaaaggactggaatggatcggccacatctactacagcggcgtgacctactacaaccccagcctgaagtccagagtgaccatcagcgtggacaccagccggaaccagttctccctgaagctgtctagcgtgacagccgccgataccgccgtgtactactgcaccagagaggacagcagcaactggcggagtagaggccagggaacactggtcacagttagctctggatccggcggaggcggaagtggaggcggaggatctggcggcggaggctctttcgaagaagtgcagctggttgaatcaggcggaggactggttcagcctggcggatctctgagactgtcttgtgccgccagcggctacaccttcaccagctactggatgaactgggtccgacaggcccctggcaaaggactggaatgggtcggaatgatcgaccccagcgacagcgagacacactacaaccacatcttcaaggaccgcttcaccatcagcgccgacaccagcaagaataccgcctacctccagatgaactccctgagagccgaggacaccgccgtgtactactgcgccagaaacctgtatctgttcggccagggaaccctggtcacagtgtcatctacgcgtatccagaaccctgatcctgccgtgtaccagctgcgggatagcaagagcagcgacaagagcgtgtgtctgttcaccgacttcgacagccagaccaacgtgtcccagagcaaggactccgacgtgtacatcaccgataagtgcgtgctggacatgcggagcatggacttcaagagcaactccgccgtggcctggtccaacaagtccgatttcgcctgcgccaacgccttcaacaacagcattatccccgaggacacattcttcccaagccccgagagcagcgactccaccgaccacgtgaagcccaaagagacagagaacaccaagcagcccagcaagagctgccacaagcccaaggccatcgtgcacaccgagaaagtgaacatgatgagcctgaccgtgctgggcctgcggatgctgttcgccaaaaccgtggccgtgaacttcctgctgaccgccaagctgttcttcctc

SEQ ID NO: 37101 - DNA, 1857 bp, synthetic construct
  source 1..1857: mol_type = other DNA
atggccttaccagtgaccgccttgctcctgccgctggccttgctgctccacgccgccaggccggacatccagatgacacagagccctagcagcctgtctgccagcgtgggagacagagtgaccatcacatgcaagagcagccagagcctgctggactccgatggcaagacctacctgaactggtatcagcagaagcccggcaaggcccctaagctgctgatctacctggtgtccaagctggatagcggcgtgcccagcagattttctggcagcggcagcggaaccgacttcaccctgacaatatccagcctccagcctgaggacttcgccacctactactgcttccaaggcacccactttccatacaccttcggccagggcaccaaggtggaaatcaaaagactcgaggacctgaagaacgtgttcccacctgaggtggccgtgttcgagcctagcgaggccgagatcagccacacccagaaagccaccctcgtgtgcctggctaccggcttctaccccgaccatgtggaactgtcttggtgggtcaacggcaaagaggtgcacagcggcgtgtctaccgacccccagccactgaaagaacagcccgccctgaacgacagccggtactgcctgagcagcagactgagagtgtccgccaccttctggcagaacccccggaaccacttcagatgccaggtgcagttctacggcctgagcgagaacgacgagtggacccaggacagagccaagcccgtgacccagatcgtgtctgccgaagcctggggcagagccgattgcgacgtgaagctggtggaaaagagcttcgagacagacaccaacctgaacttccagaacctgagcgtgatcggcttcagaatcctgctgctgaaagtggccggctttaacctgctgatgaccctgcggctgtggtccagcagggccaagcgatctggatctggagcaacaaacttctcactactcaaacaagcaggtgacgtggaggagaatcccgggcctactagtatggactggatttggcgcatccttttccttgtcggcgctgctaccggcgcgcattccttcgaagaagtgcagctggttgaatcaggcggaggactggttcagcctggcggatctctgagactgtcttgtgccgccagcggctacaccttcaccagctactggatgaactgggtccgacaggcccctggcaaaggactggaatgggtcggaatgatcgaccccagcgacagcgagacacactacaaccacatcttcaaggaccgcttcaccatcagcgccgacaccagcaagaataccgcctacctccagatgaactccctgagagccgaggacaccgccgtgtactactgcgccagaaacctgtatctgttcggccagggaaccctggtcacagtgtcatctacgcgtatccagaaccctgatcctgccgtgtaccagctgcgggatagcaagagcagcgacaagagcgtgtgtctgttcaccgacttcgacagccagaccaacgtgtcccagagcaaggactccgacgtgtacatcaccgataagaccgtgctggacatgcggagcatggacttcaagagcaactccgccgtggcctggtccaacaagtccgatttcgcctgcgccaacgccttcaacaacagcattatccccgaggacacattcttcccaagccccgagagcagctgcggctttaccagcgagagctaccagcagggcgtgctgagcgccaccatcctgtacgagatcctgctgggcaaggccaccctgtacgccgtgctggtgtctgccctggtgctgatggctatggtcaagcggaaggacagccgggga

SEQ ID NO: 37102 - DNA, 1857 bp, synthetic construct
  source 1..1857: mol_type = other DNA
atggccttaccagtgaccgccttgctcctgccgctggccttgctgctccacgccgccaggccggacatccagatgacacagagccctagcagcctgtctgccagcgtgggagacagagtgaccatcacatgcaagagcagccagagcctgctggactccgatggcaagacctacctgaactggtatcagcagaagcccggcaaggcccctaagctgctgatctacctggtgtccaagctggatagcggcgtgcccagcagattttctggcagcggcagcggaaccgacttcaccctgacaatatccagcctccagcctgaggacttcgccacctactactgcttccaaggcacccactttccatacaccttcggccagggcaccaaggtggaaatcaaaagactcgaggacctgaagaacgtgttcccacctgaggtggccgtgttcgagcctagcgaggccgagatcagccacacccagaaagccaccctcgtgtgcctggctaccggcttctaccccgaccatgtggaactgtcttggtgggtcaacggcaaagaggtgcacagcggcgtgtctaccgacccccagccactgaaagaacagcccgccctgaacgacagccggtactgcctgagcagcagactgagagtgtccgccaccttctggcagaacccccggaaccacttcagatgccaggtgcagttctacggcctgagcgagaacgacgagtggacccaggacagagccaagcccgtgacccagatcgtgtctgccgaagcctggggcagagccgattgcggctttaccagcgagagctaccagcagggcgtgctgagcgccaccaacctgagcgtgatcggcttcagaatcctgctgctgaaagtggccggctttaacctgctgatgaccctgcggctgtggtccagcagggccaagcgatctggatctggagcaacaaacttctcactactcaaacaagcaggtgacgtggaggagaatcccgggcctactagtatggactggatttggcgcatccttttccttgtcggcgctgctaccggcgcgcattccttcgaagaagtgcagctggttgaatcaggcggaggactggttcagcctggcggatctctgagactgtcttgtgccgccagcggctacaccttcaccagctactggatgaactgggtccgacaggcccctggcaaaggactggaatgggtcggaatgatcgaccccagcgacagcgagacacactacaaccacatcttcaaggaccgcttcaccatcagcgccgacaccagcaagaataccgcctacctccagatgaactccctgagagccgaggacaccgccgtgtactactgcgccagaaacctgtatctgttcggccagggaaccctggtcacagtgtcatctacgcgtatccagaaccctgatcctgccgtgtaccagctgcgggatagcaagagcagcgacaagagcgtgtgtctgttcaccgacttcgacagccagaccaacgtgtcccagagcaaggactccgacgtgtacatcaccgataagaccgtgctggacatgcggagcatggacttcaagagcaactccgccgtggcctggtccaacaagtccgatttcgcctgcgccaacgccttcaacaacagcattatccccgaggacacattcttcccaagccccgagagcagctgcgacgtgaagctggtggaaaagagcttcgagacagacaccaacctgaacttccagatcctgtacgagatcctgctgggcaaggccaccctgtacgccgtgctggtgtctgccctggtgctgatggctatggtcaagcggaaggacagccgggga

SEQ ID NO: 37103 - DNA, 2169 bp, synthetic construct
  source 1..2169: mol_type = other DNA
atggccttaccagtgaccgccttgctcctgccgctggccttgctgctccacgccgccaggccggacatccagatgacacagagccctagcagcctgtctgccagcgtgggagacagagtgaccatcacatgcaagagcagccagagcctgctggactccgatggcaagacctacctgaactggtatcagcagaagcccggcaaggcccctaagctgctgatctacctggtgtccaagctggatagcggcgtgcccagcagattttctggcagcggcagcggaaccgacttcaccctgacaatatccagcctccagcctgaggacttcgccacctactactgcttccaaggcacccactttccatacaccttcggccagggcaccaaggtggaaatcaaaagactcgaggacctgaagaacgtgttcccacctgaggtggccgtgttcgagcctagcgaggccgagatcagccacacccagaaagccaccctcgtgtgcctggctaccggcttctaccccgaccatgtggaactgtcttggtgggtcaacggcaaagaggtgcacagcggcgtgtctaccgacccccagccactgaaagaacagcccgccctgaacgacagccggtactgcctgagcagcagactgagagtgtccgccaccttctggcagaacccccggaaccacttcagatgccaggtgcagttctacggcctgagcgagaacgacgagtggacccaggacagagccaagcccgtgacccagatcgtgtctgccgaagcctggggcagagccgatgatgtgattaagatccactggcaggaaaagaagtccaacaccatcctgggcagccaggaaggcaacaccatgaagaccaacgacacctacatgaagttcagctggctgaccgtgcccgagaagtccctggacaaagaacacagatgcatcgtgcggcacgaaaacaacaagaacggcgtggaccaggaaatcatcttcccacccatcaagaccgatgtgattacaatggaccccaaggacaactgctccaaggacgccaacgataccctgctgctccagctgaccaacaccagcgcctactacatgtacttgttgctgctgctgaagtccgtggtgtacttcgccatcatcacatgctgcctgctgatggctatggtcaagcggaaggacagccggggaagggccaagcgatctggatctggagcaacaaacttctcactactcaaacaagcaggtgacgtggaggagaatcccgggcctactagtatggactggatttggcgcatccttttccttgtcggcgctgctaccggcgcgcattccttcgaagaagtgcagctggttgaatcaggcggaggactggttcagcctggcggatctctgagactgtcttgtgccgccagcggctacaccttcaccagctactggatgaactgggtccgacaggcccctggcaaaggactggaatgggtcggaatgatcgaccccagcgacagcgagacacactacaaccacatcttcaaggaccgcttcaccatcagcgccgacaccagcaagaataccgcctacctccagatgaactccctgagagccgaggacaccgccgtgtactactgcgccagaaacctgtatctgttcggccagggaaccctggtcacagtgtcatctacgcgtatccagaaccctgatcctgccgtgtaccagctgcgggatagcaagagcagcgacaagagcgtgtgtctgttcaccgacttcgacagccagaccaacgtgtcccagagcaaggactccgacgtgtacatcaccgataagaccgtgctggacatgcggagcatggacttcaagagcaactccgccgtggcctggtccaacaagtccgatttcgcctgcgccaacgccttcaacaacagcattatccccgaggacacattcttcccaagccccgagagcagcgactccaccgaccacgtgaagcccaaagagacagagaacaccaagcagcccagcaagagctgccacaagcccaaggccatcgtgcacaccgagaaagtgaacatgatgagcctgaccgtgctgggcctgcggatgctgttcgccaaaaccgtggccgtgaacttcctgctgaccgccaagctgttcttcctcctcaccgcc

SEQ ID NO: 37104 - DNA, 2163 bp, synthetic construct
  source 1..2163: mol_type = other DNA
atggccttaccagtgaccgccttgctcctgccgctggccttgctgctccacgccgccaggccggacatccagatgacacagagccctagcagcctgtctgccagcgtgggagacagagtgaccatcacatgcaagagcagccagagcctgctggactccgatggcaagacctacctgaactggtatcagcagaagcccggcaaggcccctaagctgctgatctacctggtgtccaagctggatagcggcgtgcccagcagattttctggcagcggcagcggaaccgacttcaccctgacaatatccagcctccagcctgaggacttcgccacctactactgcttccaaggcacccactttccatacaccttcggccagggcaccaaggtggaaatcaaaagactcgaggacctgaagaacgtgttcccacctgaggtggccgtgttcgagcctagcgaggccgagatcagccacacccagaaagccaccctcgtgtgcctggctaccggcttctaccccgaccatgtggaactgtcttggtgggtcaacggcaaagaggtgcacagcggcgtgtctaccgacccccagccactgaaagaacagcccgccctgaacgacagccggtactgcctgagcagcagactgagagtgtccgccaccttctggcagaacccccggaaccacttcagatgccaggtgcagttctacggcctgagcgagaacgacgagtggacccaggacagagccaagcccgtgacccagatcgtgtctgccgaagcctggggcagagccgatgatgtgattaagatccactggcaggaaaagaagtccaacaccatcctgggcagccaggaaggcaacaccatgaagaccaacgacacctacatgaagttcagctggctgaccgtgcccgagaagtccctggacaaagaacacagatgcatcgtgcggcacgaaaacaacaagaacggcgtggaccaggaaatcatcttcccacccatcaagaccgatgtgattacaatggaccccaaggacaactgctccaaggacgccaacgataccctgctgctccagctgaccaacaccagcgcctactacatgtacttgttgctgctgctgaagtccgtggtgtacttcgccatcatcacatgctgcctgctgcggagaaccgccttctgctgcaacggcgagaagtctagggccaagcgatctggatctggagcaacaaacttctcactactcaaacaagcaggtgacgtggaggagaatcccgggcctactagtatggactggatttggcgcatccttttccttgtcggcgctgctaccggcgcgcattccttcgaagaagtgcagctggttgaatcaggcggaggactggttcagcctggcggatctctgagactgtcttgtgccgccagcggctacaccttcaccagctactggatgaactgggtccgacaggcccctggcaaaggactggaatgggtcggaatgatcgaccccagcgacagcgagacacactacaaccacatcttcaaggaccgcttcaccatcagcgccgacaccagcaagaataccgcctacctccagatgaactccctgagagccgaggacaccgccgtgtactactgcgccagaaacctgtatctgttcggccagggaaccctggtcacagtgtcatctacgcgtatccagaaccctgatcctgccgtgtaccagctgcgggatagcaagagcagcgacaagagcgtgtgtctgttcaccgacttcgacagccagaccaacgtgtcccagagcaaggactccgacgtgtacatcaccgataagaccgtgctggacatgcggagcatggacttcaagagcaactccgccgtggcctggtccaacaagtccgatttcgcctgcgccaacgccttcaacaacagcattatccccgaggacacattcttcccaagccccgagagcagcgactccaccgaccacgtgaagcccaaagagacagagaacaccaagcagcccagcaagagctgccacaagcccaaggccatcgtgcacaccgagaaagtgaacatgatgagcctgaccgtgctgggcctgcggatgctgttcgccaaaaccgtggccgtgaacttcctgctgaccgccaagctgttcttcctc

SEQ ID NO: 37105 - DNA, 2595 bp, synthetic construct
  source 1..2595: mol_type = other DNA
atggccttaccagtgaccgccttgctcctgccgctggccttgctgctccacgccgccaggccgctcgaggaggacctgaagaacgtgttcccacctgaggtggccgtgttcgagcctagcgaggccgagatcagccacacccagaaagccaccctcgtgtgcctggctaccggcttctaccccgaccatgtggaactgtcttggtgggtcaacggcaaagaggtgcacagcggcgtgtgtaccgacccccagccactgaaagaacagcccgccctgaacgacagccggtactgcctgagcagcagactgagagtgtccgccaccttctggcagaacccccggaaccacttcagatgccaggtgcagttctacggcctgagcgagaacgacgagtggacccaggacagagccaagcccgtgacccagatcgtgtctgccgaagcctggggcagagccgattgcggctttaccagcgagagctaccagcagggcgtgctgagcgccaccaacctgagcgtgatcggcttcagaatcctgctgctgaaagtggccggctttaacctgctgatgaccctgcggctgtggtccagcagggccaagcgatctggatctggagcaacaaacttctcactactcaaacaagcaggtgacgtggaggagaatcccgggcctactagcatggccttaccagtgaccgccttgctcctgccgctggccttgctgctccacgccgccaggccggacatccagatgacacagagccctagcagcctgtctgccagcgtgggagacagagtgaccatcacatgcaagagcagccagagcctgctggactccgatggcaagacctacctgaactggtatcagcagaagcccggcaaggcccctaagctgctgatctacctggtgtccaagctggatagcggcgtgcccagcagattttctggcagcggcagcggaaccgacttcaccctgacaatatccagcctccagcctgaggacttcgccacctactactgcttccaaggcacccactttccatacaccttcggccagggcaccaaggtggaaatcaaaagaggcggaggcggaagtggaggcggaggatctggcggcggaggctctgaagtgcagctggttgaatcaggcggaggactggttcagcctggcggatctctgagactgtcttgtgccgccagcggctacaccttcaccagctactggatgaactgggtccgacaggcccctggcaaaggactggaatgggtcggaatgatcgaccccagcgacagcgagacacactacaaccacatcttcaaggaccgcttcaccatcagcgccgacaccagcaagaataccgcctacctccagatgaactccctgagagccgaggacaccgccgtgtactactgcgccagaaacctgtatctgttcggccagggaaccctggtcacagtgtcatctacgcgtatccagaaccctgatcctgccgtgtaccagctgcgggatagcaagagcagcgacaagagcgtgtgtctgttcaccgacttcgacagccagaccaacgtgtcccagagcaaggactccgacgtgtacatcaccgataagtgcgtgctggacatgcggagcatggacttcaagagcaactccgccgtggcctggtccaacaagtccgatttcgcctgcgccaacgccttcaacaacagcattatccccgaggacacattcttcccaagccccgagagcagctgcgacgtgaagctggtggaaaagagcttcgagacagacaccaacctgaacttccagatcctgtacgaggtgatcggcttcagaatcctgctgctgaaagtggccggctttaacctgctgatgaccctgcggctgtggtccagccgcgccaagagaagcggatctggcgtgaagcagaccctgaatttcgacctgctgaagctggctggcgacgtggaatccaacccaggcccttctagaggccatatgaccgagtacaagcccacggtgcgcctcgccacccgcgacgacgtccccagggccgtacgcaccctcgccgccgcgttcgccgactaccccgccacgcgccacaccgtcgatccggaccgccacatcgagcgggtcaccgagctgcaagaactcttcctcacgcgcgtcgggctcgacatcggcaaggtgtgggtcgcggacgacggcgccgcggtggcggtctggaccacgccggagagcgtcgaagcgggggcggtgttcgccgagatcggcccgcgcatggccgagttgagcggttcccggctggccgcgcagcaacagatggaaggcctcctggcgccgcaccggcccaaggagcccgcgtggttcctggccaccgtcggcgtctcgcccgaccaccagggcaagggtctgggcagcgccgtcgtgctccccggagtggaggcggccgagcgcgccggggtgcccgccttcctggagacctccgcgccccgcaacctccccttctacgagcggctcggcttcaccgtcaccgccgacgtcgaggtgcccgaaggaccgcgcacctggtgcatgacccgcaagcccggtgcctga

SEQ ID NO: 37106 - DNA, 2595 bp, synthetic construct
  source 1..2595: mol_type = other DNA
atggccttaccagtgaccgccttgctcctgccgctggccttgctgctccacgccgccaggccgctcgagatccagaaccctgatcctgccgtgtaccagctgcgggatagcaagagcagcgacaagagcgtgtgtctgttcaccgacttcgacagccagaccaacgtgtcccagagcaaggactccgacgtgtacatcaccgataagtgcgtgctggacatgcggagcatggacttcaagagcaactccgccgtggcctggtccaacaagtccgatttcgcctgcgccaacgccttcaacaacagcattatccccgaggacacattcttcccaagccccgagagcagctgcgacgtgaagctggtggaaaagagcttcgagacagacaccaacctgaacttccagatcctgtacgaggtgatcggcttcagaatcctgctgctgaaagtggccggctttaacctgctgatgaccctgcggctgtggtccagcagggccaagcgatctggatctggagcaacaaacttctcactactcaaacaagcaggtgacgtggaggagaatcccgggcctactagcatggccttaccagtgaccgccttgctcctgccgctggccttgctgctccacgccgccaggccggacatccagatgacacagagccctagcagcctgtctgccagcgtgggagacagagtgaccatcacatgcaagagcagccagagcctgctggactccgatggcaagacctacctgaactggtatcagcagaagcccggcaaggcccctaagctgctgatctacctggtgtccaagctggatagcggcgtgcccagcagattttctggcagcggcagcggaaccgacttcaccctgacaatatccagcctccagcctgaggacttcgccacctactactgcttccaaggcacccactttccatacaccttcggccagggcaccaaggtggaaatcaaaagaggcggaggcggaagtggaggcggaggatctggcggcggaggctctgaagtgcagctggttgaatcaggcggaggactggttcagcctggcggatctctgagactgtcttgtgccgccagcggctacaccttcaccagctactggatgaactgggtccgacaggcccctggcaaaggactggaatgggtcggaatgatcgaccccagcgacagcgagacacactacaaccacatcttcaaggaccgcttcaccatcagcgccgacaccagcaagaataccgcctacctccagatgaactccctgagagccgaggacaccgccgtgtactactgcgccagaaacctgtatctgttcggccagggaaccctggtcacagtgtcatctacgcgtgaggacctgaagaacgtgttcccacctgaggtggccgtgttcgagcctagcgaggccgagatcagccacacccagaaagccaccctcgtgtgcctggctaccggcttctaccccgaccatgtggaactgtcttggtgggtcaacggcaaagaggtgcacagcggcgtgtgtaccgacccccagccactgaaagaacagcccgccctgaacgacagccggtactgcctgagcagcagactgagagtgtccgccaccttctggcagaacccccggaaccacttcagatgccaggtgcagttctacggcctgagcgagaacgacgagtggacccaggacagagccaagcccgtgacccagatcgtgtctgccgaagcctggggcagagccgattgcggctttaccagcgagagctaccagcagggcgtgctgagcgccaccaacctgagcgtgatcggcttcagaatcctgctgctgaaagtggccggctttaacctgctgatgaccctgcggctgtggtccagccgcgccaagagaagcggatctggcgtgaagcagaccctgaatttcgacctgctgaagctggctggcgacgtggaatccaacccaggcccttctagaggccatatgaccgagtacaagcccacggtgcgcctcgccacccgcgacgacgtccccagggccgtacgcaccctcgccgccgcgttcgccgactaccccgccacgcgccacaccgtcgatccggaccgccacatcgagcgggtcaccgagctgcaagaactcttcctcacgcgcgtcgggctcgacatcggcaaggtgtgggtcgcggacgacggcgccgcggtggcggtctggaccacgccggagagcgtcgaagcgggggcggtgttcgccgagatcggcccgcgcatggccgagttgagcggttcccggctggccgcgcagcaacagatggaaggcctcctggcgccgcaccggcccaaggagcccgcgtggttcctggccaccgtcggcgtctcgcccgaccaccagggcaagggtctgggcagcgccgtcgtgctccccggagtggaggcggccgagcgcgccggggtgcccgccttcctggagacctccgcgccccgcaacctccccttctacgagcggctcggcttcaccgtcaccgccgacgtcgaggtgcccgaaggaccgcgcacctggtgcatgacccgcaagcccggtgcctga

SEQ ID NO: 37107 - DNA, 2595 bp, synthetic construct; identical to SEQ ID NO: 37105
  source 1..2595: mol_type = other DNA

SEQ ID NO: 37108 - DNA, 2919 bp, synthetic construct
  source 1..2919: mol_type = other DNA
atggccttaccagtgaccgccttgctcctgccgctggccttgctgctccacgccgccaggccgctcgaggaggacctgaagaacgtgttcccacctgaggtggccgtgttcgagcctagcgaggccgagatcagccacacccagaaagccaccctcgtgtgcctggctaccggcttctaccccgaccatgtggaactgtcttggtgggtcaacggcaaagaggtgcacagcggcgtgtctaccgacccccagccactgaaagaacagcccgccctgaacgacagccggtactgcctgagcagcagactgagagtgtccgccaccttctggcagaacccccggaaccacttcagatgccaggtgcagttctacggcctgagcgagaacgacgagtggacccaggacagagccaagcccgtgacccagatcgtgtctgccgaagcctggggcagagccgatgatgtgattaagatccactggcaggaaaagaagtccaacaccatcctgggcagccaggaaggcaacaccatgaagaccaacgacacctacatgaagttcagctggctgaccgtgcccgagaagtccctggacaaagaacacagatgcatcgtgcggcacgaaaacaacaagaacggcgtggaccaggaaatcatcttcccacccatcaagaccgatgtgattacaatggaccccaaggacaactgctccaaggacgccaacgataccctgctgctccagctgaccaacaccagcgcctactacatgtacttgttgctgctgctgaagtccgtggtgtacttcgccatcatcacatgctgcctgctgatggctatggtcaagcggaaggacagccggggaagggccaagcgatctggatctggagcaacaaacttctcactactcaaacaagcaggtgacgtggaggagaatcccgggcctactagcatggccttaccagtgaccgccttgctcctgccgctggccttgctgctccacgccgccaggccggacatccagatgacacagagccctagcagcctgtctgccagcgtgggagacagagtgaccatcacatgcaagagcagccagagcctgctggactccgatggcaagacctacctgaactggtatcagcagaagcccggcaaggcccctaagctgctgatctacctggtgtccaagctggatagcggcgtgcccagcagattttctggcagcggcagcggaaccgacttcaccctgacaatatccagcctccagcctgaggacttcgccacctactactgcttccaaggcacccactttccatacaccttcggccagggcaccaaggtggaaatcaaaagaggcggaggcggaagtggaggcggaggatctggcggcggaggctctgaagtgcagctggttgaatcaggcggaggactggttcagcctggcggatctctgagactgtcttgtgccgccagcggctacaccttcaccagctactggatgaactgggtccgacaggcccctggcaaaggactggaatgggtcggaatgatcgaccccagcgacagcgagacacactacaaccacatcttcaaggaccgcttcaccatcagcgccgacaccagcaagaataccgcctacctccagatgaactccctgagagccgaggacaccgccgtgtactactgcgccagaaacctgtatctgttcggccagggaaccctggtcacagtgtcatctacgcgtatccagaaccctgatcctgccgtgtaccagctgcgggatagcaagagcagcgacaagagcgtgtgtctgttcaccgacttcgacagccagaccaacgtgtcccagagcaaggactccgacgtgtacatcaccgataagaccgtgctggacatgcggagcatggacttcaagagcaactccgccgtggcctggtccaacaagtccgatttcgcctgcgccaacgccttcaacaacagcattatccccgaggacacattcttcccaagccccgagagcagcgactccaccgaccacgtgaagcccaaagagacagagaacaccaagcagcccagcaagagctgccacaagcccaaggccatcgtgcacaccgagaaagtgaacatgatgagcctgaccgtgctgggcctgcggatgctgttcgccaaaaccgtggccgtgaacttcctgctgaccgccaagctgttcttcctcctcaccgcccgcgccaagagaagcggatctggcgtgaagcagaccctgaatttcgacctgctgaagctggctggcgacgtggaatccaacccaggcccttctagaggccatatgaccgagtacaagcccacggtgcgcctcgccacccgcgacgacgtccccagggccgtacgcaccctcgccgccgcgttcgccgactaccccgccacgcgccacaccgtcgatccggaccgccacatcgagcgggtcaccgagctgcaagaactcttcctcacgcgcgtcgggctcgacatcggcaaggtgtgggtcgcggacgacggcgccgcggtggcggtctggaccacgccggagagcgtcgaagcgggggcggtgttcgccgagatcggcccgcgcatggccgagttgagcggttcccggctggccgcgcagcaacagatggaaggcctcctggcgccgcaccggcccaaggagcccgcgtggttcctggccaccgtcggcgtctcgcccgaccaccagggcaagggtctgggcagcgccgtcgtgctccccggagtggaggcggccgagcgcgccggggtgcccgccttcctggagacctccgcgccccgcaacctccccttctacgagcggctcggcttcaccgtcaccgccgacgtcgaggtgcccgaaggaccgcgcacctggtgcatgacccgcaagcccggtgcctga

SEQ ID NO: 37109 - DNA, 2919 bp, synthetic construct
  source 1..2919: mol_type = other DNA
atggccttaccagtgaccgccttgctcctgccgctggccttgctgctccacgccgccaggccgctcgagatccagaaccctgatcctgccgtgtaccagctgcgggatagcaagagcagcgacaagagcgtgtgtctgttcaccgacttcgacagccagaccaacgtgtcccagagcaaggactccgacgtgtacatcaccgataagaccgtgctggacatgcggagcatggacttcaagagcaactccgccgtggcctggtccaacaagtccgatttcgcctgcgccaacgccttcaacaacagcattatccccgaggacacattcttcccaagccccgagagcagcgactccaccgaccacgtgaagcccaaagagacagagaacaccaagcagcccagcaagagctgccacaagcccaaggccatcgtgcacaccgagaaagtgaacatgatgagcctgaccgtgctgggcctgcggatgctgttcgccaaaaccgtggccgtgaacttcctgctgaccgccaagctgttcttcctcctcaccgccagggccaagcgatctggatctggagcaacaaacttctcactactcaaacaagcaggtgacgtggaggagaatcccgggcctactagcatggccttaccagtgaccgccttgctcctgccgctggccttgctgctccacgccgccaggccggacatccagatgacacagagccctagcagcctgtctgccagcgtgggagacagagtgaccatcacatgcaagagcagccagagcctgctggactccgatggcaagacctacctgaactggtatcagcagaagcccggcaaggcccctaagctgctgatctacctggtgtccaagctggatagcggcgtgcccagcagattttctggcagcggcagcggaaccgacttcaccctgacaatatccagcctccagcctgaggacttcgccacctactactgcttccaaggcacccactttccatacaccttcggccagggcaccaaggtggaaatcaaaagaggcggaggcggaagtggaggcggaggatctggcggcggaggctctgaagtgcagctggttgaatcaggcggaggactggttcagcctggcggatctctgagactgtcttgtgccgccagcggctacaccttcaccagctactggatgaactgggtccgacaggcccctggcaaaggactggaatgggtcggaatgatcgaccccagcgacagcgagacacactacaaccacatcttcaaggaccgcttcaccatcagcgccgacaccagcaagaataccgcctacctccagatgaactccctgagagccgaggacaccgccgtgtactactgcgccagaaacctgtatctgttcggccagggaaccctggtcacagtgtcatctacgcgtgaggacctgaagaacgtgttcccacctgaggtggccgtgttcgagcctagcgaggccgagatcagccacacccagaaagccaccctcgtgtgcctggctaccggcttctaccccgaccatgtggaactgtcttggtgggtcaacggcaaagaggtgcacagcggcgtgtctaccgacccccagccactgaaagaacagcccgccctgaacgacagccggtactgcctgagcagcagactgagagtgtccgccaccttctggcagaacccccggaaccacttcagatgccaggtgcagttctacggcctgagcgagaacgacgagtggacccaggacagagccaagcccgtgacccagatcgtgtctgccgaagcctggggcagagccgatgatgtgattaagatccactggcaggaaaagaagtccaacaccatcctgggcagccaggaaggcaacaccatgaagaccaacgacacctacatgaagttcagctggctgaccgtgcccgagaagtccctggacaaagaacacagatgcatcgtgcggcacgaaaacaacaagaacggcgtggaccaggaaatcatcttcccacccatcaagaccgatgtgattacaatggaccccaaggacaactgctccaaggacgccaacgataccctgctgctccagctgaccaacaccagcgcctactacatgtacttgttgctgctgctgaagtccgtggtgtacttcgccatcatcacatgctgcctgctgatggctatggtcaagcggaaggacagccggggacgcgccaagagaagcggatctggcgtgaagcagaccctgaatttcgacctgctgaagctggctggcgacgtggaatccaacccaggcccttctagaggccatatgaccgagtacaagcccacggtgcgcctcgccacccgcgacgacgtccccagggccgtacgcaccctcgccgccgcgttcgccgactaccccgccacgcgccacaccgtcgatccggaccgccacatcgagcgggtcaccgagctgcaagaactcttcctcacgcgcgtcgggctcgacatcggcaaggtgtgggtcgcggacgacggcgccgcggtggcggtctggaccacgccggagagcgtcgaagcgggggcggtgttcgccgagatcggcccgcgcatggccgagttgagcggttcccggctggccgcgcagcaacagatggaaggcctcctggcgccgcaccggcccaaggagcccgcgtggttcctggccaccgtcggcgtctcgcccgaccaccagggcaagggtctgggcagcgccgtcgtgctccccggagtggaggcggccgagcgcgccggggtgcccgccttcctggagacctccgcgccccgcaacctccccttctacgagcggctcggcttcaccgtcaccgccgacgtcgaggtgcccgaaggaccgcgcacctggtgcatgacccgcaagcccggtgcctga

SEQ ID NO: 37110 - DNA, 2913 bp, synthetic construct
  source 1..2913: mol_type = other DNA
atggccttaccagtgaccgccttgctcctgccgctggccttgctgctccacgccgccaggccgctcgaggaggacctgaagaacgtgttcccacctgaggtggccgtgttcgagcctagcgaggccgagatcagccacacccagaaagccaccctcgtgtgcctggctaccggcttctaccccgaccatgtggaactgtcttggtgggtcaacggcaaagaggtgcacagcggcgtgtgtaccgacccccagccactgaaagaacagcccgccctgaacgacagccggtactgcctgagcagcagactgagagtgtccgccaccttctggcagaacccccggaaccacttcagatgccaggtgcagttctacggcctgagcgagaacgacgagtggacccaggacagagccaagcccgtgacccagatcgtgtctgccgaagcctggggcagagccgatgatgtgattaagatccactggcaggaaaagaagtccaacaccatcctgggcagccaggaaggcaacaccatgaagaccaacgacacctacatgaagttcagctggctgaccgtgcccgagaagtccctggacaaagaacacagatgcatcgtgcggcacgaaaacaacaagaacggcgtggaccaggaaatcatcttcccacccatcaagaccgatgtgattacaatggaccccaaggacaactgctccaaggacgccaacgataccctgctgctccagctgaccaacaccagcgcctactacatgtacttgttgctgctgctgaagtccgtggtgtacttcgccatcatcacatgctgcctgctgcggagaaccgccttctgctgcaacggcgagaagtctagggccaagcgatctggatctggagcaacaaacttctcactactcaaacaagcaggtgacgtggaggagaatcccgggcctactagcatggccttaccagtgaccgccttgctcctgccgctggccttgctgctccacgccgccaggccggacatccagatgacacagagccctagcagcctgtctgccagcgtgggagacagagtgaccatcacatgcaagagcagccagagcctgctggactccgatggcaagacctacctgaactggtatcagcagaagcccggcaaggcccctaagctgctgatctacctggtgtccaagctggatagcggcgtgcccagcagattttctggcagcggcagcggaaccgacttcaccctgacaatatccagcctccagcctgaggacttcgccacctactactgcttccaaggcacccactttccatacaccttcggccagggcaccaaggtggaaatcaaaagaggcggaggcggaagtggaggcggaggatctggcggcggaggctctgaagtgcagctggttgaatcaggcggaggactggttcagcctggcggatctctgagactgtcttgtgccgccagcggctacaccttcaccagctactggatgaactgggtccgacaggcccctggcaaaggactggaatgggtcggaatgatcgaccccagcgacagcgagacacactacaaccacatcttcaaggaccgcttcaccatcagcgccgacaccagcaagaataccgcctacctccagatgaactccctgagagccgaggacaccgccgtgtactactgcgccagaaacctgtatctgttcggccagggaaccctggtcacagtgtcatctacgcgtatccagaaccctgatcctgccgtgtaccagctgcgggatagcaagagcagcgacaagagcgtgtgtctgttcaccgacttcgacagccagaccaacgtgtcccagagcaaggactccgacgtgtacatcaccgataagtgcgtgctggacatgcggagcatggacttcaagagcaactccgccgtggcctggtccaacaagtccgatttcgcctgcgccaacgccttcaacaacagcattatccccgaggacacattcttcccaagccccgagagcagcgactccaccgaccacgtgaagcccaaagagacagagaacaccaagcagcccagcaagagctgccacaagcccaaggccatcgtgcacaccgagaaagtgaacatgatgagcctgaccgtgctgggcctgcggatgctgttcgccaaaaccgtggccgtgaacttcctgctgaccgccaagctgttcttcctccgcgccaagagaagcggatctggcgtgaagcagaccctgaatttcgacctgctgaagctggctggcgacgtggaatccaacccaggcccttctagaggccatatgaccgagtacaagcccacggtgcgcctcgccacccgcgacgacgtccccagggccgtacgcaccctcgccgccgcgttcgccgactaccccgccacgcgccacaccgtcgatccggaccgccacatcgagcgggtcaccgagctgcaagaactcttcctcacgcgcgtcgggctcgacatcggcaaggtgtgggtcgcggacgacggcgccgcggtggcggtctggaccacgccggagagcgtcgaagcgggggcggtgttcgccgagatcggcccgcgcatggccgagttgagcggttcccggctggccgcgcagcaacagatggaaggcctcctggcgccgcaccggcccaaggagcccgcgtggttcctggccaccgtcggcgtctcgcccgaccaccagggcaagggtctgggcagcgccgtcgtgctccccggagtggaggcggccgagcgcgccggggtgcccgccttcctggagacctccgcgccccgcaacctccccttctacgagcggctcggcttcaccgtcaccgccgacgtcgaggtgcccgaaggaccgcgcacctggtgcatgacccgcaagcccggtgcctga

SEQ ID NO: 37111 - DNA, 2913 bp, synthetic construct
  source 1..2913: mol_type = other DNA
atggccttaccagtgaccgccttgctcctgccgctggccttgctgctccacgccgccaggccgctcgagatccagaaccctgatcctgccgtgtaccagctgcgggatagcaagagcagcgacaagagcgtgtgtctgttcaccgacttcgacagccagaccaacgtgtcccagagcaaggactccgacgtgtacatcaccgataagtgcgtgctggacatgcggagcatggacttcaagagcaactccgccgtggcctggtccaacaagtccgatttcgcctgcgccaacgccttcaacaacagcattatccccgaggacacattcttcccaagccccgagagcagcgactccaccgaccacgtgaagcccaaagagacagagaacaccaagcagcccagcaagagctgccacaagcccaaggccatcgtgcacaccgagaaagtgaacatgatgagcctgaccgtgctgggcctgcggatgctgttcgccaaaaccgtggccgtgaacttcctgctgaccgccaagctgttcttcctcagggccaagcgatctggatctggagcaacaaacttctcactactcaaacaagcaggtgacgtggaggagaatcccgggcctactagcatggccttaccagtgaccgccttgctcctgccgctggccttgctgctccacgccgccaggccggacatccagatgacacagagccctagcagcctgtctgccagcgtgggagacagagtgaccatcacatgcaagagcagccagagcctgctggactccgatggcaagacctacctgaactggtatcagcagaagcccggcaaggcccctaagctgctgatctacctggtgtccaagctggatagcggcgtgcccagcagattttctggcagcggcagcggaaccgacttcaccctgacaatatccagcctccagcctgaggacttcgccacctactactgcttccaaggcacccactttccatacaccttcggccagggcaccaaggtggaaatcaaaagaggcggaggcggaagtggaggcggaggatctggcggcggaggctctgaagtgcagctggttgaatcaggcggaggactggttcagcctggcggatctctgagactgtcttgtgccgccagcggctacaccttcaccagctactggatgaactgggtccgacaggcccctggcaaaggactggaatgggtcggaatgatcgaccccagcgacagcgagacacactacaaccacatcttcaaggaccgcttcaccatcagcgccgacaccagcaagaataccgcctacctccagatgaactccctgagagccgaggacaccgccgtgtactactgcgccagaaacctgtatctgttcggccagggaaccctggtcacagtgtcatctacgcgtgaggacctgaagaacgtgttcccacctgaggtggccgtgttcgagcctagcgaggccgagatcagccacacccagaaagccaccctcgtgtgcctggctaccggcttctaccccgaccatgtggaactgtcttggtgggtcaacggcaaagaggtgcacagcggcgtgtgtaccgacccccagccactgaaagaacagcccgccctgaacgacagccggtactgcctgagcagcagactgagagtgtccgccaccttctggcagaacccccggaaccacttcagatgccaggtgcagttctacggcctgagcgagaacgacgagtggacccaggacagagccaagcccgtgacccagatcgtgtctgccgaagcctggggcagagccgatgatgtgattaagatccactggcaggaaaagaagtccaacaccatcctgggcagccaggaaggcaacaccatgaagaccaacgacacctacatgaagttcagctggctgaccgtgcccgagaagtccctggacaaagaacacagatgcatcgtgcggcacgaaaacaacaagaacggcgtggaccaggaaatcatcttcccacccatcaagaccgatgtgattacaatggaccccaaggacaactgctccaaggacgccaacgataccctgctgctccagctgaccaacaccagcgcctactacatgtacttgttgctgctgctgaagtccgtggtgtacttcgccatcatcacatgctgcctgctgcggagaaccgccttctgctgcaacggcgagaagtctcgcgccaagagaagcggatctggcgtgaagcagaccctgaatttcgacctgctgaagctggctggcgacgtggaatccaacccaggcccttctagaggccatatgaccgagtacaagcccacggtgcgcctcgccacccgcgacgacgtccccagggccgtacgcaccctcgccgccgcgttcgccgactaccccgccacgcgccacaccgtcgatccggaccgccacatcgagcgggtcaccgagctgcaagaactcttcctcacgcgcgtcgggctcgacatcggcaaggtgtgggtcgcggacgacggcgccgcggtggcggtctggaccacgccggagagcgtcgaagcgggggcggtgttcgccgagatcggcccgcgcatggccgagttgagcggttcccggctggccgcgcagcaacagatggaaggcctcctggcgccgcaccggcccaaggagcccgcgtggttcctggccaccgtcggcgtctcgcccgaccaccagggcaagggtctgggcagcgccgtcgtgctccccggagtggaggcggccgagcgcgccggggtgcccgccttcctggagacctccgcgccccgcaacctccccttctacgagcggctcggcttcaccgtcaccgccgacgtcgaggtgcccgaaggaccgcgcacctggtgcatgacccgcaagcccggtgcctga

SEQ ID NO: 37112 - DNA, 2913 bp, synthetic construct
  source 1..2913: mol_type = other DNA
atggccttaccagtgaccgccttgctcctgccgctggccttgctgctccacgccgccaggccgctcgaggaggacctgaagaacgtgttcccacctgaggtggccgtgttcgagcctagcgaggccgagatcagccacacccagaaagccaccctcgtgtgcctggctaccggcttctaccccgaccatgtggaactgtcttggtgggtcaacggcaaagaggtgcacagcggcgtgtctaccgacccccagccactgaaagaacagcccgccctgaacgacagccggtactgcctgagcagcagactgagagtgtccgccaccttctggcagaacccccggaaccacttcagatgccaggtgcagttctacggcctgagcgagaacgacgagtggacccaggacagagccaagcccgtgacccagatcgtgtctgccgaagcctggggcagagccgatgatgtgattaagatccactggcaggaaaagaagtccaacaccatcctgggcagccaggaaggcaacaccatgaagaccaacgacacctacatgaagttcagctggctgaccgtgcccgagaagtccctggacaaagaacacagatgcatcgtgcggcacgaaaacaacaagaacggcgtggaccaggaaatcatcttcccacccatcaagaccgatgtgattacaatggaccccaaggacaactgctccaaggacgccaacgataccctgctgctccagctgaccaacaccagcgcctactacatgtacttgttgctgctgctgaagtccgtggtgtacttcgccatcatcacatgctgcctgctgcggagaaccgccttctgctgcaacggcgagaagtctagggccaagcgatctggatctggagcaacaaacttctcactactcaaacaagcaggtgacgtggaggagaatcccgggcctactagcatggccttaccagtgaccgccttgctcctgccgctggccttgctgctccacgccgccaggccggacatccagatgacacagagccctagcagcctgtctgccagcgtgggagacagagtgaccatcacatgcaagagcagccagagcctgctggactccgatggcaagacctacctgaactggtatcagcagaagcccggcaaggcccctaagctgctgatctacctggtgtccaagctggatagcggcgtgcccagcagattttctggcagcggcagcggaaccgacttcaccctgacaatatccagcctccagcctgaggacttcgccacctactactgcttccaaggcacccactttccatacaccttcggccagggcaccaaggtggaaatcaaaagaggcggaggcggaagtggaggcggaggatctggcggcggaggctctgaagtgcagctggttgaatcaggcggaggactggttcagcctggcggatctctgagactgtcttgtgccgccagcggctacaccttcaccagctactggatgaactgggtccgacaggcccctggcaaaggactggaatgggtcggaatgatcgaccccagcgacagcgagacacactacaaccacatcttcaaggaccgcttcaccatcagcgccgacaccagcaagaataccgcctacctccagatgaactccctgagagccgaggacaccgccgtgtactactgcgccagaaacctgtatctgttcggccagggaaccctggtcacagtgtcatctacgcgtatccagaaccctgatcctgccgtgtaccagctgcgggatagcaagagcagcgacaagagcgtgtgtctgttcaccgacttcgacagccagaccaacgtgtcccagagcaaggactccgacgtgtacatcaccgataagaccgtgctggacatgcggagcatggacttcaagagcaactccgccgtggcctggtccaacaagtccgatttcgcctgcgccaacgccttcaacaacagcattatccccgaggacacattcttcccaagccccgagagcagcgactccaccgaccacgtgaagcccaaagagacagagaacaccaagcagcccagcaagagctgccacaagcccaaggccatcgtgcacaccgagaaagtgaacatgatgagcctgaccgtgctgggcctgcggatgctgttcgccaaaaccgtggccgtgaacttcctgctgaccgccaagctgttcttcctccgcgccaagagaagcggatctggcgtgaagcagaccctgaatttcgacctgctgaagctggctggcgacgtggaatccaacccaggcccttctagaggccatatgaccgagtacaagcccacggtgcgcctcgccacccgcgacgacgtccccagggccgtacgcaccctcgccgccgcgttcgccgactaccccgccacgcgccacaccgtcgatccggaccgccacatcgagcgggtcaccgagctgcaagaactcttcctcacgcgcgtcgggctcgacatcggcaaggtgtgggtcgcggacgacggcgccgcggtggcggtctggaccacgccggagagcgtcgaagcgggggcggtgttcgccgagatcggcccgcgcatggccgagttgagcggttcccggctggccgcgcagcaacagatggaaggcctcctggcgccgcaccggcccaaggagcccgcgtggttcctggccaccgtcggcgtctcgcccgaccaccagggcaagggtctgggcagcgccgtcgtgctccccggagtggaggcggccgagcgcgccggggtgcccgccttcctggagacctccgcgccccgcaacctccccttctacgagcggctcggcttcaccgtcaccgccgacgtcgaggtgcccgaaggaccgcgcacctggtgcatgacccgcaagcccggtgcctga

SEQ ID NO: 37113 - DNA, 2913 bp, synthetic construct
  source 1..2913: mol_type = other DNA
atggccttaccagtgaccgccttgctcctgccgctggccttgctgctccacgccgccaggccgctcgagatccagaaccctgatcctgccgtgtaccagctgcgggatagcaagagcagcgacaagagcgtgtgtctgttcaccgacttcgacagccagaccaacgtgtcccagagcaaggactccgacgtgtacatcaccgataagaccgtgctggacatgcggagcatggacttcaagagcaactccgccgtggcctggtccaacaagtccgatttcgcctgcgccaacgccttcaacaacagcattatccccgaggacacattcttcccaagccccgagagcagcgactccaccgaccacgtgaagcccaaagagacagagaacaccaagcagcccagcaagagctgccacaagcccaaggccatcgtgcacaccgagaaagtgaacatgatgagcctgaccgtgctgggcctgcggatgctgttcgccaaaaccgtggccgtgaacttcctgctgaccgccaagctgttcttcctcagggccaagcgatctggatctggagcaacaaacttctcactactcaaacaagcaggtgacgtggaggagaatcccgggcctactagcatggccttaccagtgaccgccttgctcctgccgctggccttgctgctccacgccgccaggccggacatccagatgacacagagccctagcagcctgtctgccagcgtgggagacagagtgaccatcacatgcaagagcagccagagcctgctggactccgatggcaagacctacctgaactggtatcagcagaagcccggcaaggcccctaagctgctgatctacctggtgtccaagctggatagcggcgtgcccagcagattttctggcagcggcagcggaaccgacttcaccctgacaatatccagcctccagcctgaggacttcgccacctactactgcttccaaggcacccactttccatacaccttcggccagggcaccaaggtggaaatcaaaagaggcggaggcggaagtggaggcggaggatctggcggcggaggctctgaagtgcagctggttgaatcaggcggaggactggttcagcctggcggatctctgagactgtcttgtgccgccagcggctacaccttcaccagctactggatgaactgggtccgacaggcccctggcaaaggactggaatgggtcggaatgatcgaccccagcgacagcgagacacactacaaccacatcttcaaggaccgcttcaccatcagcgccgacaccagcaagaataccgcctacctccagatgaactccctgagagccgaggacaccgccgtgtactactgcgccagaaacctgtatctgttcggccagggaaccctggtcacagtgtcatctacgcgtgaggacctgaagaacgtgttcccacctgaggtggccgtgttcgagcctagcgaggccgagatcagccacacccagaaagccaccctcgtgtgcctggctaccggcttctaccccgaccatgtggaactgtcttggtgggtcaacggcaaagaggtgcacagcggcgtgtctaccgacccccagccactgaaagaacagcccgccctgaacgacagccggtactgcctgagcagcagactgagagtgtccgccaccttctggcagaacccccggaaccacttcagatgccaggtgcagttctacggcctgagcgagaacgacgagtggacccaggacagagccaagcccgtgacccagatcgtgtctgccgaagcctggggcagagccgatgatgtgattaagatccactggcaggaaaagaagtccaacaccatcctgggcagccaggaaggcaacaccatgaagaccaacgacacctacatgaagttcagctggctgaccgtgcccgagaagtccctggacaaagaacacagatgcatcgtgcggcacgaaaacaacaagaacggcgtggaccaggaaatcatcttcccacccatcaagaccgatgtgattacaatggaccccaaggacaactgctccaaggacgccaacgataccctgctgctccagctgaccaacaccagcgcctactacatgtacttgttgctgctgctgaagtccgtggtgtacttcgccatcatcacatgctgcctgctgcggagaaccgccttctgctgcaacggcgagaagtctcgcgccaagagaagcggatctggcgtgaagcagaccctgaatttcgacctgctgaagctggctggcgacgtggaatccaacccaggcccttctagaggccatatgaccgagtacaagcccacggtgcgcctcgccacccgcgacgacgtccccagggccgtacgcaccctcgccgccgcgttcgccgactaccccgccacgcgccacaccgtcgatccggaccgccacatcgagcgggtcaccgagctgcaagaactcttcctcacgcgcgtcgggctcgacatcggcaaggtgtgggtcgcggacgacggcgccgcggtggcggtctggaccacgccggagagcgtcgaagcgggggcggtgttcgccgagatcggcccgcgcatggccgagttgagcggttcccggctggccgcgcagcaacagatggaaggcctcctggcgccgcaccggcccaaggagcccgcgtggttcctggccaccgtcggcgtctcgcccgaccaccagggcaagggtctgggcagcgccgtcgtgctccccggagtggaggcggccgagcgcgccggggtgcccgccttcctggagacctccgcgccccgcaacctccccttctacgagcggctcggcttcaccgtcaccgccgacgtcgaggtgcccgaaggaccgcgcacctggtgcatgacccgcaagcccggtgcctga

SEQ ID NO: 37114 - DNA, 2607 bp, synthetic construct
  source 1..2607: mol_type = other DNA
atggccttaccagtgaccgccttgctcctgccgctggccttgctgctccacgccgccaggccgctcgaggaggacctgaagaacgtgttcccacctgaggtggccgtgttcgagcctagcaaggccgagatcgcccacacccagaaagccaccctcgtgtgcctggctaccggcttctaccccgaccatgtggaactgtcttggtgggtcaacggcaaagaggtgcacagcggcgtgtgtaccgacccccagccactgaaagaacagcccgccctgaacgacagccggtactgcctgagcagcagactgagagtgtccgccaccttctggcagaacccccggaaccacttcagatgccaggtgcagttctacggcctgagcgagaacgacgagtggacccaggacagagccaagcccgtgacccagatcgtgtctgccgaagcctggggcagagccgattgcggcatcaccagcgccagctaccaccagggcgtgctgagcgccaccatcctgtacgagatcctgctgggcaaggccaccctgtacgccgtgctggtgtctgccctggtgctgatggctatggtcaagcggaaggacagccggggaagggccaagcgatctggatctggagcaacaaacttctcactactcaaacaagcaggtgacgtggaggagaatcccgggcctactagcatggccttaccagtgaccgccttgctcctgccgctggccttgctgctccacgccgccaggccggacatccagatgacacagagccctagcagcctgtctgccagcgtgggagacagagtgaccatcacatgcaagagcagccagagcctgctggactccgatggcaagacctacctgaactggtatcagcagaagcccggcaaggcccctaagctgctgatctacctggtgtccaagctggatagcggcgtgcccagcagattttctggcagcggcagcggaaccgacttcaccctgacaatatccagcctccagcctgaggacttcgccacctactactgcttccaaggcacccactttccatacaccttcggccagggcaccaaggtggaaatcaaaagaggcggaggcggaagtggaggcggaggatctggcggcggaggctctgaagtgcagctggttgaatcaggcggaggactggttcagcctggcggatctctgagactgtcttgtgccgccagcggctacaccttcaccagctactggatgaactgggtccgacaggcccctggcaaaggactggaatgggtcggaatgatcgaccccagcgacagcgagacacactacaaccacatcttcaaggaccgcttcaccatcagcgccgacaccagcaagaataccgcctacctccagatgaactccctgagagccgaggacaccgccgtgtactactgcgccagaaacctgtatctgttcggccagggaaccctggtcacagtgtcatctacgcgtatccagaaccctgatcctgccgtgtaccagctgcgggatagcaagagcagcgacaagagcgtgtgtctgttcaccgacttcgacagccagaccaacgtgtcccagagcaaggactccgacgtgtacatcaccgataagtgcgtgctggacatgcggagcatggacttcaagagcaactccgccgtggcctggtccaacaagtccgatttcgcctgcgccaacgccttcaacaacagcattatccccgaggacacattcttcccaagcagcgacgtgccctgcgacgtgaagctggtggaaaagagcttcgagacagacaccaacctgaacttccagaacctgagcgtgatcggcttcagaatcctgctgctgaaagtggccggctttaacctgctgatgaccctgcggctgtggtccagccgcgccaagagaagcggatctggcgtgaagcagaccctgaatttcgacctgctgaagctggctggcgacgtggaatccaacccaggcccttctagaggccatatgaccgagtacaagcccacggtgcgcctcgccacccgcgacgacgtccccagggccgtacgcaccctcgccgccgcgttcgccgactaccccgccacgcgccacaccgtcgatccggaccgccacatcgagcgggtcaccgagctgcaagaactcttcctcacgcgcgtcgggctcgacatcggcaaggtgtgggtcgcggacgacggcgccgcggtggcggtctggaccacgccggagagcgtcgaagcgggggcggtgttcgccgagatcggcccgcgcatggccgagttgagcggttcccggctggccgcgcagcaacagatggaaggcctcctggcgccgcaccggcccaaggagcccgcgtggttcctggccaccgtcggcgtctcgcccgaccaccagggcaagggtctgggcagcgccgtcgtgctccccggagtggaggcggccgagcgcgccggggtgcccgccttcctggagacctccgcgccccgcaacctccccttctacgagcggctcggcttcaccgtcaccgccgacgtcgaggtgcccgaaggaccgcgcacctggtgcatgacccgcaagcccggtgcctga

SEQ ID NO: 37115 - DNA, 2607 bp, synthetic construct
  source 1..2607: mol_type = other DNA
atggccttaccagtgaccgccttgctcctgccgctggccttgctgctccacgccgccaggccgctcgagatccagaaccctgatcctgccgtgtaccagctgcgggatagcaagagcagcgacaagagcgtgtgtctgttcaccgacttcgacagccagaccaacgtgtcccagagcaaggactccgacgtgtacatcaccgataagtgcgtgctggacatgcggagcatggacttcaagagcaactccgccgtggcctggtccaacaagtccgatttcgcctgcgccaacgccttcaacaacagcattatccccgaggacacattcttcccaagcagcgacgtgccctgcgacgtgaagctggtggaaaagagcttcgagacagacaccaacctgaacttccagaacctgagcgtgatcggcttcagaatcctgctgctgaaagtggccggctttaacctgctgatgaccctgcggctgtggtccagcagggccaagcgatctggatctggagcaacaaacttctcactactcaaacaagcaggtgacgtggaggagaatcccgggcctactagcatggccttaccagtgaccgccttgctcctgccgctggccttgctgctccacgccgccaggccggacatccagatgacacagagccctagcagcctgtctgccagcgtgggagacagagtgaccatcacatgcaagagcagccagagcctgctggactccgatggcaagacctacctgaactggtatcagcagaagcccggcaaggcccctaagctgctgatctacctggtgtccaagctggatagcggcgtgcccagcagattttctggcagcggcagcggaaccgacttcaccctgacaatatccagcctccagcctgaggacttcgccacctactactgcttccaaggcacccactttccatacaccttcggccagggcaccaaggtggaaatcaaaagaggcggaggcggaagtggaggcggaggatctggcggcggaggctctgaagtgcagctggttgaatcaggcggaggactggttcagcctggcggatctctgagactgtcttgtgccgccagcggctacaccttcaccagctactggatgaactgggtccgacaggcccctggcaaaggactggaatgggtcggaatgatcgaccccagcgacagcgagacacactacaaccacatcttcaaggaccgcttcaccatcagcgccgacaccagcaagaataccgcctacctccagatgaactccctgagagccgaggacaccgccgtgtactactgcgccagaaacctgtatctgttcggccagggaaccctggtcacagtgtcatctacgcgtgaggacctgaagaacgtgttcccacctgaggtggccgtgttcgagcctagcaaggccgagatcgcccacacccagaaagccaccctcgtgtgcctggctaccggcttctaccccgaccatgtggaactgtcttggtgggtcaacggcaaagaggtgcacagcggcgtgtgtaccgacccccagccactgaaagaacagcccgccctgaacgacagccggtactgcctgagcagcagactgagagtgtccgccaccttctggcagaacccccggaaccacttcagatgccaggtgcagttctacggcctgagcgagaacgacgagtggacccaggacagagccaagcccgtgacccagatcgtgtctgccgaagcctggggcagagccgattgcggcatcaccagcgccagctaccaccagggcgtgctgagcgccaccatcctgtacgagatcctgctgggcaaggccaccctgtacgccgtgctggtgtctgccctggtgctgatggctatggtcaagcggaaggacagccggggacgcgccaagagaagcggatctggcgtgaagcagaccctgaatttcgacctgctgaagctggctggcgacgtggaatccaacccaggcccttctagaggccatatgaccgagtacaagcccacggtgcgcctcgccacccgcgacgacgtccccagggccgtacgcaccctcgccgccgcgttcgccgactaccccgccacgcgccacaccgtcgatccggaccgccacatcgagcgggtcaccgagctgcaagaactcttcctcacgcgcgtcgggctcgacatcggcaaggtgtgggtcgcggacgacggcgccgcggtggcggtctggaccacgccggagagcgtcgaagcgggggcggtgttcgccgagatcggcccgcgcatggccgagttgagcggttcccggctggccgcgcagcaacagatggaaggcctcctggcgccgcaccggcccaaggagcccgcgtggttcctggccaccgtcggcgtctcgcccgaccaccagggcaagggtctgggcagcgccgtcgtgctccccggagtggaggcggccgagcgcgccggggtgcccgccttcctggagacctccgcgccccgcaacctccccttctacgagcggctcggcttcaccgtcaccgccgacgtcgaggtgcccgaaggaccgcgcacctggtgcatgacccgcaagcccggtgcctga

SEQ ID NO: 37116 - DNA, 2286 bp, synthetic construct
  source 1..2286: mol_type = other DNA
atggccttaccagtgaccgccttgctcctgccgctggccttgctgctccacgccgccaggccgctcgagcagagttttgggttgttggaccctaaattgtgctatctgttggacggaatcctgttcatttacggagtgatcctgaccgcattgttcctgcgggttaagttttccagatccgcagacgcacccgcttaccaacaagggcagaaccaactctacaatgaacttaatttggggcggagggaagagtacgacgttctggacaaaaggaggggacgagatcccgagatgggcggaaagcctcagcgaaggaagaatccgcaagaggggctttataacgaactccagaaagataaaatggcagaagcctatagtgagattgggatgaagggagaaaggaggaggggtaaaggtcacgatgggttgtaccaaggattgagcacagccactaaagatacctatgatgcgctccacatgcaggccctgccgccaagaagggccaagcgatctggatctggagcaacaaacttctcactactcaaacaagcaggtgacgtggaggagaatcccgggcctactagcatggccttaccagtgaccgccttgctcctgccgctggccttgctgctccacgccgccaggccggacatccagatgacacagagccctagcagcctgtctgccagcgtgggagacagagtgaccatcacatgcaagagcagccagagcctgctggactccgatggcaagacctacctgaactggtatcagcagaagcccggcaaggcccctaagctgctgatctacctggtgtccaagctggatagcggcgtgcccagcagattttctggcagcggcagcggaaccgacttcaccctgacaatatccagcctccagcctgaggacttcgccacctactactgcttccaaggcacccactttccatacaccttcggccagggcaccaaggtggaaatcaaaagaggcggaggcggaagtggaggcggaggatctggcggcggaggctctgaagtgcagctggttgaatcaggcggaggactggttcagcctggcggatctctgagactgtcttgtgccgccagcggctacaccttcaccagctactggatgaactgggtccgacaggcccctggcaaaggactggaatgggtcggaatgatcgaccccagcgacagcgagacacactacaaccacatcttcaaggaccgcttcaccatcagcgccgacaccagcaagaataccgcctacctccagatgaactccctgagagccgaggacaccgccgtgtactactgcgccagaaacctgtatctgttcggccagggaaccctggtcacagtgtcatctacgcgtgagctgggagagcctcagctgtgctatatcctggacgccatcctgtttctgtacggcatcgtgctgaccctgctgtactgccggctgaagatccaagtgcggaaggccgccatcaccagctacgagaaatccgacggcgtgtacaccggcctgagcaccagaaatcaagagacatacgagacactgaagcacgaaaagcctccacaacgcgccaagagaagcggatctggcgtgaagcagaccctgaatttcgacctgctgaagctggctggcgacgtggaatccaacccaggcccttctagaggccatatgaccgagtacaagcccacggtgcgcctcgccacccgcgacgacgtccccagggccgtacgcaccctcgccgccgcgttcgccgactaccccgccacgcgccacaccgtcgatccggaccgccacatcgagcgggtcaccgagctgcaagaactcttcctcacgcgcgtcgggctcgacatcggcaaggtgtgggtcgcggacgacggcgccgcggtggcggtctggaccacgccggagagcgtcgaagcgggggcggtgttcgccgagatcggcccgcgcatggccgagttgagcggttcccggctggccgcgcagcaacagatggaaggcctcctggcgccgcaccggcccaaggagcccgcgtggttcctggccaccgtcggcgtctcgcccgaccaccagggcaagggtctgggcagcgccgtcgtgctccccggagtggaggcggccgagcgcgccggggtgcccgccttcctggagacctccgcgccccgcaacctccccttctacgagcggctcggcttcaccgtcaccgccgacgtcgaggtgcccgaaggaccgcgcacctggtgcatgacccgcaagcccggtgcctga

SEQ ID NO: 37117 - DNA, 2919 bp, synthetic construct; identical to SEQ ID NO: 37108
  source 1..2919: mol_type = other DNA

SEQ ID NO: 37118 - DNA, 2919 bp, synthetic construct; identical to SEQ ID NO: 37109
  source 1..2919: mol_type = other DNA

SEQ ID NO: 37119 - DNA, 2916 bp, synthetic construct
  source 1..2916: mol_type = other DNA
atggccttaccagtgaccgccttgctcctgccgctggccttgctgctccacgccgccaggccgctcgaggaggaggacctgaagaacgtgttcccacctgaggtggccgtgttcgagcctagcgaggccgagatcagccacacccagaaagccaccctcgtgtgcctggctaccggcttctaccccgaccatgtggaactgtcttggtgggtcaacggcaaagaggtgcacagcggcgtgtgtaccgacccccagccactgaaagaacagcccgccctgaacgacagccggtactgcctgagcagcagactgagagtgtccgccaccttctggcagaacccccggaaccacttcagatgccaggtgcagttctacggcctgagcgagaacgacgagtggacccaggacagagccaagcccgtgacccagatcgtgtctgccgaagcctggggcagagccgatgatgtgattaagatccactggcaggaaaagaagtccaacaccatcctgggcagccaggaaggcaacaccatgaagaccaacgacacctacatgaagttcagctggctgaccgtgcccgagaagtccctggacaaagaacacagatgcatcgtgcggcacgaaaacaacaagaacggcgtggaccaggaaatcatcttcccacccatcaagaccgatgtgattacaatggaccccaaggacaactgctccaaggacgccaacgataccctgctgctccagctgaccaacaccagcgcctactacatgtacttgttgctgctgctgaagtccgtggtgtacttcgccatcatcacatgctgcctgctgcggagaaccgccttctgctgcaacggcgagaagtctagggccaagcgatctggatctggagcaacaaacttctcactactcaaacaagcaggtgacgtggaggagaatcccgggcctactagcatggccttaccagtgaccgccttgctcctgccgctggccttgctgctccacgccgccaggccggacatccagatgacacagagccctagcagcctgtctgccagcgtgggagacagagtgaccatcacatgcaagagcagccagagcctgctggactccgatggcaagacctacctgaactggtatcagcagaagcccggcaaggcccctaagctgctgatctacctggtgtccaagctggatagcggcgtgcccagcagattttctggcagcggcagcggaaccgacttcaccctgacaatatccagcctccagcctgaggacttcgccacctactactgcttccaaggcacccactttccatacaccttcggccagggcaccaaggtggaaatcaaaagaggcggaggcggaagtggaggcggaggatctggcggcggaggctctgaagtgcagctggttgaatcaggcggaggactggttcagcctggcggatctctgagactgtcttgtgccgccagcggctacaccttcaccagctactggatgaactgggtccgacaggcccctggcaaaggactggaatgggtcggaatgatcgaccccagcgacagcgagacacactacaaccacatcttcaaggaccgcttcaccatcagcgccgacaccagcaagaataccgcctacctccagatgaactccctgagagccgaggacaccgccgtgtactactgcgccagaaacctgtatctgttcggccagggaaccctggtcacagtgtcatctacgcgtatccagaaccctgatcctgccgtgtaccagctgcgggatagcaagagcagcgacaagagcgtgtgtctgttcaccgacttcgacagccagaccaacgtgtcccagagcaaggactccgacgtgtacatcaccgataagtgcgtgctggacatgcggagcatggacttcaagagcaactccgccgtggcctggtccaacaagtccgatttcgcctgcgccaacgccttcaacaacagcattatccccgaggacacattcttcccaagccccgagagcagcgactccaccgaccacgtgaagcccaaagagacagagaacaccaagcagcccagcaagagctgccacaagcccaaggccatcgtgcacaccgagaaagtgaacatgatgagcctgaccgtgctgggcctgcggatgctgttcgccaaaaccgtggccgtgaacttcctgctgaccgccaagctgttcttcctccgcgccaagagaagcggatctggcgtgaagcagaccctgaatttcgacctgctgaagctggctggcgacgtggaatccaacccaggcccttctagaggccatatgaccgagtacaagcccacggtgcgcctcgccacccgcgacgacgtccccagggccgtacgcaccctcgccgccgcgttcgccgactaccccgccacgcgccacaccgtcgatccggaccgccacatcgagcgggtcaccgagctgcaagaactcttcctcacgcgcgtcgggctcgacatcggcaaggtgtgggtcgcggacgacggcgccgcggtggcggtctggaccacgccggagagcgtcgaagcgggggcggtgttcgccgagatcggcccgcgcatggccgagttgagcggttcccggctggccgcgcagcaacagatggaaggcctcctggcgccgcaccggcccaaggagcccgcgtggttcctggccaccgtcggcgtctcgcccgaccaccagggcaagggtctgggcagcgccgtcgtgctccccggagtggaggcggccgagcgcgccggggtgcccgccttcctggagacctccgcgccccgcaacctccccttctacgagcggctcggcttcaccgtcaccgccgacgtcgaggtgcccgaaggaccgcgcacctggtgcatgacccgcaagcccggtgcctga

SEQ ID NO: 37120 - DNA, 2916 bp, synthetic construct
  source 1..2916: mol_type = other DNA
atggccttaccagtgaccgccttgctcctgccgctggccttgctgctccacgccgccaggccgctcgagatccagaaccctgatcctgccgtgtaccagctgcgggatagcaagagcagcgacaagagcgtgtgtctgttcaccgacttcgacagccagaccaacgtgtcccagagcaaggactccgacgtgtacatcaccgataagtgcgtgctggacatgcggagcatggacttcaagagcaactccgccgtggcctggtccaacaagtccgatttcgcctgcgccaacgccttcaacaacagcattatccccgaggacacattcttcccaagccccgagagcagcgactccaccgaccacgtgaagcccaaagagacagagaacaccaagcagcccagcaagagctgccacaagcccaaggccatcgtgcacaccgagaaagtgaacatgatgagcctgaccgtgctgggcctgcggatgctgttcgccaaaaccgtggccgtgaacttcctgctgaccgccaagctgttcttcctcagggccaagcgatctggatctggagcaacaaacttctcactactcaaacaagcaggtgacgtggaggagaatcccgggcctactagcatggccttaccagtgaccgccttgctcctgccgctggccttgctgctccacgccgccaggccggacatccagatgacacagagccctagcagcctgtctgccagcgtgggagacagagtgaccatcacatgcaagagcagccagagcctgctggactccgatggcaagacctacctgaactggtatcagcagaagcccggcaaggcccctaagctgctgatctacctggtgtccaagctggatagcggcgtgcccagcagattttctggcagcggcagcggaaccgacttcaccctgacaatatccagcctccagcctgaggacttcgccacctactactgcttccaaggcacccactttccatacaccttcggccagggcaccaaggtggaaatcaaaagaggcggaggcggaagtggaggcggaggatctggcggcggaggctctgaagtgcagctggttgaatcaggcggaggactggttcagcctggcggatctctgagactgtcttgtgccgccagcggctacaccttcaccagctactggatgaactgggtccgacaggcccctggcaaaggactggaatgggtcggaatgatcgaccccagcgacagcgagacacactacaaccacatcttcaaggaccgcttcaccatcagcgccgacaccagcaagaataccgcctacctccagatgaactccctgagagccgaggacaccgccgtgtactactgcgccagaaacctgtatctgttcggccagggaaccctggtcacagtgtcatctacgcgtgaggaggacctgaagaacgtgttcccacctgaggtggccgtgttcgagcctagcgaggccgagatcagccacacccagaaagccaccctcgtgtgcctggctaccggcttctaccccgaccatgtggaactgtcttggtgggtcaacggcaaagaggtgcacagcggcgtgtgtaccgacccccagccactgaaagaacagcccgccctgaacgacagccggtactgcctgagcagcagactgagagtgtccgccaccttctggcagaacccccggaaccacttcagatgccaggtgcagttctacggcctgagcgagaacgacgagtggacccaggacagagccaagcccgtgacccagatcgtgtctgccgaagcctggggcagagccgatgatgtgattaagatccactggcaggaaaagaagtccaacaccatcctgggcagccaggaaggcaacaccatgaagaccaacgacacctacatgaagttcagctggctgaccgtgcccgagaagtccctggacaaagaacacagatgcatcgtgcggcacgaaaacaacaagaacggcgtggaccaggaaatcatcttcccacccatcaagaccgatgtgattacaatggaccccaaggacaactgctccaaggacgccaacgataccctgctgctccagctgaccaacaccagcgcctactacatgtacttgttgctgctgctgaagtccgtggtgtacttcgccatcatcacatgctgcctgctgcggagaaccgccttctgctgcaacggcgagaagtctcgcgccaagagaagcggatctggcgtgaagcagaccctgaatttcgacctgctgaagctggctggcgacgtggaatccaacccaggcccttctagaggccatatgaccgagtacaagcccacggtgcgcctcgccacccgcgacgacgtccccagggccgtacgcaccctcgccgccgcgttcgccgactaccccgccacgcgccacaccgtcgatccggaccgccacatcgagcgggtcaccgagctgcaagaactcttcctcacgcgcgtcgggctcgacatcggcaaggtgtgggtcgcggacgacggcgccgcggtggcggtctggaccacgccggagagcgtcgaagcgggggcggtgttcgccgagatcggcccgcgcatggccgagttgagcggttcccggctggccgcgcagcaacagatggaaggcctcctggcgccgcaccggcccaaggagcccgcgtggttcctggccaccgtcggcgtctcgcccgaccaccagggcaagggtctgggcagcgccgtcgtgctccccggagtggaggcggccgagcgcgccggggtgcccgccttcctggagacctccgcgccccgcaacctccccttctacgagcggctcggcttcaccgtcaccgccgacgtcgaggtgcccgaaggaccgcgcacctggtgcatgacccgcaagcccggtgcctga

SEQ ID NO: 37121 - DNA, 2607 bp, synthetic construct
  source 1..2607: mol_type = other DNA
atggccttaccagtgaccgccttgctcctgccgctggccttgctgctccacgccgccaggccgctcgaggaggacctgaagaacgtgttcccacctgaggtggccgtgttcgagcctagcgaggccgagatcagccacacccagaaagccaccctcgtgtgcctggctaccggcttctaccccgaccatgtggaactgtcttggtgggtcaacggcaaagaggtgcacagcggcgtgtctaccgacccccagccactgaaagaacagcccgccctgaacgacagccggtactgcctgagcagcagactgagagtgtccgccaccttctggcagaacccccggaaccacttcagatgccaggtgcagttctacggcctgagcgagaacgacgagtggacccaggacagagccaagcccgtgacccagatcgtgtctgccgaagcctggggcagagccgattgcggctttaccagcgagagctaccagcagggcgtgctgagcgccaccaacctgagcgtgatcggcttcagaatcctgctgctgaaagtggccggctttaacctgctgatgaccctgcggctgtggtccagcagggccaagcgatctggatctggagcaacaaacttctcactactcaaacaagcaggtgacgtggaggagaatcccgggcctactagcatggccttaccagtgaccgccttgctcctgccgctggccttgctgctccacgccgccaggccggacatccagatgacacagagccctagcagcctgtctgccagcgtgggagacagagtgaccatcacatgcaagagcagccagagcctgctggactccgatggcaagacctacctgaactggtatcagcagaagcccggcaaggcccctaagctgctgatctacctggtgtccaagctggatagcggcgtgcccagcagattttctggcagcggcagcggaaccgacttcaccctgacaatatccagcctccagcctgaggacttcgccacctactactgcttccaaggcacccactttccatacaccttcggccagggcaccaaggtggaaatcaaaagaggcggaggcggaagtggaggcggaggatctggcggcggaggctctgaagtgcagctggttgaatcaggcggaggactggttcagcctggcggatctctgagactgtcttgtgccgccagcggctacaccttcaccagctactggatgaactgggtccgacaggcccctggcaaaggactggaatgggtcggaatgatcgaccccagcgacagcgagacacactacaaccacatcttcaaggaccgcttcaccatcagcgccgacaccagcaagaataccgcctacctccagatgaactccctgagagccgaggacaccgccgtgtactactgcgccagaaacctgtatctgttcggccagggaaccctggtcacagtgtcatctacgcgtatccagaaccctgatcctgccgtgtaccagctgcgggatagcaagagcagcgacaagagcgtgtgtctgttcaccgacttcgacagccagaccaacgtgtcccagagcaaggactccgacgtgtacatcaccgataagaccgtgctggacatgcggagcatggacttcaagagcaactccgccgtggcctggtccaacaagtccgatttcgcctgcgccaacgccttcaacaacagcattatccccgaggacacattcttcccaagccccgagagcagctgcgacgtgaagctggtggaaaagagcttcgagacagacaccaacctgaacttccagatcctgtacgagatcctgctgggcaaggccaccctgtacgccgtgctggtgtctgccctggtgctgatggctatggtcaagcggaaggacagccggggacgcgccaagagaagcggatctggcgtgaagcagaccctgaatttcgacctgctgaagctggctggcgacgtggaatccaacccaggcccttctagaggccatatgaccgagtacaagcccacggtgcgcctcgccacccgcgacgacgtccccagggccgtacgcaccctcgccgccgcgttcgccgactaccccgccacgcgccacaccgtcgatccggaccgccacatcgagcgggtcaccgagctgcaagaactcttcctcacgcgcgtcgggctcgacatcggcaaggtgtgggtcgcggacgacggcgccgcggtggcggtctggaccacgccggagagcgtcgaagcgggggcggtgttcgccgagatcggcccgcgcatggccgagttgagcggttcccggctggccgcgcagcaacagatggaaggcctcctggcgccgcaccggcccaaggagcccgcgtggttcctggccaccgtcggcgtctcgcccgaccaccagggcaagggtctgggcagcgccgtcgtgctccccggagtggaggcggccgagcgcgccggggtgcccgccttcctggagacctccgcgccccgcaacctccccttctacgagcggctcggcttcaccgtcaccgccgacgtcgaggtgcccgaaggaccgcgcacctggtgcatgacccgcaagcccggtgcctga

SEQ ID NO: 37122 - DNA, 2607 bp, synthetic construct
  source 1..2607: mol_type = other DNA
atggccttaccagtgaccgccttgctcctgccgctggccttgctgctccacgccgccaggccgctcgagatccagaaccctgatcctgccgtgtaccagctgcgggatagcaagagcagcgacaagagcgtgtgtctgttcaccgacttcgacagccagaccaacgtgtcccagagcaaggactccgacgtgtacatcaccgataagaccgtgctggacatgcggagcatggacttcaagagcaactccgccgtggcctggtccaacaagtccgatttcgcctgcgccaacgccttcaacaacagcattatccccgaggacacattcttcccaagccccgagagcagctgcgacgtgaagctggtggaaaagagcttcgagacagacaccaacctgaacttccagatcctgtacgagatcctgctgggcaaggccaccctgtacgccgtgctggtgtctgccctggtgctgatggctatggtcaagcggaaggacagccggggaagggccaagcgatctggatctggagcaacaaacttctcactactcaaacaagcaggtgacgtggaggagaatcccgggcctactagcatggccttaccagtgaccgccttgctcctgccgctggccttgctgctccacgccgccaggccggacatccagatgacacagagccctagcagcctgtctgccagcgtgggagacagagtgaccatcacatgcaagagcagccagagcctgctggactccgatggcaagacctacctgaactggtatcagcagaagcccggcaaggcccctaagctgctgatctacctggtgtccaagctggatagcggcgtgcccagcagattttctggcagcggcagcggaaccgacttcaccctgacaatatccagcctccagcctgaggacttcgccacctactactgcttccaaggcacccactttccatacaccttcggccagggcaccaaggtggaaatcaaaagaggcggaggcggaagtggaggcggaggatctggcggcggaggctctgaagtgcagctggttgaatcaggcggaggactggttcagcctggcggatctctgagactgtcttgtgccgccagcggctacaccttcaccagctactggatgaactgggtccgacaggcccctggcaaaggactggaatgggtcggaatgatcgaccccagcgacagcgagacacactacaaccacatcttcaaggaccgcttcaccatcagcgccgacaccagcaagaataccgcctacctccagatgaactccctgagagccgaggacaccgccgtgtactactgcgccagaaacctgtatctgttcggccagggaaccctggtcacagtgtcatctacgcgtgaggacctgaagaacgtgttcccacctgaggtggccgtgttcgagcctagcgaggccgagatcagccacacccagaaagccaccctcgtgtgcctggctaccggcttctaccccgaccatgtggaactgtcttggtgggtcaacggcaaagaggtgcacagcggcgtgtctaccgacccccagccactgaaagaacagcccgccctgaacgacagccggtactgcctgagcagcagactgagagtgtccgccaccttctggcagaacccccggaaccacttcagatgccaggtgcagttctacggcctgagcgagaacgacgagtggacccaggacagagccaagcccgtgacccagatcgtgtctgccgaagcctggggcagagccgattgcggctttaccagcgagagctaccagcagggcgtgctgagcgccaccaacctgagcgtgatcggcttcagaatcctgctgctgaaagtggccggctttaacctgctgatgaccctgcggctgtggtccagccgcgccaagagaagcggatctggcgtgaagcagaccctgaatttcgacctgctgaagctggctggcgacgtggaatccaacccaggcccttctagaggccatatgaccgagtacaagcccacggtgcgcctcgccacccgcgacgacgtccccagggccgtacgcaccctcgccgccgcgttcgccgactaccccgccacgcgccacaccgtcgatccggaccgccacatcgagcgggtcaccgagctgcaagaactcttcctcacgcgcgtcgggctcgacatcggcaaggtgtgggtcgcggacgacggcgccgcggtggcggtctggaccacgccggagagcgtcgaagcgggggcggtgttcgccgagatcggcccgcgcatggccgagttgagcggttcccggctggccgcgcagcaacagatggaaggcctcctggcgccgcaccggcccaaggagcccgcgtggttcctggccaccgtcggcgtctcgcccgaccaccagggcaagggtctgggcagcgccgtcgtgctccccggagtggaggcggccgagcgcgccggggtgcccgccttcctggagacctccgcgccccgcaacctccccttctacgagcggctcggcttcaccgtcaccgccgacgtcgaggtgcccgaaggaccgcgcacctggtgcatgacccgcaagcccggtgcctga

SEQ ID NO: 37123 - DNA, 2607 bp, synthetic construct
  source 1..2607: mol_type = other DNA
atggccttaccagtgaccgccttgctcctgccgctggccttgctgctccacgccgccaggccgctcgaggaggacctgaagaacgtgttcccacctgaggtggccgtgttcgagcctagcgaggccgagatcagccacacccagaaagccaccctcgtgtgcctggctaccggcttctaccccgaccatgtggaactgtcttggtgggtcaacggcaaagaggtgcacagcggcgtgtgtaccgacccccagccactgaaagaacagcccgccctgaacgacagccggtactgcctgagcagcagactgagagtgtccgccaccttctggcagaacccccggaaccacttcagatgccaggtgcagttctacggcctgagcgagaacgacgagtggacccaggacagagccaagcccgtgacccagatcgtgtctgccgaagcctggggcagagccgattgcgacgtgaagctggtggaaaagagcttcgagacagacaccaacctgaacttccagaacctgagcgtgatcggcttcagaatcctgctgctgaaagtggccggctttaacctgctgatgaccctgcggctgtggtccagcagggccaagcgatctggatctggagcaacaaacttctcactactcaaacaagcaggtgacgtggaggagaatcccgggcctactagcatggccttaccagtgaccgccttgctcctgccgctggccttgctgctccacgccgccaggccggacatccagatgacacagagccctagcagcctgtctgccagcgtgggagacagagtgaccatcacatgcaagagcagccagagcctgctggactccgatggcaagacctacctgaactggtatcagcagaagcccggcaaggcccctaagctgctgatctacctggtgtccaagctggatagcggcgtgcccagcagattttctggcagcggcagcggaaccgacttcaccctgacaatatccagcctccagcctgaggacttcgccacctactactgcttccaaggcacccactttccatacaccttcggccagggcaccaaggtggaaatcaaaagaggcggaggcggaagtggaggcggaggatctggcggcggaggctctgaagtgcagctggttgaatcaggcggaggactggttcagcctggcggatctctgagactgtcttgtgccgccagcggctacaccttcaccagctactggatgaactgggtccgacaggcccctggcaaaggactggaatgggtcggaatgatcgaccccagcgacagcgagacacactacaaccacatcttcaaggaccgcttcaccatcagcgccgacaccagcaagaataccgcctacctccagatgaactccctgagagccgaggacaccgccgtgtactactgcgccagaaacctgtatctgttcggccagggaaccctggtcacagtgtcatctacgcgtatccagaaccctgatcctgccgtgtaccagctgcgggatagcaagagcagcgacaagagcgtgtgtctgttcaccgacttcgacagccagaccaacgtgtcccagagcaaggactccgacgtgtacatcaccgataagtgcgtgctggacatgcggagcatggacttcaagagcaactccgccgtggcctggtccaacaagtccgatttcgcctgcgccaacgccttcaacaacagcattatccccgaggacacattcttcccaagccccgagagcagctgcggctttaccagcgagagctaccagcagggcgtgctgagcgccaccatcctgtacgagatcctgctgggcaaggccaccctgtacgccgtgctggtgtctgccctggtgctgatggctatggtcaagcggaaggacagccggggacgcgccaagagaagcggatctggcgtgaagcagaccctgaatttcgacctgctgaagctggctggcgacgtggaatccaacccaggcccttctagaggccatatgaccgagtacaagcccacggtgcgcctcgccacccgcgacgacgtccccagggccgtacgcaccctcgccgccgcgttcgccgactaccccgccacgcgccacaccgtcgatccggaccgccacatcgagcgggtcaccgagctgcaagaactcttcctcacgcgcgtcgggctcgacatcggcaaggtgtgggtcgcggacgacggcgccgcggtggcggtctggaccacgccggagagcgtcgaagcgggggcggtgttcgccgagatcggcccgcgcatggccgagttgagcggttcccggctggccgcgcagcaacagatggaaggcctcctggcgccgcaccggcccaaggagcccgcgtggttcctggccaccgtcggcgtctcgcccgaccaccagggcaagggtctgggcagcgccgtcgtgctccccggagtggaggcggccgagcgcgccggggtgcccgccttcctggagacctccgcgccccgcaacctccccttctacgagcggctcggcttcaccgtcaccgccgacgtcgaggtgcccgaaggaccgcgcacctggtgcatgacccgcaagcccggtgcctga

SEQ ID NO: 37124 - DNA, 2607 bp, synthetic construct
  source 1..2607: mol_type = other DNA
atggccttaccagtgaccgccttgctcctgccgctggccttgctgctccacgccgccaggccgctcgaggaggacctgaagaacgtgttcccacctgaggtggccgtgttcgagcctagcgaggccgagatcagccacacccagaaagccaccctcgtgtgcctggctaccggcttctaccccgaccatgtggaactgtcttggtgggtcaacggcaaagaggtgcacagcggcgtgtctaccgacccccagccactgaaagaacagcccgccctgaacgacagccggtactgcctgagcagcagactgagagtgtccgccaccttctggcagaacccccggaaccacttcagatgccaggtgcagttctacggcctgagcgagaacgacgagtggacccaggacagagccaagcccgtgacccagatcgtgtctgccgaagcctggggcagagccgattgcgacgtgaagctggtggaaaagagcttcgagacagacaccaacctgaacttccagaacctgagcgtgatcggcttcagaatcctgctgctgaaagtggccggctttaacctgctgatgaccctgcggctgtggtccagcagggccaagcgatctggatctggagcaacaaacttctcactactcaaacaagcaggtgacgtggaggagaatcccgggcctactagcatggccttaccagtgaccgccttgctcctgccgctggccttgctgctccacgccgccaggccggacatccagatgacacagagccctagcagcctgtctgccagcgtgggagacagagtgaccatcacatgcaagagcagccagagcctgctggactccgatggcaagacctacctgaactggtatcagcagaagcccggcaaggcccctaagctgctgatctacctggtgtccaagctggatagcggcgtgcccagcagattttctggcagcggcagcggaaccgacttcaccctgacaatatccagcctccagcctgaggacttcgccacctactactgcttccaaggcacccactttccatacaccttcggccagggcaccaaggtggaaatcaaaagaggcggaggcggaagtggaggcggaggatctggcggcggaggctctgaagtgcagctggttgaatcaggcggaggactggttcagcctggcggatctctgagactgtcttgtgccgccagcggctacaccttcaccagctactggatgaactgggtccgacaggcccctggcaaaggactggaatgggtcggaatgatcgaccccagcgacagcgagacacactacaaccacatcttcaaggaccgcttcaccatcagcgccgacaccagcaagaataccgcctacctccagatgaactccctgagagccgaggacaccgccgtgtactactgcgccagaaacctgtatctgttcggccagggaaccctggtcacagtgtcatctacgcgtatccagaaccctgatcctgccgtgtaccagctgcgggatagcaagagcagcgacaagagcgtgtgtctgttcaccgacttcgacagccagaccaacgtgtcccagagcaaggactccgacgtgtacatcaccgataagaccgtgctggacatgcggagcatggacttcaagagcaactccgccgtggcctggtccaacaagtccgatttcgcctgcgccaacgccttcaacaacagcattatccccgaggacacattcttcccaagccccgagagcagctgcggctttaccagcgagagctaccagcagggcgtgctgagcgccaccatcctgtacgagatcctgctgggcaaggccaccctgtacgccgtgctggtgtctgccctggtgctgatggctatggtcaagcggaaggacagccggggacgcgccaagagaagcggatctggcgtgaagcagaccctgaatttcgacctgctgaagctggctggcgacgtggaatccaacccaggcccttctagaggccatatgaccgagtacaagcccacggtgcgcctcgccacccgcgacgacgtccccagggccgtacgcaccctcgccgccgcgttcgccgactaccccgccacgcgccacaccgtcgatccggaccgccacatcgagcgggtcaccgagctgcaagaactcttcctcacgcgcgtcgggctcgacatcggcaaggtgtgggtcgcggacgacggcgccgcggtggcggtctggaccacgccggagagcgtcgaagcgggggcggtgttcgccgagatcggcccgcgcatggccgagttgagcggttcccggctggccgcgcagcaacagatggaaggcctcctggcgccgcaccggcccaaggagcccgcgtggttcctggccaccgtcggcgtctcgcccgaccaccagggcaagggtctgggcagcgccgtcgtgctccccggagtggaggcggccgagcgcgccggggtgcccgccttcctggagacctccgcgccccgcaacctccccttctacgagcggctcggcttcaccgtcaccgccgacgtcgaggtgcccgaaggaccgcgcacctggtgcatgacccgcaagcccggtgcctga

SEQ ID NO: 37125 - DNA, 2916 bp, synthetic construct
  source 1..2916: mol_type = other DNA
atggccttaccagtgaccgccttgctcctgccgctggccttgctgctccacgccgccaggccgctcgaggaggaggacctgaagaacgtgttcccacctgaggtggccgtgttcgagcctagcgaggccgagatcagccacacccagaaagccaccctcgtgtgcctggctaccggcttctaccccgaccatgtggaactgtcttggtgggtcaacggcaaagaggtgcacagcggcgtgtctaccgacccccagccactgaaagaacagcccgccctgaacgacagccggtactgcctgagcagcagactgagagtgtccgccaccttctggcagaacccccggaaccacttcagatgccaggtgcagttctacggcctgagcgagaacgacgagtggacccaggacagagccaagcccgtgacccagatcgtgtctgccgaagcctggggcagagccgatgatgtgattaagatccactggcaggaaaagaagtccaacaccatcctgggcagccaggaaggcaacaccatgaagaccaacgacacctacatgaagttcagctggctgaccgtgcccgagaagtccctggacaaagaacacagatgcatcgtgcggcacgaaaacaacaagaacggcgtggaccaggaaatcatcttcccacccatcaagaccgatgtgattacaatggaccccaaggacaactgctccaaggacgccaacgataccctgctgctccagctgaccaacaccagcgcctactacatgtacttgttgctgctgctgaagtccgtggtgtacttcgccatcatcacatgctgcctgctgcggagaaccgccttctgctgcaacggcgagaagtctagggccaagcgatctggatctggagcaacaaacttctcactactcaaacaagcaggtgacgtggaggagaatcccgggcctactagcatggccttaccagtgaccgccttgctcctgccgctggccttgctgctccacgccgccaggccggacatccagatgacacagagccctagcagcctgtctgccagcgtgggagacagagtgaccatcacatgcaagagcagccagagcctgctggactccgatggcaagacctacctgaactggtatcagcagaagcccggcaaggcccctaagctgctgatctacctggtgtccaagctggatagcggcgtgcccagcagattttctggcagcggcagcggaaccgacttcaccctgacaatatccagcctccagcctgaggacttcgccacctactactgcttccaaggcacccactttccatacaccttcggccagggcaccaaggtggaaatcaaaagaggcggaggcggaagtggaggcggaggatctggcggcggaggctctgaagtgcagctggttgaatcaggcggaggactggttcagcctggcggatctctgagactgtcttgtgccgccagcggctacaccttcaccagctactggatgaactgggtccgacaggcccctggcaaaggactggaatgggtcggaatgatcgaccccagcgacagcgagacacactacaaccacatcttcaaggaccgcttcaccatcagcgccgacaccagcaagaataccgcctacctccagatgaactccctgagagccgaggacaccgccgtgtactactgcgccagaaacctgtatctgttcggccagggaaccctggtcacagtgtcatctacgcgtatccagaaccctgatcctgccgtgtaccagctgcgggatagcaagagcagcgacaagagcgtgtgtctgttcaccgacttcgacagccagaccaacgtgtcccagagcaaggactccgacgtgtacatcaccgataagaccgtgctggacatgcggagcatggacttcaagagcaactccgccgtggcctggtccaacaagtccgatttcgcctgcgccaacgccttcaacaacagcattatccccgaggacacattcttcccaagccccgagagcagcgactccaccgaccacgtgaagcccaaagagacagagaacaccaagcagcccagcaagagctgccacaagcccaaggccatcgtgcacaccgagaaagtgaacatgatgagcctgaccgtgctgggcctgcggatgctgttcgccaaaaccgtggccgtgaacttcctgctgaccgccaagctgttcttcctccgcgccaagagaagcggatctggcgtgaagcagaccctgaatttcgacctgctgaagctggctggcgacgtggaatccaacccaggcccttctagaggccatatgaccgagtacaagcccacggtgcgcctcgccacccgcgacgacgtccccagggccgtacgcaccctcgccgccgcgttcgccgactaccccgccacgcgccacaccgtcgatccggaccgccacatcgagcgggtcaccgagctgcaagaactcttcctcacgcgcgtcgggctcgacatcggcaaggtgtgggtcgcggacgacggcgccgcggtggcggtctggaccacgccggagagcgtcgaagcgggggcggtgttcgccgagatcggcccgcgcatggccgagttgagcggttcccggctggccgcgcagcaacagatggaaggcctcctggcgccgcaccggcccaaggagcccgcgtggttcctggccaccgtcggcgtctcgcccgaccaccagggcaagggtctgggcagcgccgtcgtgctccccggagtggaggcggccgagcgcgccggggtgcccgccttcctggagacctccgcgccccgcaacctccccttctacgagcggctcggcttcaccgtcaccgccgacgtcgaggtgcccgaaggaccgcgcacctggtgcatgacccgcaagcccggtgcctga

SEQ ID NO: 37126 - DNA, 2607 bp, synthetic construct
  source 1..2607: mol_type = other DNA
atggccttaccagtgaccgccttgctcctgccgctggccttgctgctccacgccgccaggccgctcgaggaggacctgaagaacgtgttcccacctgaggtggccgtgttcgagcctagcgaggccgagatcagccacacccagaaagccaccctcgtgtgcctggctaccggcttctaccccgaccatgtggaactgtcttggtgggtcaacggcaaagaggtgcacagcggcgtgtgtaccgacccccagccactgaaagaacagcccgccctgaacgacagccggtactgcctgagcagcagactgagagtgtccgccaccttctggcagaacccccggaaccacttcagatgccaggtgcagttctacggcctgagcgagaacgacgagtggacccaggacagagccaagcccgtgacccagatcgtgtctgccgaagcctggggcagagccgattgcggctttaccagcgagagctaccagcagggcgtgctgagcgccaccaacctgagcgtgatcggcttcagaatcctgctgctgaaagtggccggctttaacctgctgatgaccctgcggctgtggtccagcagggccaagcgatctggatctggagcaacaaacttctcactactcaaacaagcaggtgacgtggaggagaatcccgggcctactagcatggccttaccagtgaccgccttgctcctgccgctggccttgctgctccacgccgccaggccggacatccagatgacacagagccctagcagcctgtctgccagcgtgggagacagagtgaccatcacatgcaagagcagccagagcctgctggactccgatggcaagacctacctgaactggtatcagcagaagcccggcaaggcccctaagctgctgatctacctggtgtccaagctggatagcggcgtgcccagcagattttctggcagcggcagcggaaccgacttcaccctgacaatatccagcctccagcctgaggacttcgccacctactactgcttccaaggcacccactttccatacaccttcggccagggcaccaaggtggaaatcaaaagaggcggaggcggaagtggaggcggaggatctggcggcggaggctctgaagtgcagctggttgaatcaggcggaggactggttcagcctggcggatctctgagactgtcttgtgccgccagcggctacaccttcaccagctactggatgaactgggtccgacaggcccctggcaaaggactggaatgggtcggaatgatcgaccccagcgacagcgagacacactacaaccacatcttcaaggaccgcttcaccatcagcgccgacaccagcaagaataccgcctacctccagatgaactccctgagagccgaggacaccgccgtgtactactgcgccagaaacctgtatctgttcggccagggaaccctggtcacagtgtcatctacgcgtatccagaaccctgatcctgccgtgtaccagctgcgggatagcaagagcagcgacaagagcgtgtgtctgttcaccgacttcgacagccagaccaacgtgtcccagagcaaggactccgacgtgtacatcaccgataagtgcgtgctggacatgcggagcatggacttcaagagcaactccgccgtggcctggtccaacaagtccgatttcgcctgcgccaacgccttcaacaacagcattatccccgaggacacattcttcccaagccccgagagcagctgcgacgtgaagctggtggaaaagagcttcgagacagacaccaacctgaacttccagatcctgtacgagatcctgctgggcaaggccaccctgtacgccgtgctggtgtctgccctggtgctgatggctatggtcaagcggaaggacagccggggacgcgccaagagaagcggatctggcgtgaagcagaccctgaatttcgacctgctgaagctggctggcgacgtggaatccaacccaggcccttctagaggccatatgaccgagtacaagcccacggtgcgcctcgccacccgcgacgacgtccccagggccgtacgcaccctcgccgccgcgttcgccgactaccccgccacgcgccacaccgtcgatccggaccgccacatcgagcgggtcaccgagctgcaagaactcttcctcacgcgcgtcgggctcgacatcggcaaggtgtgggtcgcggacgacggcgccgcggtggcggtctggaccacgccggagagcgtcgaagcgggggcggtgttcgccgagatcggcccgcgcatggccgagttgagcggttcccggctggccgcgcagcaacagatggaaggcctcctggcgccgcaccggcccaaggagcccgcgtggttcctggccaccgtcggcgtctcgcccgaccaccagggcaagggtctgggcagcgccgtcgtgctccccggagtggaggcggccgagcgcgccggggtgcccgccttcctggagacctccgcgccccgcaacctccccttctacgagcggctcggcttcaccgtcaccgccgacgtcgaggtgcccgaaggaccgcgcacctggtgcatgacccgcaagcccggtgcctga

SEQ ID NO: 37127 - DNA, 2694 bp, synthetic construct
  source 1..2694: mol_type = other DNA
atggccttaccagtgaccgccttgctcctgccgctggccttgctgctccacgccgccaggccgctcgaggaggaggacctgaagaacgtgttcccacctgaggtggccgtgttcgagcctagcgaggccgagatcagccacacccagaaagccaccctcgtgtgcctggctaccggcttctaccccgaccatgtggaactgtcttggtgggtcaacggcaaagaggtgcacagcggcgtgtgtaccgacccccagccactgaaagaacagcccgccctgaacgacagccggtactgcctgagcagcagactgagagtgtccgccaccttctggcagaacccccggaaccacttcagatgccaggtgcagttctacggcctgagcgagaacgacgagtggacccaggacagagccaagcccgtgacccagatcgtgtctgccgaagcctggggcagagccgattgcggctttaccagcgagagctaccagcagggcgtgctgagcgccaccaacctgagcgtgatcggcttcagaatcctgctgctgaaagtggccggctttaacctgctgatgaccctgcggctgtggtccagcagggccaagcgatctggatctggagcaacaaacttctcactactcaaacaagcaggtgacgtggaggagaatcccgggcctactagcatggccttaccagtgaccgccttgctcctgccgctggccttgctgctccacgccgccaggccggacatccagatgacacagagccctagcagcctgtctgccagcgtgggagacagagtgaccatcacatgcaagagcagccagagcctgctggactccgatggcaagacctacctgaactggtatcagcagaagcccggcaaggcccctaagctgctgatctacctggtgtccaagctggatagcggcgtgcccagcagattttctggcagcggcagcggaaccgacttcaccctgacaatatccagcctccagcctgaggacttcgccacctactactgcttccaaggcacccactttccatacaccttcggccagggcaccaaggtggaaatcaaaagaggcggaggcggaagtggaggcggaggatctggcggcggaggctctgaagtgcagctggttgaatcaggcggaggactggttcagcctggcggatctctgagactgtcttgtgccgccagcggctacaccttcaccagctactggatgaactgggtccgacaggcccctggcaaaggactggaatgggtcggaatgatcgaccccagcgacagcgagacacactacaaccacatcttcaaggaccgcttcaccatcagcgccgacaccagcaagaataccgcctacctccagatgaactccctgagagccgaggacaccgccgtgtactactgcgccagaaacctgtatctgttcggccagggaaccctggtcacagtgtcatctacgcgtggacagcctaaggccaatcctaccgtgacactgttccctccaagcagcgaagaactccaggccaacaaggccacacttgtgtgcctgatctccgacttctaccctggggctgtgacagtggcttggaaggccgatggatctcctgtgaaagccggcgtggaaaccaccaagccatccaagcagagcaacaacaaatacgccgccagctcctacctgagcctgacacctgagcagtggaagtcccacagatcctacagctgccaagtgacccacgaaggcagcaccgtggaaaagacagtggcccctacagagtgcagccccatcaagaccgatgtgattacaatggaccccaaggacaactgctccaaggacgccaacgataccctgctgctccagctgaccaacaccagcgcctactacatgtacttgttgctgctgctgaagtccgtggtgtacttcgccatcatcacatgctgcctgctgcggagaaccgccttctgctgcaacggcgagaagtctcgcgccaagagaagcggatctggcgtgaagcagaccctgaatttcgacctgctgaagctggctggcgacgtggaatccaacccaggcccttctagaggccatatgaccgagtacaagcccacggtgcgcctcgccacccgcgacgacgtccccagggccgtacgcaccctcgccgccgcgttcgccgactaccccgccacgcgccacaccgtcgatccggaccgccacatcgagcgggtcaccgagctgcaagaactcttcctcacgcgcgtcgggctcgacatcggcaaggtgtgggtcgcggacgacggcgccgcggtggcggtctggaccacgccggagagcgtcgaagcgggggcggtgttcgccgagatcggcccgcgcatggccgagttgagcggttcccggctggccgcgcagcaacagatggaaggcctcctggcgccgcaccggcccaaggagcccgcgtggttcctggccaccgtcggcgtctcgcccgaccaccagggcaagggtctgggcagcgccgtcgtgctccccggagtggaggcggccgagcgcgccggggtgcccgccttcctggagacctccgcgccccgcaacctccccttctacgagcggctcggcttcaccgtcaccgccgacgtcgaggtgcccgaaggaccgcgcacctggtgcatgacccgcaagcccggtgcctga

SEQ ID NO: 37128 - DNA, 2694 bp, synthetic construct
  source 1..2694: mol_type = other DNA
atggccttaccagtgaccgccttgctcctgccgctggccttgctgctccacgccgccaggccgctcgagggacagcctaaggccaatcctaccgtgacactgttccctccaagcagcgaagaactccaggccaacaaggccacacttgtgtgcctgatctccgacttctaccctggggctgtgacagtggcttggaaggccgatggatctcctgtgaaagccggcgtggaaaccaccaagccatccaagcagagcaacaacaaatacgccgccagctcctacctgagcctgacacctgagcagtggaagtcccacagatcctacagctgccaagtgacccacgaaggcagcaccgtggaaaagacagtggcccctacagagtgcagccccatcaagaccgatgtgattacaatggaccccaaggacaactgctccaaggacgccaacgataccctgctgctccagctgaccaacaccagcgcctactacatgtacttgttgctgctgctgaagtccgtggtgtacttcgccatcatcacatgctgcctgctgcggagaaccgccttctgctgcaacggcgagaagtctagggccaagcgatctggatctggagcaacaaacttctcactactcaaacaagcaggtgacgtggaggagaatcccgggcctactagcatggccttaccagtgaccgccttgctcctgccgctggccttgctgctccacgccgccaggccggacatccagatgacacagagccctagcagcctgtctgccagcgtgggagacagagtgaccatcacatgcaagagcagccagagcctgctggactccgatggcaagacctacctgaactggtatcagcagaagcccggcaaggcccctaagctgctgatctacctggtgtccaagctggatagcggcgtgcccagcagattttctggcagcggcagcggaaccgacttcaccctgacaatatccagcctccagcctgaggacttcgccacctactactgcttccaaggcacccactttccatacaccttcggccagggcaccaaggtggaaatcaaaagaggcggaggcggaagtggaggcggaggatctggcggcggaggctctgaagtgcagctggttgaatcaggcggaggactggttcagcctggcggatctctgagactgtcttgtgccgccagcggctacaccttcaccagctactggatgaactgggtccgacaggcccctggcaaaggactggaatgggtcggaatgatcgaccccagcgacagcgagacacactacaaccacatcttcaaggaccgcttcaccatcagcgccgacaccagcaagaataccgcctacctccagatgaactccctgagagccgaggacaccgccgtgtactactgcgccagaaacctgtatctgttcggccagggaaccctggtcacagtgtcatctacgcgtgaggaggacctgaagaacgtgttcccacctgaggtggccgtgttcgagcctagcgaggccgagatcagccacacccagaaagccaccctcgtgtgcctggctaccggcttctaccccgaccatgtggaactgtcttggtgggtcaacggcaaagaggtgcacagcggcgtgtgtaccgacccccagccactgaaagaacagcccgccctgaacgacagccggtactgcctgagcagcagactgagagtgtccgccaccttctggcagaacccccggaaccacttcagatgccaggtgcagttctacggcctgagcgagaacgacgagtggacccaggacagagccaagcccgtgacccagatcgtgtctgccgaagcctggggcagagccgattgcggctttaccagcgagagctaccagcagggcgtgctgagcgccaccaacctgagcgtgatcggcttcagaatcctgctgctgaaagtggccggctttaacctgctgatgaccctgcggctgtggtccagccgcgccaagagaagcggatctggcgtgaagcagaccctgaatttcgacctgctgaagctggctggcgacgtggaatccaacccaggcccttctagaggccatatgaccgagtacaagcccacggtgcgcctcgccacccgcgacgacgtccccagggccgtacgcaccctcgccgccgcgttcgccgactaccccgccacgcgccacaccgtcgatccggaccgccacatcgagcgggtcaccgagctgcaagaactcttcctcacgcgcgtcgggctcgacatcggcaaggtgtgggtcgcggacgacggcgccgcggtggcggtctggaccacgccggagagcgtcgaagcgggggcggtgttcgccgagatcggcccgcgcatggccgagttgagcggttcccggctggccgcgcagcaacagatggaaggcctcctggcgccgcaccggcccaaggagcccgcgtggttcctggccaccgtcggcgtctcgcccgaccaccagggcaagggtctgggcagcgccgtcgtgctccccggagtggaggcggccgagcgcgccggggtgcccgccttcctggagacctccgcgccccgcaacctccccttctacgagcggctcggcttcaccgtcaccgccgacgtcgaggtgcccgaaggaccgcgcacctggtgcatgacccgcaagcccggtgcctga

SEQ ID NO: 37129 - DNA, 2685 bp, synthetic construct
  source 1..2685: mol_type = other DNA
atggccttaccagtgaccgccttgctcctgccgctggccttgctgctccacgccgccaggccgctcgaggaggcctctacaaagggaccctccgtgtttcctctggctcccagcagcaagtctacaagcggaggaacagccgctctgggctgcctggtcaaggattactttcccgagcctgtgaccgtgtcctggaatagcggagcactgacaagcggcgtgcacacctttccagccgtgctgcaaagcagcggcctgtactctctgagcagcgtggtcacagtgcctagctctagcctgggcacccagacctacatctgcaatgtgaaccacaagcctagcaacaccaaggtggacaagagagtggaacccaagagctgtcccatcaagaccgatgtgattacaatggaccccaaggacaactgctccaaggacgccaacgataccctgctgctccagctgaccaacaccagcgcctactacatgtacttgttgctgctgctgaagtccgtggtgtacttcgccatcatcacatgctgcctgctgcggagaaccgccttctgctgcaacggcgagaagtctagggccaagcgatctggatctggagcaacaaacttctcactactcaaacaagcaggtgacgtggaggagaatcccgggcctactagcatggccttaccagtgaccgccttgctcctgccgctggccttgctgctccacgccgccaggccggacatccagatgacacagagccctagcagcctgtctgccagcgtgggagacagagtgaccatcacatgcaagagcagccagagcctgctggactccgatggcaagacctacctgaactggtatcagcagaagcccggcaaggcccctaagctgctgatctacctggtgtccaagctggatagcggcgtgcccagcagattttctggcagcggcagcggaaccgacttcaccctgacaatatccagcctccagcctgaggacttcgccacctactactgcttccaaggcacccactttccatacaccttcggccagggcaccaaggtggaaatcaaaagaggcggaggcggaagtggaggcggaggatctggcggcggaggctctgaagtgcagctggttgaatcaggcggaggactggttcagcctggcggatctctgagactgtcttgtgccgccagcggctacaccttcaccagctactggatgaactgggtccgacaggcccctggcaaaggactggaatgggtcggaatgatcgaccccagcgacagcgagacacactacaaccacatcttcaaggaccgcttcaccatcagcgccgacaccagcaagaataccgcctacctccagatgaactccctgagagccgaggacaccgccgtgtactactgcgccagaaacctgtatctgttcggccagggaaccctggtcacagtgtcatctacgcgtggacagcctaaggccaatcctaccgtgacactgttccctccaagcagcgaagaactccaggccaacaaggccacacttgtgtgcctgatctccgacttctaccctggggctgtgacagtggcttggaaggccgatggatctcctgtgaaagccggcgtggaaaccaccaagccatccaagcagagcaacaacaaatacgccgccagctcctacctgagcctgacacctgagcagtggaagtcccacagatcctacagctgccaagtgacccacgaaggcagcaccgtggaaaagacagtggcccctacagagtgcagcgaagtgaaaaccgactccaccgaccacgtgaagcccaaagagacagagaacaccaagcagcccagcaagagctgccacaagcccaaggccatcgtgcacaccgagaaagtgaacatgatgagcctgaccgtgctgggcctgcggatgctgttcgccaaaaccgtggccgtgaacttcctgctgaccgccaagctgttcttcctccgcgccaagagaagcggatctggcgtgaagcagaccctgaatttcgacctgctgaagctggctggcgacgtggaatccaacccaggcccttctagaggccatatgaccgagtacaagcccacggtgcgcctcgccacccgcgacgacgtccccagggccgtacgcaccctcgccgccgcgttcgccgactaccccgccacgcgccacaccgtcgatccggaccgccacatcgagcgggtcaccgagctgcaagaactcttcctcacgcgcgtcgggctcgacatcggcaaggtgtgggtcgcggacgacggcgccgcggtggcggtctggaccacgccggagagcgtcgaagcgggggcggtgttcgccgagatcggcccgcgcatggccgagttgagcggttcccggctggccgcgcagcaacagatggaaggcctcctggcgccgcaccggcccaaggagcccgcgtggttcctggccaccgtcggcgtctcgcccgaccaccagggcaagggtctgggcagcgccgtcgtgctccccggagtggaggcggccgagcgcgccggggtgcccgccttcctggagacctccgcgccccgcaacctccccttctacgagcggctcggcttcaccgtcaccgccgacgtcgaggtgcccgaaggaccgcgcacctggtgcatgacccgcaagcccggtgcctga

SEQ ID NO: 37130 - DNA, 2619 bp, synthetic construct
  source 1..2619: mol_type = other DNA
atggccttaccagtgaccgccttgctcctgccgctggccttgctgctccacgccgccaggccgctcgaggaggcctctacaaagggaccctccgtgtttcctctggctcccagcagcaagtctacaagcggaggaacagccgctctgggctgcctggtcaaggattactttcccgagcctgtgaccgtgtcctggaatagcggagcactgacaagcggcgtgcacacctttccagccgtgctgcaaagcagcggcctgtactctctgagcagcgtggtcacagtgcctagctctagcctgggcacccagacctacatctgcaatgtgaaccacaagcctagcaacaccaaggtggacaagagagtggaacccaagagctgtggcagagccgattgcggctttaccagcgagagctaccagcagggcgtgctgagcgccaccatcctgtacgagatcctgctgggcaaggccaccctgtacgccgtgctggtgtctgccctggtgctgatggctatggtcaagcggaaggacagccggggaagggccaagcgatctggatctggagcaacaaacttctcactactcaaacaagcaggtgacgtggaggagaatcccgggcctactagcatggccttaccagtgaccgccttgctcctgccgctggccttgctgctccacgccgccaggccggacatccagatgacacagagccctagcagcctgtctgccagcgtgggagacagagtgaccatcacatgcaagagcagccagagcctgctggactccgatggcaagacctacctgaactggtatcagcagaagcccggcaaggcccctaagctgctgatctacctggtgtccaagctggatagcggcgtgcccagcagattttctggcagcggcagcggaaccgacttcaccctgacaatatccagcctccagcctgaggacttcgccacctactactgcttccaaggcacccactttccatacaccttcggccagggcaccaaggtggaaatcaaaagaggcggaggcggaagtggaggcggaggatctggcggcggaggctctgaagtgcagctggttgaatcaggcggaggactggttcagcctggcggatctctgagactgtcttgtgccgccagcggctacaccttcaccagctactggatgaactgggtccgacaggcccctggcaaaggactggaatgggtcggaatgatcgaccccagcgacagcgagacacactacaaccacatcttcaaggaccgcttcaccatcagcgccgacaccagcaagaataccgcctacctccagatgaactccctgagagccgaggacaccgccgtgtactactgcgccagaaacctgtatctgttcggccagggaaccctggtcacagtgtcatctacgcgtggacagcctaaggccaatcctaccgtgacactgttccctccaagcagcgaagaactccaggccaacaaggccacacttgtgtgcctgatctccgacttctaccctggggctgtgacagtggcttggaaggccgatggatctcctgtgaaagccggcgtggaaaccaccaagccatccaagcagagcaacaacaaatacgccgccagctcctacctgagcctgacacctgagcagtggaagtcccacagatcctacagctgccaagtgacccacgaaggcagcaccgtggaaaagacagtggcccctacagagtgcagcatccccgaggacacattcttcccaagccccgagagcagctgcgacgtgaagctggtggaaaagagcttcgagacagacaccaacctgaacttccagaacctgagcgtgatcggcttcagaatcctgctgctgaaagtggccggctttaacctgctgatgaccctgcggctgtggtccagccgcgccaagagaagcggatctggcgtgaagcagaccctgaatttcgacctgctgaagctggctggcgacgtggaatccaacccaggcccttctagaggccatatgaccgagtacaagcccacggtgcgcctcgccacccgcgacgacgtccccagggccgtacgcaccctcgccgccgcgttcgccgactaccccgccacgcgccacaccgtcgatccggaccgccacatcgagcgggtcaccgagctgcaagaactcttcctcacgcgcgtcgggctcgacatcggcaaggtgtgggtcgcggacgacggcgccgcggtggcggtctggaccacgccggagagcgtcgaagcgggggcggtgttcgccgagatcggcccgcgcatggccgagttgagcggttcccggctggccgcgcagcaacagatggaaggcctcctggcgccgcaccggcccaaggagcccgcgtggttcctggccaccgtcggcgtctcgcccgaccaccagggcaagggtctgggcagcgccgtcgtgctccccggagtggaggcggccgagcgcgccggggtgcccgccttcctggagacctccgcgccccgcaacctccccttctacgagcggctcggcttcaccgtcaccgccgacgtcgaggtgcccgaaggaccgcgcacctggtgcatgacccgcaagcccggtgcctga

SEQ ID NO: 37131 - DNA, 2619 bp, synthetic construct
  source 1..2619: mol_type = other DNA
atggccttaccagtgaccgccttgctcctgccgctggccttgctgctccacgccgccaggccgctcgaggaggcctctacaaagggaccctccgtgtttcctctggctcccagcagcaagtctacaagcggaggaacagccgctctgggctgcctggtcaaggattactttcccgagcctgtgaccgtgtcctggaatagcggagcactgacaagcggcgtgcacacctttccagccgtgctgcaaagcagcggcctgtactctctgagcagcgtggtcacagtgcctagctctagcctgggcacccagacctacatctgcaatgtgaaccacaagcctagcaacaccaaggtggacaagagagtggaacccaagagctgtatccccgaggacacattcttcccaagccccgagagcagctgcgacgtgaagctggtggaaaagagcttcgagacagacaccaacctgaacttccagaacctgagcgtgatcggcttcagaatcctgctgctgaaagtggccggctttaacctgctgatgaccctgcggctgtggtccagcagggccaagcgatctggatctggagcaacaaacttctcactactcaaacaagcaggtgacgtggaggagaatcccgggcctactagcatggccttaccagtgaccgccttgctcctgccgctggccttgctgctccacgccgccaggccggacatccagatgacacagagccctagcagcctgtctgccagcgtgggagacagagtgaccatcacatgcaagagcagccagagcctgctggactccgatggcaagacctacctgaactggtatcagcagaagcccggcaaggcccctaagctgctgatctacctggtgtccaagctggatagcggcgtgcccagcagattttctggcagcggcagcggaaccgacttcaccctgacaatatccagcctccagcctgaggacttcgccacctactactgcttccaaggcacccactttccatacaccttcggccagggcaccaaggtggaaatcaaaagaggcggaggcggaagtggaggcggaggatctggcggcggaggctctgaagtgcagctggttgaatcaggcggaggactggttcagcctggcggatctctgagactgtcttgtgccgccagcggctacaccttcaccagctactggatgaactgggtccgacaggcccctggcaaaggactggaatgggtcggaatgatcgaccccagcgacagcgagacacactacaaccacatcttcaaggaccgcttcaccatcagcgccgacaccagcaagaataccgcctacctccagatgaactccctgagagccgaggacaccgccgtgtactactgcgccagaaacctgtatctgttcggccagggaaccctggtcacagtgtcatctacgcgtggacagcctaaggccaatcctaccgtgacactgttccctccaagcagcgaagaactccaggccaacaaggccacacttgtgtgcctgatctccgacttctaccctggggctgtgacagtggcttggaaggccgatggatctcctgtgaaagccggcgtggaaaccaccaagccatccaagcagagcaacaacaaatacgccgccagctcctacctgagcctgacacctgagcagtggaagtcccacagatcctacagctgccaagtgacccacgaaggcagcaccgtggaaaagacagtggcccctacagagtgcagcggcagagccgattgcggctttaccagcgagagctaccagcagggcgtgctgagcgccaccatcctgtacgagatcctgctgggcaaggccaccctgtacgccgtgctggtgtctgccctggtgctgatggctatggtcaagcggaaggacagccggggacgcgccaagagaagcggatctggcgtgaagcagaccctgaatttcgacctgctgaagctggctggcgacgtggaatccaacccaggcccttctagaggccatatgaccgagtacaagcccacggtgcgcctcgccacccgcgacgacgtccccagggccgtacgcaccctcgccgccgcgttcgccgactaccccgccacgcgccacaccgtcgatccggaccgccacatcgagcgggtcaccgagctgcaagaactcttcctcacgcgcgtcgggctcgacatcggcaaggtgtgggtcgcggacgacggcgccgcggtggcggtctggaccacgccggagagcgtcgaagcgggggcggtgttcgccgagatcggcccgcgcatggccgagttgagcggttcccggctggccgcgcagcaacagatggaaggcctcctggcgccgcaccggcccaaggagcccgcgtggttcctggccaccgtcggcgtctcgcccgaccaccagggcaagggtctgggcagcgccgtcgtgctccccggagtggaggcggccgagcgcgccggggtgcccgccttcctggagacctccgcgccccgcaacctccccttctacgagcggctcggcttcaccgtcaccgccgacgtcgaggtgcccgaaggaccgcgcacctggtgcatgacccgcaagcccggtgcctga

SEQ ID NO: 37132 - DNA, 1857 bp, synthetic construct
  source 1..1857: mol_type = other DNA
atggccttaccagtgaccgccttgctcctgccgctggccttgctgctccacgccgccaggccggacatccagatgacacagagccctagcagcctgtctgccagcgtgggagacagagtgaccatcacatgcaagagcagccagagcctgctggactccgatggcaagacctacctgaactggtatcagcagaagcccggcaaggcccctaagctgctgatctacctggtgtccaagctggatagcggcgtgcccagcagattttctggcagcggcagcggaaccgacttcaccctgacaatatccagcctccagcctgaggacttcgccacctactactgcttccaaggcacccactttccatacaccttcggccagggcaccaaggtggaaatcaaaagactcgaggacctgaagaacgtgttcccacctgaggtggccgtgttcgagcctagcgaggccgagatcagccacacccagaaagccaccctcgtgtgcctggctaccggcttctaccccgaccatgtggaactgtcttggtgggtcaacggcaaagaggtgcacagcggcgtgtgtaccgacccccagccactgaaagaacagcccgccctgaacgacagccggtactgcctgagcagcagactgagagtgtccgccaccttctggcagaacccccggaaccacttcagatgccaggtgcagttctacggcctgagcgagaacgacgagtggacccaggacagagccaagcccgtgacccagatcgtgtctgccgaagcctggggcagagccgatagcggctttaccagcgagagctaccagcagggcgtgctgagcgccaccatcctgtacgagatcctgctgggcaaggccaccctgtacgccgtgctggtgtctgccctggtgctgatggctatggtcaagcggaaggacagccggggaagggccaagcgatctggatctggagcaacaaacttctcactactcaaacaagcaggtgacgtggaggagaatcccgggcctactagtatggactggatttggcgcatccttttccttgtcggcgctgctaccggcgcgcattccttcgaagaagtgcagctggttgaatcaggcggaggactggttcagcctggcggatctctgagactgtcttgtgccgccagcggctacaccttcaccagctactggatgaactgggtccgacaggcccctggcaaaggactggaatgggtcggaatgatcgaccccagcgacagcgagacacactacaaccacatcttcaaggaccgcttcaccatcagcgccgacaccagcaagaataccgcctacctccagatgaactccctgagagccgaggacaccgccgtgtactactgcgccagaaacctgtatctgttcggccagggaaccctggtcacagtgtcatctacgcgtatccagaaccctgatcctgccgtgtaccagctgcgggatagcaagagcagcgacaagagcgtgtgtctgttcaccgacttcgacagccagaccaacgtgtcccagagcaaggactccgacgtgtacatcaccgataagtgcgtgctggacatgcggagcatggacttcaagagcaactccgccgtggcctggtccaacaagtccgatttcgcctgcgccaacgccttcaacaacagcattatccccgaggacacattcttcccaagccccgagagcagcagcgacgtgaagctggtggaaaagagcttcgagacagacaccaacctgaacttccagaacctgagcgtgatcggcttcagaatcctgctgctgaaagtggccggctttaacctgctgatgaccctgcggctgtggtccagc

SEQ ID NO: 37133 - DNA, 2697 bp, synthetic construct
  source 1..2697: mol_type = other DNA
atggccttaccagtgaccgccttgctcctgccgctggccttgctgctccacgccgccaggccggaggttcagctgcttgagtctggcggaggactggttcaacctggcggaagcctgagactgtcttgtgccgcctctggcagaaccttcagcatgggctggtatagacaggcccctggcaagggcctcgaatttgtgtctgccatcacatacagcggcggcagcccttactacgccgattctgtgaagggcagattcaccatcagccgggacaacagcaagaacaccgtgtacctccagatgaacagcctgagagccgaggacaccgccgtgtactactgtgccgccaatccaacctacggcagcgactggaatgccgagaattggggccagggcacactggtcacagtgtctagtggtaccggcggaggcggatctggcggcggaggtagcggtggcggaggatctgaattcgacatccagatgacacagagccctagcagcctgtctgccagcgtgggagacagagtgaccatcacatgcaagagcagccagagcctgctggactccgatggcaagacctacctgaactggtatcagcagaagcccggcaaggcccctaagctgctgatctacctggtgtccaagctggatagcggcgtgcccagcagattttctggcagcggcagcggaaccgacttcaccctgacaatatccagcctccagcctgaggacttcgccacctactactgcttccaaggcacccactttccatacaccttcggccagggcaccaaggtggaaatcaaaagactcgagatccagaaccctgatcctgccgtgtaccagctgcgggatagcaagagcagcgacaagagcgtgtgtctgttcaccgacttcgacagccagaccaacgtgtcccagagcaaggactccgacgtgtacatcaccgataagtgcgtgctggacatgcggagcatggacttcaagagcaactccgccgtggcctggtccaacaagtccgatttcgcctgcgccaacgccttcaacaacagcattatccccgaggacacattcttcccaagcagcgacgtgccctgcgacgtgaagctggtggaaaagagcttcgagacagacaccaacctgaacttccagaacctgagcgtgatcggcttcagaatcctgctgctgaaagtggccggctttaacctgctgatgaccctgcggctgtggtccagccgcgccaagagaagcggatctggcgtgaagcagaccctgaatttcgacctgctgaagctggctggcgacgtggaatccaacccaggccctactagtaccatggactggatttggcgcatccttttccttgtcggcgctgctaccggcacccattccgggcccgaagtgcaactggttgaatccggtggcggcctggtgcaacccggcggatctctcagacttagctgtgccgcctccggcagaaccttcacaatgggatggtacaggcaggctccagggaaagagagagagttcgtcgccgccatctctctgtctcccacactggcctactacgccgactctgtgaaaggccggttcaccatctccagagataatagcaagaacaccgtggtgctgcaaatgaactctctgagagccgaggatacagccctgtactattgtgccgctgaccggaagtccgtgatgagcatcagacccgattactggggacagggcacactggtcacagtgtctagtggatccggcggcggaggatctggcggaggcggatctgggggcggaggctctttcgaagaagtgcagctggttgaatcaggcggaggactggttcagcctggcggatctctgagactgtcttgtgccgccagcggctacaccttcaccagctactggatgaactgggtccgacaggcccctggcaaaggactggaatgggtcggaatgatcgaccccagcgacagcgagacacactacaaccacatcttcaaggaccgcttcaccatcagcgccgacaccagcaagaataccgcctacctccagatgaactccctgagagccgaggacaccgccgtgtactactgcgccagaaacctgtatctgttcggccagggaaccctggtcacagtgtcatctacgcgtgaggacctgaagaacgtgttcccacctgaggtggccgtgttcgagcctagcaaggccgagatcgcccacacccagaaagccaccctcgtgtgcctggctaccggcttctaccccgaccatgtggaactgtcttggtgggtcaacggcaaagaggtgcacagcggcgtgtgtaccgacccccagccactgaaagaacagcccgccctgaacgacagccggtactgcctgagcagcagactgagagtgtccgccaccttctggcagaacccccggaaccacttcagatgccaggtgcagttctacggcctgagcgagaacgacgagtggacccaggacagagccaagcccgtgacccagatcgtgtctgccgaagcctggggcagagccgattgcggcatcaccagcgccagctaccaccagggcgtgctgagcgccaccatcctgtacgagatcctgctgggcaaggccaccctgtacgccgtgctggtgtctgccctggtgctgatggctatggtcaagcggaaggacagccggggataa

SEQ ID NO: 37134 - DNA, 2697 bp, synthetic construct
  source 1..2697: mol_type = other DNA
atggccttaccagtgaccgccttgctcctgccgctggccttgctgctccacgccgccaggccggaagtgcagctggttgaatctggcggaggactggttcaggctggcggatctctgagactgtcttgtgccgccagcggcagaacctttagcatgggctggtttagacaggcccctggcaaagagagagagttcgtcgccgccatcacatactctggcggcagcccttactacgccgactctgtgaagggcagattcaccatcagccgggacaacgccaagaacaccgtgtacctccagatgaacagcctgaagcctgaggacaccgccgtgtactactgcgccgccaatccaacatacggcagcgactggaacgccgagaattggggccagggaacccaagtgacagtgtctagcggtaccggcggaggcggatctggcggcggaggtagcggtggcggaggatctgaattcgacatccagatgacacagagccctagcagcctgtctgccagcgtgggagacagagtgaccatcacatgcaagagcagccagagcctgctggactccgatggcaagacctacctgaactggtatcagcagaagcccggcaaggcccctaagctgctgatctacctggtgtccaagctggatagcggcgtgcccagcagattttctggcagcggcagcggaaccgacttcaccctgacaatatccagcctccagcctgaggacttcgccacctactactgcttccaaggcacccactttccatacaccttcggccagggcaccaaggtggaaatcaaaagactcgagatccagaaccctgatcctgccgtgtaccagctgcgggatagcaagagcagcgacaagagcgtgtgtctgttcaccgacttcgacagccagaccaacgtgtcccagagcaaggactccgacgtgtacatcaccgataagtgcgtgctggacatgcggagcatggacttcaagagcaactccgccgtggcctggtccaacaagtccgatttcgcctgcgccaacgccttcaacaacagcattatccccgaggacacattcttcccaagcagcgacgtgccctgcgacgtgaagctggtggaaaagagcttcgagacagacaccaacctgaacttccagaacctgagcgtgatcggcttcagaatcctgctgctgaaagtggccggctttaacctgctgatgaccctgcggctgtggtccagccgcgccaagagaagcggatctggcgtgaagcagaccctgaatttcgacctgctgaagctggctggcgacgtggaatccaacccaggccctactagtaccatggactggatttggcgcatccttttccttgtcggcgctgctaccggcgcccattccgggcccgaagtgcaactggttgaatccggtggcggcctggtgcaacccggcggatctctcagacttagctgtgccgcctccggcagaaccttcacaatgggatggtacaggcaggctccagggaaagagagagagttcgtcgccgccatctctctgtctcccacactggcctactacgccgactctgtgaaaggccggttcaccatctccagagataatagcaagaacaccgtggtgctgcaaatgaactctctgagagccgaggatacagccctgtactattgtgccgctgaccggaagtccgtgatgagcatcagacccgattactggggacagggcacactggtcacagtgtctagtggatccggcggcggaggatctggcggaggcggatctgggggcggaggctctttcgaagaagtgcagctggttgaatcaggcggaggactggttcagcctggcggatctctgagactgtcttgtgccgccagcggctacaccttcaccagctactggatgaactgggtccgacaggcccctggcaaaggactggaatgggtcggaatgatcgaccccagcgacagcgagacacactacaaccacatcttcaaggaccgcttcaccatcagcgccgacaccagcaagaataccgcctacctccagatgaactccctgagagccgaggacaccgccgtgtactactgcgccagaaacctgtatctgttcggccagggaaccctggtcacagtgtcatctacgcgtgaggacctgaagaacgtgttcccacctgaggtggccgtgttcgagcctagcaaggccgagatcgcccacacccagaaagccaccctcgtgtgcctggctaccggcttctaccccgaccatgtggaactgtcttggtgggtcaacggcaaagaggtgcacagcggcgtgtgtaccgacccccagccactgaaagaacagcccgccctgaacgacagccggtactgcctgagcagcagactgagagtgtccgccaccttctggcagaacccccggaaccacttcagatgccaggtgcagttctacggcctgagcgagaacgacgagtggacccaggacagagccaagcccgtgacccagatcgtgtctgccgaagcctggggcagagccgattgcggcatcaccagcgccagctaccaccagggcgtgctgagcgccaccatcctgtacgagatcctgctgggcaaggccaccctgtacgccgtgctggtgtctgccctggtgctgatggctatggtcaagcggaaggacagccggggataa

SEQ ID NO: 37135 - DNA, 2688 bp, synthetic construct
  source 1..2688: mol_type = other DNA
atggccttaccagtgaccgccttgctcctgccgctggccttgctgctccacgccgccaggccggaagtgcagctggttgaatctggcggaggactggttcaggctggcggatctctgagactgtcttgtgccgccagcggcagaacctttagcatgggctggtttagacaggcccctggcaaagagagagagttcgtcgccgccatcacatactctggcggcagcccttactacgccgactctgtgaagggcagattcaccatcagccgggacaacgccaagaacaccgtgtacctccagatgaacagcctgaagcctgaggacaccgccgtgtactactgcgccgccaatccaacatacggcagcgactggaacgccgagaattggggccagggaacccaagtgacagtgtctagcggtaccggcggaggcggatctggcggcggaggtagcggtggcggaggatctgaattcgacatccagatgacacagagccctagcagcctgtctgccagcgtgggagacagagtgaccatcacatgcaagagcagccagagcctgctggactccgatggcaagacctacctgaactggtatcagcagaagcccggcaaggcccctaagctgctgatctacctggtgtccaagctggatagcggcgtgcccagcagattttctggcagcggcagcggaaccgacttcaccctgacaatatccagcctccagcctgaggacttcgccacctactactgcttccaaggcacccactttccatacaccttcggccagggcaccaaggtggaaatcaaaagactcgaggacctgaagaacgtgttcccacctgaggtggccgtgttcgagcctagcgaggccgagatcagccacacccagaaagccaccctcgtgtgcctggctaccggcttctaccccgaccatgtggaactgtcttggtgggtcaacggcaaagaggtgcacagcggcgtgtgtaccgacccccagccactgaaagaacagcccgccctgaacgacagccggtactgcctgagcagcagactgagagtgtccgccaccttctggcagaacccccggaaccacttcagatgccaggtgcagttctacggcctgagcgagaacgacgagtggacccaggacagagccaagcccgtgacccagatcgtgtctgccgaagcctggggcagagccgattgcggctttaccagcgagagctaccagcagggcgtgctgagcgccaccatcctgtacgagatcctgctgggcaaggccaccctgtacgccgtgctggtgtctgccctggtgctgatggctatggtcaagcggaaggacagccggggaagggccaagcgatctggatctggagcaacaaacttctcactactcaaacaagcaggtgacgtggaggagaatcccgggcctactagtgccaccatggactggatttggcgcatccttttccttgtcggcgctgctaccggcgcccattccgggcccgaagtgcaactggttgaatccggtggcggcctggtgcaagcaggcggatctctcagacttagctgtgccgcctccggcagaaccttcacaatgggatggtttaggcaggctccagggaaagagagagagttcgtcgccgccatctctctgtctcccacactggcctactacgccgactctgtgaaaggccggttcaccatctccagagataatgccaagaacaccgtggtgctgcaaatgaactctctgaaacccgaggatacagccctgtactattgtgccgctgaccggaagtccgtgatgagcatcagacccgattactggggacagggcacacaagtcacagtgtcctctggatccggcggcggaggatctggcggaggcggatctgggggcggaggctctttcgaagaagtgcagctggttgaatcaggcggaggactggttcagcctggcggatctctgagactgtcttgtgccgccagcggctacaccttcaccagctactggatgaactgggtccgacaggcccctggcaaaggactggaatgggtcggaatgatcgaccccagcgacagcgagacacactacaaccacatcttcaaggaccgcttcaccatcagcgccgacaccagcaagaataccgcctacctccagatgaactccctgagagccgaggacaccgccgtgtactactgcgccagaaacctgtatctgttcggccagggaaccctggtcacagtgtcatctacgcgtatccagaaccctgatcctgccgtgtaccagctgcgggatagcaagagcagcgacaagagcgtgtgtctgttcaccgacttcgacagccagaccaacgtgtcccagagcaaggactccgacgtgtacatcaccgataagtgcgtgctggacatgcggagcatggacttcaagagcaactccgccgtggcctggtccaacaagtccgatttcgcctgcgccaacgccttcaacaacagcattatccccgaggacacattcttcccaagccccgagagcagctgcgacgtgaagctggtggaaaagagcttcgagacagacaccaacctgaacttccagaacctgagcgtgatcggcttcagaatcctgctgctgaaagtggccggctttaacctgctgatgaccctgcggctgtggtccagctaa

SEQ ID NO: 37136 - DNA, 2301 bp, synthetic construct
  source 1..2301: mol_type = other DNA
atggccttaccagtgaccgccttgctcctgccgctggccttgctgctccacgccgccaggccggaagtgcagctggttgaatctggcggaggactggttcagcctggcggatctctgagactgagctgtgaagccagcggcttcgccagcgacgattacatcatcggctggttcagacaggcccctggcaaagagagagagggcgtcagctgcatcagctctaagtacgccaacaccgtgtacaccgacagcgtgaagggcagattcagactgagcagaggcaccgccaagaataccgtgtacctccagatgagcgccctgaagcctgaggataccgccgtgtactactgcgctatggacagccgcagagtgacatgccctgagatcagcaccatgcaccggaacttcgattcttggggccagggcacactggtcacagtgtcatctggtaccggcggaggcggatctggcggcggaggtagcggtggcggaggatctgaattcgacatccagatgacacagagccctagcagcctgtctgccagcgtgggagacagagtgaccatcacatgcaagagcagccagagcctgctggactccgatggcaagacctacctgaactggtatcagcagaagcccggcaaggcccctaagctgctgatctacctggtgtccaagctggatagcggcgtgcccagcagattttctggcagcggcagcggaaccgacttcaccctgacaatatccagcctccagcctgaggacttcgccacctactactgcttccaaggcacccactttccatacaccttcggccagggcaccaaggtggaaatcaaaagactcgaggacctgaagaacgtgttcccacctgaggtggccgtgttcgagcctagcaaggccgagatcgcccacacccagaaagccaccctcgtgtgcctggctaccggcttctaccccgaccatgtggaactgtcttggtgggtcaacggcaaagaggtgcacagcggcgtgtgtaccgacccccagccactgaaagaacagcccgccctgaacgacagccggtactgcctgagcagcagactgagagtgtccgccaccttctggcagaacccccggaaccacttcagatgccaggtgcagttctacggcctgagcgagaacgacgagtggacccaggacagagccaagcccgtgacccagatcgtgtctgccgaagcctggggcagagccgattgcggcatcaccagcgccagctaccaccagggcgtgctgagcgccaccatcctgtacgagatcctgctgggcaaggccaccctgtacgccgtgctggtgtctgccctggtgctgatggctatggtcaagcggaaggacagccggggaagggccaagcgatctggatctggagcaacaaacttctcactactcaaacaagcaggtgacgtggaggagaatcccgggcctactagtatggactggatttggcgcatccttttccttgtcggcgctgctaccggcgcgcattccttcgaagaagtgcagctggttgaatcaggcggaggactggttcagcctggcggatctctgagactgtcttgtgccgccagcggctacaccttcaccagctactggatgaactgggtccgacaggcccctggcaaaggactggaatgggtcggaatgatcgaccccagcgacagcgagacacactacaaccacatcttcaaggaccgcttcaccatcagcgccgacaccagcaagaataccgcctacctccagatgaactccctgagagccgaggacaccgccgtgtactactgcgccagaaacctgtatctgttcggccagggaaccctggtcacagtgtcatctacgcgtatccagaaccctgatcctgccgtgtaccagctgcgggatagcaagagcagcgacaagagcgtgtgtctgttcaccgacttcgacagccagaccaacgtgtcccagagcaaggactccgacgtgtacatcaccgataagtgcgtgctggacatgcggagcatggacttcaagagcaactccgccgtggcctggtccaacaagtccgatttcgcctgcgccaacgccttcaacaacagcattatccccgaggacacattcttcccaagcagcgacgtgccctgcgacgtgaagctggtggaaaagagcttcgagacagacaccaacctgaacttccagaacctgagcgtgatcggcttcagaatcctgctgctgaaagtggccggctttaacctgctgatgaccctgcggctgtggtccagctaa

SEQ ID NO: 37137 - DNA, 2274 bp, synthetic construct
  source 1..2274: mol_type = other DNA
atggccttaccagtgaccgccttgctcctgccgctggccttgctgctccacgccgccaggccggacatccagatgacacagagccctagcagcctgtctgccagcgtgggagacagagtgaccatcacatgcaagagcagccagagcctgctggactccgatggcaagacctacctgaactggtatcagcagaagcccggcaaggcccctaagctgctgatctacctggtgtccaagctggatagcggcgtgcccagcagattttctggcagcggcagcggaaccgacttcaccctgacaatatccagcctccagcctgaggacttcgccacctactactgcttccaaggcacccactttccatacaccttcggccagggcaccaaggtggaaatcaaaagactcgaggacctgaagaacgtgttcccacctgaggtggccgtgttcgagcctagcgaggccgagatcagccacacccagaaagccaccctcgtgtgcctggctaccggcttctaccccgaccatgtggaactgtcttggtgggtcaacggcaaagaggtgcacagcggcgtgtgtaccgacccccagccactgaaagaacagcccgccctgaacgacagccggtactgcctgagcagcagactgagagtgtccgccaccttctggcagaacccccggaaccacttcagatgccaggtgcagttctacggcctgagcgagaacgacgagtggacccaggacagagccaagcccgtgacccagatcgtgtctgccgaagcctggggcagagccgattgcggctttaccagcgagagctaccagcagggcgtgctgagcgccaccatcctgtacgagatcctgctgggcaaggccaccctgtacgccgtgctggtgtctgccctggtgctgatggctatggtcaagcggaaggacagccggggaagggccaagcgatctggatctggagcaacaaacttctcactactcaaacaagcaggtgacgtggaggagaatcccgggcctactagtaccatggactggatttggcgcatccttttccttgtcggcgctgctaccggcgcccattccgggcccgaagtgcaactggttgaatccggtggcggcctggtgcaacccggcggatctctcagacttagctgtgccgcctccggcagaaccttcacaatgggatggtacaggcaggctccagggaaagagagagagttcgtcgccgccatctctctgtctcccacactggcctactacgccgactctgtgaaaggccggttcaccatctccagagataatagcaagaacaccgtggtgctgcaaatgaactctctgagagccgaggatacagccctgtactattgtgccgctgaccggaagtccgtgatgagcatcagacccgattactggggacagggcacactggtcacagtgtctagtggatccggcggcggaggatctggcggaggcggatctgggggcggaggctctttcgaagaagtgcagctggttgaatcaggcggaggactggttcagcctggcggatctctgagactgtcttgtgccgccagcggctacaccttcaccagctactggatgaactgggtccgacaggcccctggcaaaggactggaatgggtcggaatgatcgaccccagcgacagcgagacacactacaaccacatcttcaaggaccgcttcaccatcagcgccgacaccagcaagaataccgcctacctccagatgaactccctgagagccgaggacaccgccgtgtactactgcgccagaaacctgtatctgttcggccagggaaccctggtcacagtgtcatctacgcgtatccagaaccctgatcctgccgtgtaccagctgcgggatagcaagagcagcgacaagagcgtgtgtctgttcaccgacttcgacagccagaccaacgtgtcccagagcaaggactccgacgtgtacatcaccgataagtgcgtgctggacatgcggagcatggacttcaagagcaactccgccgtggcctggtccaacaagtccgatttcgcctgcgccaacgccttcaacaacagcattatccccgaggacacattcttcccaagccccgagagcagctgcgacgtgaagctggtggaaaagagcttcgagacagacaccaacctgaacttccagaacctgagcgtgatcggcttcagaatcctgctgctgaaagtggccggctttaacctgctgatgaccctgcggctgtggtccagctaa

SEQ ID NO: 37138 - DNA, 2292 bp, synthetic construct
  source 1..2292: mol_type = other DNA
atggccttaccagtgaccgccttgctcctgccgctggccttgctgctccacgccgccaggccggacatccagatgacacagagccctagcagcctgtctgccagcgtgggagacagagtgaccatcacatgcaagagcagccagagcctgctggactccgatggcaagacctacctgaactggtatcagcagaagcccggcaaggcccctaagctgctgatctacctggtgtccaagctggatagcggcgtgcccagcagattttctggcagcggcagcggaaccgacttcaccctgacaatatccagcctccagcctgaggacttcgccacctactactgcttccaaggcacccactttccatacaccttcggccagggcaccaaggtggaaatcaaaagactcgaggacctgaagaacgtgttcccacctgaggtggccgtgttcgagcctagcgaggccgagatcagccacacccagaaagccaccctcgtgtgcctggctaccggcttctaccccgaccatgtggaactgtcttggtgggtcaacggcaaagaggtgcacagcggcgtgtgtaccgacccccagccactgaaagaacagcccgccctgaacgacagccggtactgcctgagcagcagactgagagtgtccgccaccttctggcagaacccccggaaccacttcagatgccaggtgcagttctacggcctgagcgagaacgacgagtggacccaggacagagccaagcccgtgacccagatcgtgtctgccgaagcctggggcagagccgattgcggctttaccagcgagagctaccagcagggcgtgctgagcgccaccatcctgtacgagatcctgctgggcaaggccaccctgtacgccgtgctggtgtctgccctggtgctgatggctatggtcaagcggaaggacagccggggaagggccaagcgatctggatctggagcaacaaacttctcactactcaaacaagcaggtgacgtggaggagaatcccgggcctactagtaccatggactggatttggcgcatccttttccttgtcggcgctgctaccggcgcccattccgggccccaggtgcagctggttgaatctggcggaggactggttcagcctggcggatctctgagactgtcttgtgccgccagcggcaacatcaacagcagaaactgcatgggctggttcagacaggcccctggcaagggaagagaaggcgtggcagctatcggccaagtgaccggcagaacctactacgtggacagcgtgaagggcagattcaccatcagcctggacaacagcaagaacaccctgtacctccagatgaacagcctgagagccgaggacaccgccgtgtactattgtgctgctgcccctggctgtctgctgtctgcacttagaagcgccgactacagaaactggggccagggcacactggtcaccgtttcttctggatccggcggcggaggatctggcggaggcggatctgggggcggaggctctttcgaagaagtgcagctggttgaatcaggcggaggactggttcagcctggcggatctctgagactgtcttgtgccgccagcggctacaccttcaccagctactggatgaactgggtccgacaggcccctggcaaaggactggaatgggtcggaatgatcgaccccagcgacagcgagacacactacaaccacatcttcaaggaccgcttcaccatcagcgccgacaccagcaagaataccgcctacctccagatgaactccctgagagccgaggacaccgccgtgtactactgcgccagaaacctgtatctgttcggccagggaaccctggtcacagtgtcatctacgcgtatccagaaccctgatcctgccgtgtaccagctgcgggatagcaagagcagcgacaagagcgtgtgtctgttcaccgacttcgacagccagaccaacgtgtcccagagcaaggactccgacgtgtacatcaccgataagtgcgtgctggacatgcggagcatggacttcaagagcaactccgccgtggcctggtccaacaagtccgatttcgcctgcgccaacgccttcaacaacagcattatccccgaggacacattcttcccaagccccgagagcagctgcgacgtgaagctggtggaaaagagcttcgagacagacaccaacctgaacttccagaacctgagcgtgatcggcttcagaatcctgctgctgaaagtggccggctttaacctgctgatgaccctgcggctgtggtccagc

SEQ ID NO: 37139 - DNA, 2295 bp, synthetic construct
  source 1..2295: mol_type = other DNA
atggccttaccagtgaccgccttgctcctgccgctggccttgctgctccacgccgccaggccggacatccagatgacacagagccctagcagcctgtctgccagcgtgggagacagagtgaccatcacatgcaagagcagccagagcctgctggactccgatggcaagacctacctgaactggtatcagcagaagcccggcaaggcccctaagctgctgatctacctggtgtccaagctggatagcggcgtgcccagcagattttctggcagcggcagcggaaccgacttcaccctgacaatatccagcctccagcctgaggacttcgccacctactactgcttccaaggcacccactttccatacaccttcggccagggcaccaaggtggaaatcaaaagactcgaggacctgaagaacgtgttcccacctgaggtggccgtgttcgagcctagcgaggccgagatcagccacacccagaaagccaccctcgtgtgcctggctaccggcttctaccccgaccatgtggaactgtcttggtgggtcaacggcaaagaggtgcacagcggcgtgtgtaccgacccccagccactgaaagaacagcccgccctgaacgacagccggtactgcctgagcagcagactgagagtgtccgccaccttctggcagaacccccggaaccacttcagatgccaggtgcagttctacggcctgagcgagaacgacgagtggacccaggacagagccaagcccgtgacccagatcgtgtctgccgaagcctggggcagagccgattgcggctttaccagcgagagctaccagcagggcgtgctgagcgccaccatcctgtacgagatcctgctgggcaaggccaccctgtacgccgtgctggtgtctgccctggtgctgatggctatggtcaagcggaaggacagccggggaagggccaagcgatctggatctggagcaacaaacttctcactactcaaacaagcaggtgacgtggaggagaatcccgggcctactagtaccatggactggatttggcgcatccttttccttgtcggcgctgctaccggcgcccattccgggccccaggtgcagctggttgaatctggcggaggatctgttcaggctggcggctctctgagactgtcttgtggcgcttccggcaacatcagcagcagaaactgcatgggctggttcagacaggcccctggcaaagagagagaaggcgttgccgccatcggacaagtgaccggcagatcctactacgtggacagcgtgaagggcagattcaccatcagcctggacaacgccaagaacaccctgtacctccagatgaacacactgaagcccgaggacaccgccatgtactactgtgctgctgcccctggctgtctgctgtctgcacttagaagcgccgactacagaaactggggccagggaacccaagtgacagtgtctagtggatccggcggcggaggatctggcggaggcggatctgggggcggaggctctttcgaagaagtgcagctggttgaatcaggcggaggactggttcagcctggcggatctctgagactgtcttgtgccgccagcggctacaccttcaccagctactggatgaactgggtccgacaggcccctggcaaaggactggaatgggtcggaatgatcgaccccagcgacagcgagacacactacaaccacatcttcaaggaccgcttcaccatcagcgccgacaccagcaagaataccgcctacctccagatgaactccctgagagccgaggacaccgccgtgtactactgcgccagaaacctgtatctgttcggccagggaaccctggtcacagtgtcatctacgcgtatccagaaccctgatcctgccgtgtaccagctgcgggatagcaagagcagcgacaagagcgtgtgtctgttcaccgacttcgacagccagaccaacgtgtcccagagcaaggactccgacgtgtacatcaccgataagtgcgtgctggacatgcggagcatggacttcaagagcaactccgccgtggcctggtccaacaagtccgatttcgcctgcgccaacgccttcaacaacagcattatccccgaggacacattcttcccaagccccgagagcagctgcgacgtgaagctggtggaaaagagcttcgagacagacaccaacctgaacttccagaacctgagcgtgatcggcttcagaatcctgctgctgaaagtggccggctttaacctgctgatgaccctgcggctgtggtccagctaa

SEQ ID NO: 37140 - DNA, 2718 bp, synthetic construct
  source 1..2718: mol_type = other DNA
atggccttaccagtgaccgccttgctcctgccgctggccttgctgctccacgccgccaggccggaagtgcagctggttgaatctggcggaggactggttcaggctggcggatctctgagactgtcttgtgccgccagcggcagaacctttagcatgggctggtttagacaggcccctggcaaagagagagagttcgtcgccgccatcacatactctggcggcagcccttactacgccgactctgtgaagggcagattcaccatcagccgggacaacgccaagaacaccgtgtacctccagatgaacagcctgaagcctgaggacaccgccgtgtactactgcgccgccaatccaacatacggcagcgactggaacgccgagaattggggccagggaacccaagtgacagtgtctagcggtaccggcggaggcggatctggcggcggaggtagcggtggcggaggatctgaattcgacatccagatgacacagagccctagcagcctgtctgccagcgtgggagacagagtgaccatcacatgcaagagcagccagagcctgctggactccgatggcaagacctacctgaactggtatcagcagaagcccggcaaggcccctaagctgctgatctacctggtgtccaagctggatagcggcgtgcccagcagattttctggcagcggcagcggaaccgacttcaccctgacaatatccagcctccagcctgaggacttcgccacctactactgcttccaaggcacccactttccatacaccttcggccagggcaccaaggtggaaatcaaaagactcgagatccagaaccctgatcctgccgtgtaccagctgcgggatagcaagagcagcgacaagagcgtgtgtctgttcaccgacttcgacagccagaccaacgtgtcccagagcaaggactccgacgtgtacatcaccgataagtgcgtgctggacatgcggagcatggacttcaagagcaactccgccgtggcctggtccaacaagtccgatttcgcctgcgccaacgccttcaacaacagcattatccccgaggacacattcttcccaagcagcgacgtgccctgcgacgtgaagctggtggaaaagagcttcgagacagacaccaacctgaacttccagaacctgagcgtgatcggcttcagaatcctgctgctgaaagtggccggctttaacctgctgatgaccctgcggctgtggtccagccgcgccaagagaagcggatctggcgtgaagcagaccctgaatttcgacctgctgaagctggctggcgacgtggaatccaacccaggccctactagtaccatggactggatttggcgcatccttttccttgtcggcgctgctaccggcgcccattccgggccccaggtgcagctggttgaatctggcggaggatctgttcaggctggcggctctctgagactgtcttgtggcgcttccggcaacatcagcagcagaaactgcatgggctggttcagacaggcccctggcaaagagagagaaggcgttgccgccatcggacaagtgaccggcagatcctactacgtggacagcgtgaagggcagattcaccatcagcctggacaacgccaagaacaccctgtacctccagatgaacacactgaagcccgaggacaccgccatgtactactgtgctgctgcccctggctgtctgctgtctgcacttagaagcgccgactacagaaactggggccagggaacccaagtgacagtgtctagtggatccggcggcggaggatctggcggaggcggatctgggggcggaggctctttcgaagaagtgcagctggttgaatcaggcggaggactggttcagcctggcggatctctgagactgtcttgtgccgccagcggctacaccttcaccagctactggatgaactgggtccgacaggcccctggcaaaggactggaatgggtcggaatgatcgaccccagcgacagcgagacacactacaaccacatcttcaaggaccgcttcaccatcagcgccgacaccagcaagaataccgcctacctccagatgaactccctgagagccgaggacaccgccgtgtactactgcgccagaaacctgtatctgttcggccagggaaccctggtcacagtgtcatctacgcgtgaggacctgaagaacgtgttcccacctgaggtggccgtgttcgagcctagcaaggccgagatcgcccacacccagaaagccaccctcgtgtgcctggctaccggcttctaccccgaccatgtggaactgtcttggtgggtcaacggcaaagaggtgcacagcggcgtgtgtaccgacccccagccactgaaagaacagcccgccctgaacgacagccggtactgcctgagcagcagactgagagtgtccgccaccttctggcagaacccccggaaccacttcagatgccaggtgcagttctacggcctgagcgagaacgacgagtggacccaggacagagccaagcccgtgacccagatcgtgtctgccgaagcctggggcagagccgattgcggcatcaccagcgccagctaccaccagggcgtgctgagcgccaccatcctgtacgagatcctgctgggcaaggccaccctgtacgccgtgctggtgtctgccctggtgctgatggctatggtcaagcggaaggacagccggggataa

SEQ ID NO: 37141 - DNA, 2709 bp, synthetic construct
  source 1..2709: mol_type = other DNA
atggccttaccagtgaccgccttgctcctgccgctggccttgctgctccacgccgccaggccgcaggtgcagctggttgaatctggcggaggatctgttcaggctggcggctctctgagactgtcttgtggcgcttccggcaacatcagcagcagaaactgcatgggctggttcagacaggcccctggcaaagagagagaaggcgttgccgccatcggacaagtgaccggcagatcctactacgtggacagcgtgaagggcagattcaccatcagcctggacaacgccaagaacaccctgtacctccagatgaacacactgaagcccgaggacaccgccatgtactactgtgctgctgcccctggctgtctgctgtctgcacttagaagcgccgactacagaaactggggccagggaacccaagtgacagtgtctagtggtaccggcggaggcggatctggcggcggaggtagcggtggcggaggatctgaattcgacatccagatgacacagagccctagcagcctgtctgccagcgtgggagacagagtgaccatcacatgcaagagcagccagagcctgctggactccgatggcaagacctacctgaactggtatcagcagaagcccggcaaggcccctaagctgctgatctacctggtgtccaagctggatagcggcgtgcccagcagattttctggcagcggcagcggaaccgacttcaccctgacaatatccagcctccagcctgaggacttcgccacctactactgcttccaaggcacccactttccatacaccttcggccagggcaccaaggtggaaatcaaaagactcgaggacctgaagaacgtgttcccacctgaggtggccgtgttcgagcctagcgaggccgagatcagccacacccagaaagccaccctcgtgtgcctggctaccggcttctaccccgaccatgtggaactgtcttggtgggtcaacggcaaagaggtgcacagcggcgtgtgtaccgacccccagccactgaaagaacagcccgccctgaacgacagccggtactgcctgagcagcagactgagagtgtccgccaccttctggcagaacccccggaaccacttcagatgccaggtgcagttctacggcctgagcgagaacgacgagtggacccaggacagagccaagcccgtgacccagatcgtgtctgccgaagcctggggcagagccgattgcggctttaccagcgagagctaccagcagggcgtgctgagcgccaccatcctgtacgagatcctgctgggcaaggccaccctgtacgccgtgctggtgtctgccctggtgctgatggctatggtcaagcggaaggacagccggggaagggccaagcgatctggatctggagcaacaaacttctcactactcaaacaagcaggtgacgtggaggagaatcccgggcctactagtgccaccatggactggatttggcgcatccttttccttgtcggcgctgctaccggcgcccattccgggcccgaagtgcaactggttgaatccggtggcggcctggtgcaagcaggcggatctctcagacttagctgtgccgcctccggcagaaccttcacaatgggatggtttaggcaggctccagggaaagagagagagttcgtcgccgccatctctctgtctcccacactggcctactacgccgactctgtgaaaggccggttcaccatctccagagataatgccaagaacaccgtggtgctgcaaatgaactctctgaaacccgaggatacagccctgtactattgtgccgctgaccggaagtccgtgatgagcatcagacccgattactggggacagggcacacaagtcacagtgtcctctggatccggcggcggaggatctggcggaggcggatctgggggcggaggctctttcgaagaagtgcagctggttgaatcaggcggaggactggttcagcctggcggatctctgagactgtcttgtgccgccagcggctacaccttcaccagctactggatgaactgggtccgacaggcccctggcaaaggactggaatgggtcggaatgatcgaccccagcgacagcgagacacactacaaccacatcttcaaggaccgcttcaccatcagcgccgacaccagcaagaataccgcctacctccagatgaactccctgagagccgaggacaccgccgtgtactactgcgccagaaacctgtatctgttcggccagggaaccctggtcacagtgtcatctacgcgtatccagaaccctgatcctgccgtgtaccagctgcgggatagcaagagcagcgacaagagcgtgtgtctgttcaccgacttcgacagccagaccaacgtgtcccagagcaaggactccgacgtgtacatcaccgataagtgcgtgctggacatgcggagcatggacttcaagagcaactccgccgtggcctggtccaacaagtccgatttcgcctgcgccaacgccttcaacaacagcattatccccgaggacacattcttcccaagccccgagagcagctgcgacgtgaagctggtggaaaagagcttcgagacagacaccaacctgaacttccagaacctgagcgtgatcggcttcagaatcctgctgctgaaagtggccggctttaacctgctgatgaccctgcggctgtggtccagctaa

SEQ ID NO: 37142 - DNA, 2298 bp, synthetic construct
  source 1..2298: mol_type = other DNA
atggccttaccagtgaccgccttgctcctgccgctggccttgctgctccacgccgccaggccgcaggtgcagctggttgaatctggcggaggatctgttcaggctggcggctctctgagactgtcttgtggcgcttccggcaacatcagcagcagaaactgcatgggctggttcagacaggcccctggcaaagagagagaaggcgttgccgccatcggacaagtgaccggcagatcctactacgtggacagcgtgaagggcagattcaccatcagcctggacaacgccaagaacaccctgtacctccagatgaacacactgaagcccgaggacaccgccatgtactactgtgctgctgcccctggctgtctgctgtctgcacttagaagcgccgactacagaaactggggccagggaacccaagtgacagtgtctagtggtaccggcggaggcggatctggcggcggaggtagcggtggcggaggatctgaattcgacatccagatgacacagagccctagcagcctgtctgccagcgtgggagacagagtgaccatcacatgcaagagcagccagagcctgctggactccgatggcaagacctacctgaactggtatcagcagaagcccggcaaggcccctaagctgctgatctacctggtgtccaagctggatagcggcgtgcccagcagattttctggcagcggcagcggaaccgacttcaccctgacaatatccagcctccagcctgaggacttcgccacctactactgcttccaaggcacccactttccatacaccttcggccagggcaccaaggtggaaatcaaaagactcgaggacctgaagaacgtgttcccacctgaggtggccgtgttcgagcctagcgaggccgagatcagccacacccagaaagccaccctcgtgtgcctggctaccggcttctaccccgaccatgtggaactgtcttggtgggtcaacggcaaagaggtgcacagcggcgtgtgtaccgacccccagccactgaaagaacagcccgccctgaacgacagccggtactgcctgagcagcagactgagagtgtccgccaccttctggcagaacccccggaaccacttcagatgccaggtgcagttctacggcctgagcgagaacgacgagtggacccaggacagagccaagcccgtgacccagatcgtgtctgccgaagcctggggcagagccgattgcggctttaccagcgagagctaccagcagggcgtgctgagcgccaccatcctgtacgagatcctgctgggcaaggccaccctgtacgccgtgctggtgtctgccctggtgctgatggctatggtcaagcggaaggacagccggggaagggccaagcgatctggatctggagcaacaaacttctcactactcaaacaagcaggtgacgtggaggagaatcccgggcctactagtgccaccatggactggatttggcgcatccttttccttgtcggcgctgctaccggcgcccattccttcgaagaagtgcagctggttgaatcaggcggaggactggttcagcctggcggatctctgagactgtcttgtgccgccagcggctacaccttcaccagctactggatgaactgggtccgacaggcccctggcaaaggactggaatgggtcggaatgatcgaccccagcgacagcgagacacactacaaccacatcttcaaggaccgcttcaccatcagcgccgacaccagcaagaataccgcctacctccagatgaactccctgagagccgaggacaccgccgtgtactactgcgccagaaacctgtatctgttcggccagggaaccctggtcacagtgtcatctacgcgtatccagaaccctgatcctgccgtgtaccagctgcgggatagcaagagcagcgacaagagcgtgtgtctgttcaccgacttcgacagccagaccaacgtgtcccagagcaaggactccgacgtgtacatcaccgataagtgcgtgctggacatgcggagcatggacttcaagagcaactccgccgtggcctggtccaacaagtccgatttcgcctgcgccaacgccttcaacaacagcattatccccgaggacacattcttcccaagccccgagagcagctgcgacgtgaagctggtggaaaagagcttcgagacagacaccaacctgaacttccagaacctgagcgtgatcggcttcagaatcctgctgctgaaagtggccggctttaacctgctgatgaccctgcggctgtggtccagctaa

SEQ ID NO: 37143 - DNA, 2298 bp, synthetic construct
  source 1..2298: mol_type = other DNA
atggccttaccagtgaccgccttgctcctgccgctggccttgctgctccacgccgccaggccgcaagttcagctggtggaaagcggtggtggcgttgtgcaacctggtggaagtctgaggctgagctgtgccgcttctggcctgagctttagcacctacactgtggcctggttcaggcaggctcccggaaagggtcttgaaggcgtggccgccattccttacaccagccagcacatggtgtacacagacagcgtcagaggccggttcaccatcagcagagacaactccaagaatacgctctatctccagatgaactctctgcgcgccgaagatacagccgtgtattactgcgccaccgacagacggcctggcacctctatgctggctatcaacggctacaacagatggggacagggaaccaccgtgaccgtgtcatctggtaccggcggaggcggatctggcggcggaggtagcggtggcggaggatctgaattcgacatccagatgacacagagccctagcagcctgtctgccagcgtgggagacagagtgaccatcacatgcaagagcagccagagcctgctggactccgatggcaagacctacctgaactggtatcagcagaagcccggcaaggcccctaagctgctgatctacctggtgtccaagctggatagcggcgtgcccagcagattttctggcagcggcagcggaaccgacttcaccctgacaatatccagcctccagcctgaggacttcgccacctactactgcttccaaggcacccactttccatacaccttcggccagggcaccaaggtggaaatcaaaagactcgaggacctgaagaacgtgttcccacctgaggtggccgtgttcgagcctagcgaggccgagatcagccacacccagaaagccaccctcgtgtgcctggctaccggcttctaccccgaccatgtggaactgtcttggtgggtcaacggcaaagaggtgcacagcggcgtgtgtaccgacccccagccactgaaagaacagcccgccctgaacgacagccggtactgcctgagcagcagactgagagtgtccgccaccttctggcagaacccccggaaccacttcagatgccaggtgcagttctacggcctgagcgagaacgacgagtggacccaggacagagccaagcccgtgacccagatcgtgtctgccgaagcctggggcagagccgattgcggctttaccagcgagagctaccagcagggcgtgctgagcgccaccatcctgtacgagatcctgctgggcaaggccaccctgtacgccgtgctggtgtctgccctggtgctgatggctatggtcaagcggaaggacagccggggaagggccaagcgatctggatctggagcaacaaacttctcactactcaaacaagcaggtgacgtggaggagaatcccgggcctactagtgccaccatggactggatttggcgcatccttttccttgtcggcgctgctaccggcgcccattccttcgaagaagtgcagctggttgaatcaggcggaggactggttcagcctggcggatctctgagactgtcttgtgccgccagcggctacaccttcaccagctactggatgaactgggtccgacaggcccctggcaaaggactggaatgggtcggaatgatcgaccccagcgacagcgagacacactacaaccacatcttcaaggaccgcttcaccatcagcgccgacaccagcaagaataccgcctacctccagatgaactccctgagagccgaggacaccgccgtgtactactgcgccagaaacctgtatctgttcggccagggaaccctggtcacagtgtcatctacgcgtatccagaaccctgatcctgccgtgtaccagctgcgggatagcaagagcagcgacaagagcgtgtgtctgttcaccgacttcgacagccagaccaacgtgtcccagagcaaggactccgacgtgtacatcaccgataagtgcgtgctggacatgcggagcatggacttcaagagcaactccgccgtggcctggtccaacaagtccgatttcgcctgcgccaacgccttcaacaacagcattatccccgaggacacattcttcccaagccccgagagcagctgcgacgtgaagctggtggaaaagagcttcgagacagacaccaacctgaacttccagaacctgagcgtgatcggcttcagaatcctgctgctgaaagtggccggctttaacctgctgatgaccctgcggctgtggtccagctaa

SEQ ID NO: 37144 - DNA, 2295 bp, synthetic construct
  source 1..2295: mol_type = other DNA
atggccttaccagtgaccgccttgctcctgccgctggccttgctgctccacgccgccaggccggacatccagatgacacagagccctagcagcctgtctgccagcgtgggagacagagtgaccatcacatgcaagagcagccagagcctgctggactccgatggcaagacctacctgaactggtatcagcagaagcccggcaaggcccctaagctgctgatctacctggtgtccaagctggatagcggcgtgcccagcagattttctggcagcggcagcggaaccgacttcaccctgacaatatccagcctccagcctgaggacttcgccacctactactgcttccaaggcacccactttccatacaccttcggccagggcaccaaggtggaaatcaaaagactcgaggacctgaagaacgtgttcccacctgaggtggccgtgttcgagcctagcgaggccgagatcagccacacccagaaagccaccctcgtgtgcctggctaccggcttctaccccgaccatgtggaactgtcttggtgggtcaacggcaaagaggtgcacagcggcgtgtgtaccgacccccagccactgaaagaacagcccgccctgaacgacagccggtactgcctgagcagcagactgagagtgtccgccaccttctggcagaacccccggaaccacttcagatgccaggtgcagttctacggcctgagcgagaacgacgagtggacccaggacagagccaagcccgtgacccagatcgtgtctgccgaagcctggggcagagccgattgcggctttaccagcgagagctaccagcagggcgtgctgagcgccaccatcctgtacgagatcctgctgggcaaggccaccctgtacgccgtgctggtgtctgccctggtgctgatggctatggtcaagcggaaggacagccggggaagggccaagcgatctggatctggagcaacaaacttctcactactcaaacaagcaggtgacgtggaggagaatcccgggcctactagtaccatggactggatttggcgcatccttttccttgtcggcgctgctaccggcgcccattccgggccccaagttcagctggtggaaagcggtggtggcgttgtgcaacctggtggaagtctgaggctgagctgtgccgcttctggcctgagctttagcacctacactgtggcctggttcaggcaggctcccggaaagggtcttgaaggcgtggccgccattccttacaccagccagcacatggtgtacacagacagcgtcagaggccggttcaccatcagcagagacaactccaagaatacgctctatctccagatgaactctctgcgcgccgaagatacagccgtgtattactgcgccaccgacagacggcctggcacctctatgctggctatcaacggctacaacagatggggacagggaaccaccgtgaccgtgtcatctggatccggcggcggaggatctggcggaggcggatctgggggcggaggctctttcgaagaagtgcagctggttgaatcaggcggaggactggttcagcctggcggatctctgagactgtcttgtgccgccagcggctacaccttcaccagctactggatgaactgggtccgacaggcccctggcaaaggactggaatgggtcggaatgatcgaccccagcgacagcgagacacactacaaccacatcttcaaggaccgcttcaccatcagcgccgacaccagcaagaataccgcctacctccagatgaactccctgagagccgaggacaccgccgtgtactactgcgccagaaacctgtatctgttcggccagggaaccctggtcacagtgtcatctacgcgtatccagaaccctgatcctgccgtgtaccagctgcgggatagcaagagcagcgacaagagcgtgtgtctgttcaccgacttcgacagccagaccaacgtgtcccagagcaaggactccgacgtgtacatcaccgataagtgcgtgctggacatgcggagcatggacttcaagagcaactccgccgtggcctggtccaacaagtccgatttcgcctgcgccaacgccttcaacaacagcattatccccgaggacacattcttcccaagccccgagagcagctgcgacgtgaagctggtggaaaagagcttcgagacagacaccaacctgaacttccagaacctgagcgtgatcggcttcagaatcctgctgctgaaagtggccggctttaacctgctgatgaccctgcggctgtggtccagctaa

SEQ ID NO: 37145 - DNA, 2301 bp, synthetic construct
  source 1..2301: mol_type = other DNA
atggccttaccagtgaccgccttgctcctgccgctggccttgctgctccacgccgccaggccggacatccagatgacacagagccctagcagcctgtctgccagcgtgggagacagagtgaccatcacatgcaagagcagccagagcctgctggactccgatggcaagacctacctgaactggtatcagcagaagcccggcaaggcccctaagctgctgatctacctggtgtccaagctggatagcggcgtgcccagcagattttctggcagcggcagcggaaccgacttcaccctgacaatatccagcctccagcctgaggacttcgccacctactactgcttccaaggcacccactttccatacaccttcggccagggcaccaaggtggaaatcaaaagactcgaggacctgaagaacgtgttcccacctgaggtggccgtgttcgagcctagcgaggccgagatcagccacacccagaaagccaccctcgtgtgcctggctaccggcttctaccccgaccatgtggaactgtcttggtgggtcaacggcaaagaggtgcacagcggcgtgtgtaccgacccccagccactgaaagaacagcccgccctgaacgacagccggtactgcctgagcagcagactgagagtgtccgccaccttctggcagaacccccggaaccacttcagatgccaggtgcagttctacggcctgagcgagaacgacgagtggacccaggacagagccaagcccgtgacccagatcgtgtctgccgaagcctggggcagagccgattgcggctttaccagcgagagctaccagcagggcgtgctgagcgccaccatcctgtacgagatcctgctgggcaaggccaccctgtacgccgtgctggtgtctgccctggtgctgatggctatggtcaagcggaaggacagccggggaagggccaagcgatctggatctggagcaacaaacttctcactactcaaacaagcaggtgacgtggaggagaatcccgggcctactagtaccatggactggatttggcgcatccttttccttgtcggcgctgctaccggcgcccattccgggcccgaggtgcagctggttgaatctggcggaggatctgttcaggctggcggctctctgagactgtcttgtgccgccagcggctacacctacagcatcaactgcatgggctggttcagacaggcccctggcaaagagagagaaggcgttgccgccatctctaccggcggaggcagaaccgattaccgggattctgtgaagggcagattcaccatcagccaggacaacgccaagaacaccgtgtacctccagatgaacagcctgaagcctgaggacaccgccatgtactactgtgccggcaagaccacctatcctggctacggatgtggcctgggcagaagcgcctacaattattggggccagggcacccaagtgaccgtgtcatctggatccggcggcggaggatctggcggaggcggatctgggggcggaggctctttcgaagaagtgcagctggttgaatcaggcggaggactggttcagcctggcggatctctgagactgtcttgtgccgccagcggctacaccttcaccagctactggatgaactgggtccgacaggcccctggcaaaggactggaatgggtcggaatgatcgaccccagcgacagcgagacacactacaaccacatcttcaaggaccgcttcaccatcagcgccgacaccagcaagaataccgcctacctccagatgaactccctgagagccgaggacaccgccgtgtactactgcgccagaaacctgtatctgttcggccagggaaccctggtcacagtgtcatctacgcgtatccagaaccctgatcctgccgtgtaccagctgcgggatagcaagagcagcgacaagagcgtgtgtctgttcaccgacttcgacagccagaccaacgtgtcccagagcaaggactccgacgtgtacatcaccgataagtgcgtgctggacatgcggagcatggacttcaagagcaactccgccgtggcctggtccaacaagtccgatttcgcctgcgccaacgccttcaacaacagcattatccccgaggacacattcttcccaagccccgagagcagctgcgacgtgaagctggtggaaaagagcttcgagacagacaccaacctgaacttccagaacctgagcgtgatcggcttcagaatcctgctgctgaaagtggccggctttaacctgctgatgaccctgcggctgtggtccagctaa

SEQ ID NO: 37146 - DNA, 1857 bp, synthetic construct
  source 1..1857: mol_type = other DNA
atggccttaccagtgaccgccttgctcctgccgctggccttgctgctccacgccgccaggccggacatccagatgacacagagccctagcagcctgtctgccagcgtgggagacagagtgaccatcacatgcaagagcagccagagcctgctggactccgatggcaagacctacctgaactggtatcagcagaagcccggcaaggcccctaagctgctgatctacctggtgtccaagctggatagcggcgtgcccagcagattttctggcagcggcagcggaaccgacttcaccctgacaatatccagcctccagcctgaggacttcgccacctactactgcttccaaggcacccactttccatacaccttcggccagggcaccaaggtggaaatcaaaagactcgaggacctgaagcacgtgttcccacctgaggtggccgtgttcgagcctagcgacgccgagatctggcacacccagaaagccaccctcgtgtgcctggctaccggcttctaccccgaccatgtggaactgtcttggtgggtcaacggcaaagaggtgcacagcggcgtgtctaccgacccccagccactgaaagaacagcccgccctgaacgacagccggtactgcctgagcagcagactgagagtgtccgccaccttctggcagaacccccggaaccacttcagatgccaggtgcagttctacggcctgagcgagaacgacgagtggacccaggacagagccaagcccgtgacccagatcgtgtctgccgaagcctggggcagagccgattgcggctttaccagcgagagctaccagcagggcgtgctgagcgccaccatcctgtacgagatcctgctgggcaaggccaccctgtacgccgtgctggtgtctgccctggtgctgatggctatggtcaagcggaaggacagccggggaagggccaagcgatctggatctggagcaacaaacttctcactactcaaacaagcaggtgacgtggaggagaatcccgggcctactagtatggactggatttggcgcatccttttccttgtcggcgctgctaccggcgcgcattccttcgaagaagtgcagctggttgaatcaggcggaggactggttcagcctggcggatctctgagactgtcttgtgccgccagcggctacaccttcaccagctactggatgaactgggtccgacaggcccctggcaaaggactggaatgggtcggaatgatcgaccccagcgacagcgagacacactacaaccacatcttcaaggaccgcttcaccatcagcgccgacaccagcaagaataccgcctacctccagatgaactccctgagagccgaggacaccgccgtgtactactgcgccagaaacctgtatctgttcggccagggaaccctggtcacagtgtcatctacgcgtatccagaaccctgatcctgccgtgtaccagctgcgggatagcaagagcagcgacaagagcgtgtgtctgttcaccgacttcgacagccagaccaacgtgtcccagagcaaggactccgacgtgtacatcaccgataagaccgtgctggacatgcggagcatggacttcaagagcaactccgccgtggcctggtccagcaagtccgatttcgcctgcgccaacgccttcaacaacagcattatccccgaggacacattcttcccaagccccgagatggcctgcgacgtgaagctggtggaaaagagcttcgagacagacaccaacctgaacttccagaacctgctcgtgatctggctgagaatcctgctgctgaaagtggccggctttaacctgctgatgaccctgcggctgtggtccagc

SEQ ID NO: 37147 - DNA, 1857 bp, synthetic construct
  source 1..1857: mol_type = other DNA
atggccttaccagtgaccgccttgctcctgccgctggccttgctgctccacgccgccaggccggacatccagatgacacagagccctagcagcctgtctgccagcgtgggagacagagtgaccatcacatgcaagagcagccagagcctgctggactccgatggcaagacctacctgaactggtatcagcagaagcccggcaaggcccctaagctgctgatctacctggtgtccaagctggatagcggcgtgcccagcagattttctggcagcggcagcggaaccgacttcaccctgacaatatccagcctccagcctgaggacttcgccacctactactgcttccaaggcacccactttccatacaccttcggccagggcaccaaggtggaaatcaaaagactcgaggacctgaagcacgtgttcccacctgaggtggccgtgttcgagcctagcgacgccgagatctggcacacccagaaagccaccctcgtgtgcctggctaccggcttctaccccgaccatgtggaactgtcttggtgggtcaacggcaaagaggtgcacagcggcgtgtctaccgacccccagccactgaaagaacagcccgccctgaacgacagccggtactgcctgagcagcagactgagagtgtccgccaccttctggcagaacccccggaaccacttcagatgccaggtgcagttctacggcctgagcgagaacgacgagtggacccaggacagagccaagcccgtgacccagatcgtgtctgccgaagcctggggcagagccgattgcggctttaccagcgagagctaccagcagggcgtgctgagcgccaccatcctgtacgagatcctgctgggcaaggccaccctgtacgccgtgctggtgtctgccctggtgctgatggctatggtcaagcggaaggacagccggggaagggccaagcgatctggatctggagcaacaaacttctcactactcaaacaagcaggtgacgtggaggagaatcccgggcctactagtatggactggatttggcgcatccttttccttgtcggcgctgctaccggcgcgcattccttcgaagaagtgcagctggttgaatcaggcggaggactggttcagcctggcggatctctgagactgtcttgtgccgccagcggctacaccttcaccagctactggatgaactgggtccgacaggcccctggcaaaggactggaatgggtcggaatgatcgaccccagcgacagcgagacacactacaaccacatcttcaaggaccgcttcaccatcagcgccgacaccagcaagaataccgcctacctccagatgaactccctgagagccgaggacaccgccgtgtactactgcgccagaaacctgtatctgttcggccagggaaccctggtcacagtgtcatctacgcgtatccagaaccctgatcctgccgtgtaccagctgcgggatagcaagagcagcgacaagagcgtgtgtctgttcaccgacttcgacagccagaccaacgtgtcccagagcaaggactccgacgtgtacatcaccgataagaccgtgctggacatgcggagcatggacttcaagagcaactccgccgtggcctggtccaccaagtccgatttcgcctgcgccaacgccttcaacaacagcattatccccgaggacacattcttcccaagccccgaggtggtgtgcgacgtgaagctggtggaaaagagcttcgagacagacaccaacctgaacttccagaacctggtggtgatcggcgccagaatcctgctgctgaaagtggccggctttaacctgctgatgaccctgcggctgtggtccagc

SEQ ID NO: 37148 - DNA, 1857 bp, synthetic construct
  source 1..1857: mol_type = other DNA
atggccttaccagtgaccgccttgctcctgccgctggccttgctgctccacgccgccaggccggacatccagatgacacagagccctagcagcctgtctgccagcgtgggagacagagtgaccatcacatgcaagagcagccagagcctgctggactccgatggcaagacctacctgaactggtatcagcagaagcccggcaaggcccctaagctgctgatctacctggtgtccaagctggatagcggcgtgcccagcagattttctggcagcggcagcggaaccgacttcaccctgacaatatccagcctccagcctgaggacttcgccacctactactgcttccaaggcacccactttccatacaccttcggccagggcaccaaggtggaaatcaaaagactcgaggacctgaagaacgtgttcccacctgaggtggccgtgttcgagcctagcaaggccgagatcagcagaacccagaaagccaccctcgtgtgcctggctaccggcttctaccctcctcatgtggaactgtcttggtgggtcaacggcaaagaggtgcacgacggcgtgtgtaccgacccccagccactgaaagaacagcccgccctgaacgacagccggtactgcctgagcagcagactgagagtgtccgccaccttctggcagaacccccggaaccacttcagatgccaggtgcagttctacggcctgagcgagaacgacgagtggacccaggacagagccaagcccgtgacccagatcgtgtctgccgaagcctggggcagagccgattgcggctttaccagcgagagctaccagcagggcgtgctgagcgccaccatcctgtacgagatcctgctgggcaaggccaccctgtacgccgtgctggtgtctgccctggtgctgatggctatggtcaagcggaaggacagccggggaagggccaagcgatctggatctggagcaacaaacttctcactactcaaacaagcaggtgacgtggaggagaatcccgggcctactagtatggactggatttggcgcatccttttccttgtcggcgctgctaccggcgcgcattccttcgaagaagtgcagctggttgaatcaggcggaggactggttcagcctggcggatctctgagactgtcttgtgccgccagcggctacaccttcaccagctactggatgaactgggtccgacaggcccctggcaaaggactggaatgggtcggaatgatcgaccccagcgacagcgagacacactacaaccacatcttcaaggaccgcttcaccatcagcgccgacaccagcaagaataccgcctacctccagatgaactccctgagagccgaggacaccgccgtgtactactgcgccagaaacctgtatctgttcggccagggaaccctggtcacagtgtcatctacgcgtatccagaaccctgatcctgccgtgtaccagctgcgggatagcaagagcagcgacaagttcgtgtgtctgttcaccgacttcgacagccagatcaacgtgtcccagagcaaggactccgacgtgtacatcaccgataagtgcgtgctggacatgcggagcatggacttcaagagcaactccgccgtggcctggtccaacaagtccgatttcacctgcgccaacgccttcaacaacagcattatccccgaggacacattcttcccaagccccgagagcagctgcgacgtgaagctggtggaaaagagcttcgagacagacaccaacctgaacttccagaacctgagcgtgatcggcttcagaatcctgctgctgaaagtggccggctttaacctgctgatgaccctgcggctgtggtccagc

SEQ ID NO: 37149 - DNA, 2283 bp, synthetic construct
  source 1..2283: mol_type = other DNA
atggccttaccagtgaccgccttgctcctgccgctggccttgctgctccacgccgccaggccggacatccagatgacacagagccctagcagcctgtctgccagcgtgggagacagagtgaccatcacatgcaagagcagccagagcctgctggactccgatggcaagacctacctgaactggtatcagcagaagcccggcaaggcccctaagctgctgatctacctggtgtccaagctggatagcggcgtgcccagcagattttctggcagcggcagcggaaccgacttcaccctgacaatatccagcctccagcctgaggacttcgccacctactactgcttccaaggcacccactttccatacaccttcggccagggcaccaaggtggaaatcaaaagactcgaggacctgaagaacgtgttcccacctgaggtggccgtgttcgagcctagcgaggccgagatcagccacacccagaaagccaccctcgtgtgcctggctaccggcttctaccccgaccatgtggaactgtcttggtgggtcaacggcaaagaggtgcacagcggcgtgtgtaccgacccccagccactgaaagaacagcccgccctgaacgacagccggtactgcctgagcagcagactgagagtgtccgccaccttctggcagaacccccggaaccacttcagatgccaggtgcagttctacggcctgagcgagaacgacgagtggacccaggacagagccaagcccgtgacccagatcgtgtctgccgaagcctggggcagagccgattgcggctttaccagcgagagctaccagcagggcgtgctgagcgccaccatcctgtacgagatcctgctgggcaaggccaccctgtacgccgtgctggtgtctgccctggtgctgatggctatggtcaagcggaaggacagccggggaagggccaagcgatctggatctggagcaacaaacttctcactactcaaacaagcaggtgacgtggaggagaatcccgggcctactagtaccatggactggatttggcgcatccttttccttgtcggcgctgctaccggcgcccattccgggccccaggtgcagctccaagaaagcggacccggactggttaagccctctcagaccctgtctctgacctgcacagttagcggagccagcattaccacaggcgagtattattggaattggtttcggcagccaccaggcaaggggcttgagtggatgggtgctattgctgcctctggcagcaccacctactctcccagctttgagagcagaacctccatcagccgggacacctccaaaaaccagttctctctgaagctgtcctccgtgaccgctgctgacaccgccgtctattattgtggccggtctttcggcgtggcagctgtgaccacaggacagaacagaggccagggaacacttgtgaccgtgtcctctggatccggcggcggaggatctggcggaggcggatctgggggcggaggctctttcgaagaagtgcagctggttgaatcaggcggaggactggttcagcctggcggatctctgagactgtcttgtgccgccagcggctacaccttcaccagctactggatgaactgggtccgacaggcccctggcaaaggactggaatgggtcggaatgatcgaccccagcgacagcgagacacactacaaccacatcttcaaggaccgcttcaccatcagcgccgacaccagcaagaataccgcctacctccagatgaactccctgagagccgaggacaccgccgtgtactactgcgccagaaacctgtatctgttcggccagggaaccctggtcacagtgtcatctacgcgtatccagaaccctgatcctgccgtgtaccagctgcgggatagcaagagcagcgacaagagcgtgtgtctgttcaccgacttcgacagccagaccaacgtgtcccagagcaaggactccgacgtgtacatcaccgataagtgcgtgctggacatgcggagcatggacttcaagagcaactccgccgtggcctggtccaacaagtccgatttcgcctgcgccaacgccttcaacaacagcattatccccgaggacacattcttcccaagccccgagagcagctgcgacgtgaagctggtggaaaagagcttcgagacagacaccaacctgaacttccagaacctgagcgtgatcggcttcagaatcctgctgctgaaagtggccggctttaacctgctgatgaccctgcggctgtggtccagc

SEQ ID NO: 37150 - DNA, 2706 bp, synthetic construct
  source 1..2706: mol_type = other DNA
atggccttaccagtgaccgccttgctcctgccgctggccttgctgctccacgccgccaggccgcaggttcagctgcaagagtctggccctggcctggtcaagcctagccaaacactgagcctgacctgtaccgtgtctggcggctctatcaccaccggcgagttctactggaactggttcagacagcctcctggcaaaggactggaatggatgggagccattgccgccagcggcagcacaacatacagccctagcttcgagagccggaccagcatcagcagagacaccagcaagaatcagttcagcctgaagctgagcagcgtgacagccgccgatacagccgtgtattactgcggcagatcctttggagtggccgccgtgacaaccggccagaatagaggacagggcaccctggtcacagtgtctagcggtaccggcggaggcggatctggcggcggaggtagcggtggcggaggatctgaattcgacatccagatgacacagagccctagcagcctgtctgccagcgtgggagacagagtgaccatcacatgcaagagcagccagagcctgctggactccgatggcaagacctacctgaactggtatcagcagaagcccggcaaggcccctaagctgctgatctacctggtgtccaagctggatagcggcgtgcccagcagattttctggcagcggcagcggaaccgacttcaccctgacaatatccagcctccagcctgaggacttcgccacctactactgcttccaaggcacccactttccatacaccttcggccagggcaccaaggtggaaatcaaaagactcgagatccagaaccctgatcctgccgtgtaccagctgcgggatagcaagagcagcgacaagagcgtgtgtctgttcaccgacttcgacagccagaccaacgtgtcccagagcaaggactccgacgtgtacatcaccgataagtgcgtgctggacatgcggagcatggacttcaagagcaactccgccgtggcctggtccaacaagtccgatttcgcctgcgccaacgccttcaacaacagcattatccccgaggacacattcttcccaagcagcgacgtgccctgcgacgtgaagctggtggaaaagagcttcgagacagacaccaacctgaacttccagaacctgagcgtgatcggcttcagaatcctgctgctgaaagtggccggctttaacctgctgatgaccctgcggctgtggtccagccgcgccaagagaagcggatctggcgtgaagcagaccctgaatttcgacctgctgaagctggctggcgacgtggaatccaacccaggccctactagtaccatggactggatttggcgcatccttttccttgtcggcgctgctaccggcgcccattccgggcccgaagtgcaactggttgaatccggtggcggcctggtgcaacccggcggatctctcagacttagctgtgccgcctccggcagaaccttcacaatgggatggtacaggcaggctccagggaaagagagagagttcgtcgccgccatctctctgtctcccacactggcctactacgccgactctgtgaaaggccggttcaccatctccagagataatagcaagaacaccgtggtgctgcaaatgaactctctgagagccgaggatacagccctgtactattgtgccgctgaccggaagtccgtgatgagcatcagacccgattactggggacagggcacactggtcacagtgtctagtggatccggcggcggaggatctggcggaggcggatctgggggcggaggctctttcgaagaagtgcagctggttgaatcaggcggaggactggttcagcctggcggatctctgagactgtcttgtgccgccagcggctacaccttcaccagctactggatgaactgggtccgacaggcccctggcaaaggactggaatgggtcggaatgatcgaccccagcgacagcgagacacactacaaccacatcttcaaggaccgcttcaccatcagcgccgacaccagcaagaataccgcctacctccagatgaactccctgagagccgaggacaccgccgtgtactactgcgccagaaacctgtatctgttcggccagggaaccctggtcacagtgtcatctacgcgtgaggacctgaagaacgtgttcccacctgaggtggccgtgttcgagcctagcaaggccgagatcgcccacacccagaaagccaccctcgtgtgcctggctaccggcttctaccccgaccatgtggaactgtcttggtgggtcaacggcaaagaggtgcacagcggcgtgtgtaccgacccccagccactgaaagaacagcccgccctgaacgacagccggtactgcctgagcagcagactgagagtgtccgccaccttctggcagaacccccggaaccacttcagatgccaggtgcagttctacggcctgagcgagaacgacgagtggacccaggacagagccaagcccgtgacccagatcgtgtctgccgaagcctggggcagagccgattgcggcatcaccagcgccagctaccaccagggcgtgctgagcgccaccatcctgtacgagatcctgctgggcaaggccaccctgtacgccgtgctggtgtctgccctggtgctgatggctatggtcaagcggaaggacagccgggga

SEQ ID NO: 37151 - DNA, 2295 bp, synthetic construct
  source 1..2295: mol_type = other DNA
atggccttaccagtgaccgccttgctcctgccgctggccttgctgctccacgccgccaggccgcaggttcagctgcaagagtctggccctggcctggtcaagcctagccaaacactgagcctgacctgtaccgtgtctggcggctctatcaccaccggcgagttctactggaactggttcagacagcctcctggcaaaggactggaatggatgggagccattgccgccagcggcagcacaacatacagccctagcttcgagagccggaccagcatcagcagagacaccagcaagaatcagttcagcctgaagctgagcagcgtgacagccgccgatacagccgtgtattactgcggcagatcctttggagtggccgccgtgacaaccggccagaatagaggacagggcaccctggtcacagtgtctagcggtaccggcggaggcggatctggcggcggaggtagcggtggcggaggatctgaattcgacatccagatgacacagagccctagcagcctgtctgccagcgtgggagacagagtgaccatcacatgcaagagcagccagagcctgctggactccgatggcaagacctacctgaactggtatcagcagaagcccggcaaggcccctaagctgctgatctacctggtgtccaagctggatagcggcgtgcccagcagattttctggcagcggcagcggaaccgacttcaccctgacaatatccagcctccagcctgaggacttcgccacctactactgcttccaaggcacccactttccatacaccttcggccagggcaccaaggtggaaatcaaaagactcgagatccagaaccctgatcctgccgtgtaccagctgcgggatagcaagagcagcgacaagagcgtgtgtctgttcaccgacttcgacagccagaccaacgtgtcccagagcaaggactccgacgtgtacatcaccgataagtgcgtgctggacatgcggagcatggacttcaagagcaactccgccgtggcctggtccaacaagtccgatttcgcctgcgccaacgccttcaacaacagcattatccccgaggacacattcttcccaagcagcgacgtgccctgcgacgtgaagctggtggaaaagagcttcgagacagacaccaacctgaacttccagaacctgagcgtgatcggcttcagaatcctgctgctgaaagtggccggctttaacctgctgatgaccctgcggctgtggtccagccgcgccaagagaagcggatctggcgtgaagcagaccctgaatttcgacctgctgaagctggctggcgacgtggaatccaacccaggccctactagtaccatggactggatttggcgcatccttttccttgtcggcgctgctaccggcgcccattccttcgaagaagtgcagctggttgaatcaggcggaggactggttcagcctggcggatctctgagactgtcttgtgccgccagcggctacaccttcaccagctactggatgaactgggtccgacaggcccctggcaaaggactggaatgggtcggaatgatcgaccccagcgacagcgagacacactacaaccacatcttcaaggaccgcttcaccatcagcgccgacaccagcaagaataccgcctacctccagatgaactccctgagagccgaggacaccgccgtgtactactgcgccagaaacctgtatctgttcggccagggaaccctggtcacagtgtcatctacgcgtgaggacctgaagaacgtgttcccacctgaggtggccgtgttcgagcctagcaaggccgagatcgcccacacccagaaagccaccctcgtgtgcctggctaccggcttctaccccgaccatgtggaactgtcttggtgggtcaacggcaaagaggtgcacagcggcgtgtgtaccgacccccagccactgaaagaacagcccgccctgaacgacagccggtactgcctgagcagcagactgagagtgtccgccaccttctggcagaacccccggaaccacttcagatgccaggtgcagttctacggcctgagcgagaacgacgagtggacccaggacagagccaagcccgtgacccagatcgtgtctgccgaagcctggggcagagccgattgcggcatcaccagcgccagctaccaccagggcgtgctgagcgccaccatcctgtacgagatcctgctgggcaaggccaccctgtacgccgtgctggtgtctgccctggtgctgatggctatggtcaagcggaaggacagccgggga

SEQ ID NO: 37152 - DNA, 2694 bp, synthetic construct
  source 1..2694: mol_type = other DNA
atggccttaccagtgaccgccttgctcctgccgctggccttgctgctccacgccgccaggccggaagtgcagctggttgaatctggcggaggactggttcaggctggcggatctctgagactgtcttgtgccgccagcggcagaacctttagcatgggctggtttagacaggcccctggcaaagagagagagttcgtcgccgccatcacatactctggcggcagcccttactacgccgactctgtgaagggcagattcaccatcagccgggacaacgccaagaacaccgtgtacctccagatgaacagcctgaagcctgaggacaccgccgtgtactactgcgccgccaatccaacatacggcagcgactggaacgccgagaattggggccagggaacccaagtgacagtgtctagcggtaccggcggaggcggatctggcggcggaggtagcggtggcggaggatctgaattcgacatccagatgacacagagccctagcagcctgtctgccagcgtgggagacagagtgaccatcacatgcaagagcagccagagcctgctggactccgatggcaagacctacctgaactggtatcagcagaagcccggcaaggcccctaagctgctgatctacctggtgtccaagctggatagcggcgtgcccagcagattttctggcagcggcagcggaaccgacttcaccctgacaatatccagcctccagcctgaggacttcgccacctactactgcttccaaggcacccactttccatacaccttcggccagggcaccaaggtggaaatcaaaagactcgaggacctgaagaacgtgttcccacctgaggtggccgtgttcgagcctagcgaggccgagatcagccacacccagaaagccaccctcgtgtgcctggctaccggcttctaccccgaccatgtggaactgtcttggtgggtcaacggcaaagaggtgcacagcggcgtgtgtaccgacccccagccactgaaagaacagcccgccctgaacgacagccggtactgcctgagcagcagactgagagtgtccgccaccttctggcagaacccccggaaccacttcagatgccaggtgcagttctacggcctgagcgagaacgacgagtggacccaggacagagccaagcccgtgacccagatcgtgtctgccgaagcctggggcagagccgattgcggctttaccagcgagagctaccagcagggcgtgctgagcgccaccatcctgtacgagatcctgctgggcaaggccaccctgtacgccgtgctggtgtctgccctggtgctgatggctatggtcaagcggaaggacagccggggaagggccaagcgatctggatctggagcaacaaacttctcactactcaaacaagcaggtgacgtggaggagaatcccgggcctactagtaccatggactggatttggcgcatccttttccttgtcggcgctgctaccggcgcccattccgggccccaggtgcagctccaagaaagcggacccggactggttaagccctctcagaccctgtctctgacctgcacagttagcggagccagcattaccacaggcgagtattattggaattggtttcggcagccaccaggcaaggggcttgagtggatgggtgctattgctgcctctggcagcaccacctactctcccagctttgagagcagaacctccatcagccgggacacctccaaaaaccagttctctctgaagctgtcctccgtgaccgctgctgacaccgccgtctattattgtggccggtctttcggcgtggcagctgtgaccacaggacagaacagaggccagggaacacttgtgaccgtgtcctctggatccggcggcggaggatctggcggaggcggatctgggggcggaggctctttcgaagaagtgcagctggttgaatcaggcggaggactggttcagcctggcggatctctgagactgtcttgtgccgccagcggctacaccttcaccagctactggatgaactgggtccgacaggcccctggcaaaggactggaatgggtcggaatgatcgaccccagcgacagcgagacacactacaaccacatcttcaaggaccgcttcaccatcagcgccgacaccagcaagaataccgcctacctccagatgaactccctgagagccgaggacaccgccgtgtactactgcgccagaaacctgtatctgttcggccagggaaccctggtcacagtgtcatctacgcgtatccagaaccctgatcctgccgtgtaccagctgcgggatagcaagagcagcgacaagagcgtgtgtctgttcaccgacttcgacagccagaccaacgtgtcccagagcaaggactccgacgtgtacatcaccgataagtgcgtgctggacatgcggagcatggacttcaagagcaactccgccgtggcctggtccaacaagtccgatttcgcctgcgccaacgccttcaacaacagcattatccccgaggacacattcttcccaagccccgagagcagctgcgacgtgaagctggtggaaaagagcttcgagacagacaccaacctgaacttccagaacctgagcgtgatcggcttcagaatcctgctgctgaaagtggccggctttaacctgctgatgaccctgcggctgtggtccagc

SEQ ID NO: 37153 - DNA, 2715 bp, synthetic construct
  source 1..2715: mol_type = other DNA
atggccttaccagtgaccgccttgctcctgccgctggccttgctgctccacgccgccaggccggaagtgcagctggttgaatctggcggaggactggttcaggctggcggatctctgagactgtcttgtgccgccagcggcagaacctttagcatgggctggtttagacaggcccctggcaaagagagagagttcgtcgccgccatcacatactctggcggcagcccttactacgccgactctgtgaagggcagattcaccatcagccgggacaacgccaagaacaccgtgtacctccagatgaacagcctgaagcctgaggacaccgccgtgtactactgcgccgccaatccaacatacggcagcgactggaacgccgagaattggggccagggaacccaagtgacagtgtctagcggtaccggcggaggcggatctggcggcggaggtagcggtggcggaggatctgaattcgacatccagatgacacagagccctagcagcctgtctgccagcgtgggagacagagtgaccatcacatgcaagagcagccagagcctgctggactccgatggcaagacctacctgaactggtatcagcagaagcccggcaaggcccctaagctgctgatctacctggtgtccaagctggatagcggcgtgcccagcagattttctggcagcggcagcggaaccgacttcaccctgacaatatccagcctccagcctgaggacttcgccacctactactgcttccaaggcacccactttccatacaccttcggccagggcaccaaggtggaaatcaaaagactcgagatccagaaccctgatcctgccgtgtaccagctgcgggatagcaagagcagcgacaagagcgtgtgtctgttcaccgacttcgacagccagaccaacgtgtcccagagcaaggactccgacgtgtacatcaccgataagtgcgtgctggacatgcggagcatggacttcaagagcaactccgccgtggcctggtccaacaagtccgatttcgcctgcgccaacgccttcaacaacagcattatccccgaggacacattcttcccaagcagcgacgtgccctgcgacgtgaagctggtggaaaagagcttcgagacagacaccaacctgaacttccagaacctgagcgtgatcggcttcagaatcctgctgctgaaagtggccggctttaacctgctgatgaccctgcggctgtggtccagccgcgccaagagaagcggatctggcgtgaagcagaccctgaatttcgacctgctgaagctggctggcgacgtggaatccaacccaggccctactagtaccatggactggatttggcgcatccttttccttgtcggcgctgctaccggcgcccattccgggccccaggtgcagctggttgaatctggcggaggactggttcagcctggcggatctctgagactgtcttgtgccgccagcggcaacatcaacagcagaaactgcatgggctggttcagacaggcccctggcaagggaagagaaggcgtggcagctatcggccaagtgaccggcagaacctactacgtggacagcgtgaagggcagattcaccatcagcctggacaacagcaagaacaccctgtacctccagatgaacagcctgagagccgaggacaccgccgtgtactattgtgctgctgcccctggctgtctgctgtctgcacttagaagcgccgactacagaaactggggccagggcacactggtcaccgtttcttctggatccggcggcggaggatctggcggaggcggatctgggggcggaggctctttcgaagaagtgcagctggttgaatcaggcggaggactggttcagcctggcggatctctgagactgtcttgtgccgccagcggctacaccttcaccagctactggatgaactgggtccgacaggcccctggcaaaggactggaatgggtcggaatgatcgaccccagcgacagcgagacacactacaaccacatcttcaaggaccgcttcaccatcagcgccgacaccagcaagaataccgcctacctccagatgaactccctgagagccgaggacaccgccgtgtactactgcgccagaaacctgtatctgttcggccagggaaccctggtcacagtgtcatctacgcgtgaggacctgaagaacgtgttcccacctgaggtggccgtgttcgagcctagcaaggccgagatcgcccacacccagaaagccaccctcgtgtgcctggctaccggcttctaccccgaccatgtggaactgtcttggtgggtcaacggcaaagaggtgcacagcggcgtgtgtaccgacccccagccactgaaagaacagcccgccctgaacgacagccggtactgcctgagcagcagactgagagtgtccgccaccttctggcagaacccccggaaccacttcagatgccaggtgcagttctacggcctgagcgagaacgacgagtggacccaggacagagccaagcccgtgacccagatcgtgtctgccgaagcctggggcagagccgattgcggcatcaccagcgccagctaccaccagggcgtgctgagcgccaccatcctgtacgagatcctgctgggcaaggccaccctgtacgccgtgctggtgtctgccctggtgctgatggctatggtcaagcggaaggacagccgggga

SEQ ID NO: 37154 - DNA, 2703 bp, synthetic construct
  source 1..2703: mol_type = other DNA
atggccttaccagtgaccgccttgctcctgccgctggccttgctgctccacgccgccaggccggaagtgcagctggttgaatctggcggaggactggttcaggctggcggatctctgagactgtcttgtgccgccagcggcagaacctttagcatgggctggtttagacaggcccctggcaaagagagagagttcgtcgccgccatcacatactctggcggcagcccttactacgccgactctgtgaagggcagattcaccatcagccgggacaacgccaagaacaccgtgtacctccagatgaacagcctgaagcctgaggacaccgccgtgtactactgcgccgccaatccaacatacggcagcgactggaacgccgagaattggggccagggaacccaagtgacagtgtctagcggtaccggcggaggcggatctggcggcggaggtagcggtggcggaggatctgaattcgacatccagatgacacagagccctagcagcctgtctgccagcgtgggagacagagtgaccatcacatgcaagagcagccagagcctgctggactccgatggcaagacctacctgaactggtatcagcagaagcccggcaaggcccctaagctgctgatctacctggtgtccaagctggatagcggcgtgcccagcagattttctggcagcggcagcggaaccgacttcaccctgacaatatccagcctccagcctgaggacttcgccacctactactgcttccaaggcacccactttccatacaccttcggccagggcaccaaggtggaaatcaaaagactcgaggacctgaagaacgtgttcccacctgaggtggccgtgttcgagcctagcgaggccgagatcagccacacccagaaagccaccctcgtgtgcctggctaccggcttctaccccgaccatgtggaactgtcttggtgggtcaacggcaaagaggtgcacagcggcgtgtgtaccgacccccagccactgaaagaacagcccgccctgaacgacagccggtactgcctgagcagcagactgagagtgtccgccaccttctggcagaacccccggaaccacttcagatgccaggtgcagttctacggcctgagcgagaacgacgagtggacccaggacagagccaagcccgtgacccagatcgtgtctgccgaagcctggggcagagccgattgcggctttaccagcgagagctaccagcagggcgtgctgagcgccaccatcctgtacgagatcctgctgggcaaggccaccctgtacgccgtgctggtgtctgccctggtgctgatggctatggtcaagcggaaggacagccggggaagggccaagcgatctggatctggagcaacaaacttctcactactcaaacaagcaggtgacgtggaggagaatcccgggcctactagtaccatggactggatttggcgcatccttttccttgtcggcgctgctaccggcgcccattccgggccccaggtgcagctggttgaatctggcggaggactggttcagcctggcggatctctgagactgtcttgtgccgccagcggcaacatcaacagcagaaactgcatgggctggttcagacaggcccctggcaagggaagagaaggcgtggcagctatcggccaagtgaccggcagaacctactacgtggacagcgtgaagggcagattcaccatcagcctggacaacagcaagaacaccctgtacctccagatgaacagcctgagagccgaggacaccgccgtgtactattgtgctgctgcccctggctgtctgctgtctgcacttagaagcgccgactacagaaactggggccagggcacactggtcaccgtttcttctggatccggcggcggaggatctggcggaggcggatctgggggcggaggctctttcgaagaagtgcagctggttgaatcaggcggaggactggttcagcctggcggatctctgagactgtcttgtgccgccagcggctacaccttcaccagctactggatgaactgggtccgacaggcccctggcaaaggactggaatgggtcggaatgatcgaccccagcgacagcgagacacactacaaccacatcttcaaggaccgcttcaccatcagcgccgacaccagcaagaataccgcctacctccagatgaactccctgagagccgaggacaccgccgtgtactactgcgccagaaacctgtatctgttcggccagggaaccctggtcacagtgtcatctacgcgtatccagaaccctgatcctgccgtgtaccagctgcgggatagcaagagcagcgacaagagcgtgtgtctgttcaccgacttcgacagccagaccaacgtgtcccagagcaaggactccgacgtgtacatcaccgataagtgcgtgctggacatgcggagcatggacttcaagagcaactccgccgtggcctggtccaacaagtccgatttcgcctgcgccaacgccttcaacaacagcattatccccgaggacacattcttcccaagccccgagagcagctgcgacgtgaagctggtggaaaagagcttcgagacagacaccaacctgaacttccagaacctgagcgtgatcggcttcagaatcctgctgctgaaagtggccggctttaacctgctgatgaccctgcggctgtggtccagc

SEQ ID NO: 37155 - DNA, 2703 bp, synthetic construct
  source 1..2703: mol_type = other DNA
atggccttaccagtgaccgccttgctcctgccgctggccttgctgctccacgccgccaggccggaagtgcaactggttgaatccggtggcggcctggtgcaagcaggcggatctctcagacttagctgtgccgcctccggcagaaccttcacaatgggatggtttaggcaggctccagggaaagagagagagttcgtcgccgccatctctctgtctcccacactggcctactacgccgactctgtgaaaggccggttcaccatctccagagataatgccaagaacaccgtggtgctgcaaatgaactctctgaaacccgaggatacagccctgtactattgtgccgctgaccggaagtccgtgatgagcatcagacccgattactggggacagggcacacaagtcacagtgtcctctggtaccggcggaggcggatctggcggcggaggtagcggtggcggaggatctgaattcgacatccagatgacacagagccctagcagcctgtctgccagcgtgggagacagagtgaccatcacatgcaagagcagccagagcctgctggactccgatggcaagacctacctgaactggtatcagcagaagcccggcaaggcccctaagctgctgatctacctggtgtccaagctggatagcggcgtgcccagcagattttctggcagcggcagcggaaccgacttcaccctgacaatatccagcctccagcctgaggacttcgccacctactactgcttccaaggcacccactttccatacaccttcggccagggcaccaaggtggaaatcaaaagactcgaggacctgaagaacgtgttcccacctgaggtggccgtgttcgagcctagcgaggccgagatcagccacacccagaaagccaccctcgtgtgcctggctaccggcttctaccccgaccatgtggaactgtcttggtgggtcaacggcaaagaggtgcacagcggcgtgtgtaccgacccccagccactgaaagaacagcccgccctgaacgacagccggtactgcctgagcagcagactgagagtgtccgccaccttctggcagaacccccggaaccacttcagatgccaggtgcagttctacggcctgagcgagaacgacgagtggacccaggacagagccaagcccgtgacccagatcgtgtctgccgaagcctggggcagagccgattgcggctttaccagcgagagctaccagcagggcgtgctgagcgccaccatcctgtacgagatcctgctgggcaaggccaccctgtacgccgtgctggtgtctgccctggtgctgatggctatggtcaagcggaaggacagccggggaagggccaagcgatctggatctggagcaacaaacttctcactactcaaacaagcaggtgacgtggaggagaatcccgggcctactagtaccatggactggatttggcgcatccttttccttgtcggcgctgctaccggcgcccattccgggccccaggtgcagctggttgaatctggcggaggactggttcagcctggcggatctctgagactgtcttgtgccgccagcggcaacatcaacagcagaaactgcatgggctggttcagacaggcccctggcaagggaagagaaggcgtggcagctatcggccaagtgaccggcagaacctactacgtggacagcgtgaagggcagattcaccatcagcctggacaacagcaagaacaccctgtacctccagatgaacagcctgagagccgaggacaccgccgtgtactattgtgctgctgcccctggctgtctgctgtctgcacttagaagcgccgactacagaaactggggccagggcacactggtcaccgtttcttctggatccggcggcggaggatctggcggaggcggatctgggggcggaggctctttcgaagaagtgcagctggttgaatcaggcggaggactggttcagcctggcggatctctgagactgtcttgtgccgccagcggctacaccttcaccagctactggatgaactgggtccgacaggcccctggcaaaggactggaatgggtcggaatgatcgaccccagcgacagcgagacacactacaaccacatcttcaaggaccgcttcaccatcagcgccgacaccagcaagaataccgcctacctccagatgaactccctgagagccgaggacaccgccgtgtactactgcgccagaaacctgtatctgttcggccagggaaccctggtcacagtgtcatctacgcgtatccagaaccctgatcctgccgtgtaccagctgcgggatagcaagagcagcgacaagagcgtgtgtctgttcaccgacttcgacagccagaccaacgtgtcccagagcaaggactccgacgtgtacatcaccgataagtgcgtgctggacatgcggagcatggacttcaagagcaactccgccgtggcctggtccaacaagtccgatttcgcctgcgccaacgccttcaacaacagcattatccccgaggacacattcttcccaagccccgagagcagctgcgacgtgaagctggtggaaaagagcttcgagacagacaccaacctgaacttccagaacctgagcgtgatcggcttcagaatcctgctgctgaaagtggccggctttaacctgctgatgaccctgcggctgtggtccagc

SEQ ID NO: 37156 - DNA, 2715 bp, synthetic construct
  source 1..2715: mol_type = other DNA
atggccttaccagtgaccgccttgctcctgccgctggccttgctgctccacgccgccaggccgcaggttcagctgcaagagtctggccctggcctggtcaagcctagccaaacactgagcctgacctgtaccgtgtctggcggctctatcaccaccggcgagttctactggaactggttcagacagcctcctggcaaaggactggaatggatgggagccattgccgccagcggcagcacaacatacagccctagcttcgagagccggaccagcatcagcagagacaccagcaagaatcagttcagcctgaagctgagcagcgtgacagccgccgatacagccgtgtattactgcggcagatcctttggagtggccgccgtgacaaccggccagaatagaggacagggcaccctggtcacagtgtctagcggtaccggcggaggcggatctggcggcggaggtagcggtggcggaggatctgaattcgacatccagatgacacagagccctagcagcctgtctgccagcgtgggagacagagtgaccatcacatgcaagagcagccagagcctgctggactccgatggcaagacctacctgaactggtatcagcagaagcccggcaaggcccctaagctgctgatctacctggtgtccaagctggatagcggcgtgcccagcagattttctggcagcggcagcggaaccgacttcaccctgacaatatccagcctccagcctgaggacttcgccacctactactgcttccaaggcacccactttccatacaccttcggccagggcaccaaggtggaaatcaaaagactcgaggacctgaagaacgtgttcccacctgaggtggccgtgttcgagcctagcgaggccgagatcagccacacccagaaagccaccctcgtgtgcctggctaccggcttctaccccgaccatgtggaactgtcttggtgggtcaacggcaaagaggtgcacagcggcgtgtgtaccgacccccagccactgaaagaacagcccgccctgaacgacagccggtactgcctgagcagcagactgagagtgtccgccaccttctggcagaacccccggaaccacttcagatgccaggtgcagttctacggcctgagcgagaacgacgagtggacccaggacagagccaagcccgtgacccagatcgtgtctgccgaagcctggggcagagccgattgcggctttaccagcgagagctaccagcagggcgtgctgagcgccaccatcctgtacgagatcctgctgggcaaggccaccctgtacgccgtgctggtgtctgccctggtgctgatggctatggtcaagcggaaggacagccggggaagggccaagcgatctggatctggagcaacaaacttctcactactcaaacaagcaggtgacgtggaggagaatcccgggcctactagtaccatggactggatttggcgcatccttttccttgtcggcgctgctaccggcgcccattccgggccccaggtgcagctggttgaatctggcggaggactggttcagcctggcggatctctgagactgtcttgtgccgccagcggcaacatcaacagcagaaactgcatgggctggttcagacaggcccctggcaagggaagagaaggcgtggcagctatcggccaagtgaccggcagaacctactacgtggacagcgtgaagggcagattcaccatcagcctggacaacagcaagaacaccctgtacctccagatgaacagcctgagagccgaggacaccgccgtgtactattgtgctgctgcccctggctgtctgctgtctgcacttagaagcgccgactacagaaactggggccagggcacactggtcaccgtttcttctggatccggcggcggaggatctggcggaggcggatctgggggcggaggctctttcgaagaagtgcagctggttgaatcaggcggaggactggttcagcctggcggatctctgagactgtcttgtgccgccagcggctacaccttcaccagctactggatgaactgggtccgacaggcccctggcaaaggactggaatgggtcggaatgatcgaccccagcgacagcgagacacactacaaccacatcttcaaggaccgcttcaccatcagcgccgacaccagcaagaataccgcctacctccagatgaactccctgagagccgaggacaccgccgtgtactactgcgccagaaacctgtatctgttcggccagggaaccctggtcacagtgtcatctacgcgtatccagaaccctgatcctgccgtgtaccagctgcgggatagcaagagcagcgacaagagcgtgtgtctgttcaccgacttcgacagccagaccaacgtgtcccagagcaaggactccgacgtgtacatcaccgataagtgcgtgctggacatgcggagcatggacttcaagagcaactccgccgtggcctggtccaacaagtccgatttcgcctgcgccaacgccttcaacaacagcattatccccgaggacacattcttcccaagccccgagagcagctgcgacgtgaagctggtggaaaagagcttcgagacagacaccaacctgaacttccagaacctgagcgtgatcggcttcagaatcctgctgctgaaagtggccggctttaacctgctgatgaccctgcggctgtggtccagc

SEQ ID NO: 37157 - DNA, 1452 bp, synthetic construct
  source 1..1452: mol_type = other DNA
atggccttaccagtgaccgccttgctcctgccgctggccttgctgctccacgccgccaggccggacatccagatgacacagagccctagcagcctgtctgccagcgtgggagacagagtgaccatcacatgcaagagcagccagagcctgctggactccgatggcaagacctacctgaactggtatcagcagaagcccggcaaggcccctaagctgctgatctacctggtgtccaagctggatagcggcgtgcccagcagattttctggcagcggcagcggaaccgacttcaccctgacaatatccagcctccagcctgaggacttcgccacctactactgcttccaaggcacccactttccatacaccttcggccagggcaccaaggtggaaatcaaaagaggcggaggcggaagtggaggcggaggatctggcggcggaggctctgaagtgcagctggttgaatcaggcggaggactggttcagcctggcggatctctgagactgtcttgtgccgccagcggctacaccttcaccaactactggatgaactgggtccgacaggcccctggcaaaggactggaatgggtcggaatgatcgaccccagcgacagcgagacacactacaaccacatcttcaaggaccgcttcaccatcagcgccgacaccagcaagaataccgcctacctccagatgaactccctgagagccgaggacaccgccgtgtactactgcgccagaaacctgtatctgtggggccagggaaccctggtcacagtgtcatctacgcgtaaaattgaagttatgtatcctcctccttacctagacaatgagaagagcaatggaaccattatccatgtgaaagggaaacacctttgtccaagtcccctatttcccggaccttctaagcccttttgggtgctggtggtggttgggggagtcctggcttgctatagcttgctagtaacagtggcctttattattttctgggtgaggagtaagaggagcaggctcctgcacagtgactacatgaacatgactccacgccgccccggacccacccgcaagcattaccagccctatgccccaccacgcgacttcgcagcctatcgctccagagtgaagttcagcaggagcgcagacgcccccgcgtaccagcagggccagaaccagctctataacgagctcaatctaggacgaagagaggagtacgatgttttggacaagagacgtggccgggaccctgagatggggggaaagccgagaaggaagaaccctcaggaaggcctgtacaatgaactgcagaaagataagatggcggaggcctacagtgagattgggatgaaaggcgagcgccggaggggcaaggggcacgatggcctttaccagggtctcagtacagccaccaaggacacctacgacgcccttcacatgcaggccctgccccctcgc

SEQ ID NO: 37158 - DNA, 1470 bp, synthetic construct
  source 1..1470: mol_type = other DNA
atggccttaccagtgaccgccttgctcctgccgctggccttgctgctccacgccgccaggccggacatccagatgacacagagccctagcagcctgtctgccagcgtgggagacagagtgaccatcacatgcaagagcagccagagcctgctggactccgatggcaagacctacctgaactggtatcagcagaagcccggcaaggcccctaagctgctgatctacctggtgtccaagctggatagcggcgtgcccagcagattttctggcagcggcagcggaaccgacttcaccctgacaatatccagcctccagcctgaggacttcgccacctactactgcttccaaggcacccactttccatacaccttcggccagggcaccaaggtggaaatcaaaagaggcggaggcggaagtggaggcggaggatctggcggcggaggctctgaagtgcagctggttgaatcaggcggaggactggttcagcctggcggatctctgagactgtcttgtgccgccagcggctacaccttcaccaactactggatgaactgggtccgacaggcccctggcaaaggactggaatgggtcggaatgatcgaccccagcgacagcgagacacactacaaccacatcttcaaggaccgcttcaccatcagcgccgacaccagcaagaataccgcctacctccagatgaactccctgagagccgaggacaccgccgtgtactactgcgccagaaacctgtatctgtggggccagggaaccctggtcacagtgtcatctacgcgtgcgaagcccaccacgacgccagcgccgcgaccaccaacaccggcgcccaccatcgcgtcgcagcccctgtccctgcgcccagaggcgtgccggccagcggcggggggcgcagtgcacacgagggggctggacttcgcctgtgacatctacatctgggcgcccttggccgggacttgtggggtccttctcctgtcactggttatcaccctttactgcaaacggggcagaaagaaactcctgtatatattcaaacaaccatttatgagaccagtacaaactactcaagaggaagatggctgtagctgccgatttccagaagaagaagaaggaggatgtgaactgagagtgaagttcagcaggagcgcagacgcccccgcgtaccagcagggccagaaccagctctataacgagctgaatctaggacgaagagaggagtacgatgttttggacaagagacgtggccgggaccctgagatggggggaaagccgagaaggaagaaccctcaggaaggcctgtacaatgaactgcagaaagataagatggcggaggcctacagtgagattgggatgaaaggcgagcgccggaggggcaaggggcacgatggcctttaccagggtctcagtacagccaccaaggacacctacgacgcccttcacatgcaggccctgccccctcgc

SEQ ID NO: 37159 - DNA, 1470 bp, synthetic construct
  source 1..1470: mol_type = other DNA
atggccttaccagtgaccgccttgctcctgccgctggccttgctgctccacgccgccaggccggaagtgcagctggttgaatcaggcggaggactggttcagcctggcggatctctgagactgtcttgtgccgccagcggctacaccttcaccaactactggatgaactgggtccgacaggcccctggcaaaggactggaatgggtcggaatgatcgaccccagcgacagcgagacacactacaaccacatcttcaaggaccgcttcaccatcagcgccgacaccagcaagaataccgcctacctccagatgaactccctgagagccgaggacaccgccgtgtactactgcgccagaaacctgtatctgtggggccagggaaccctggtcacagtgtcatctggcggaggcggaagtggaggcggaggatctggcggcggaggctctgacatccagatgacacagagccctagcagcctgtctgccagcgtgggagacagagtgaccatcacatgcaagagcagccagagcctgctggactccgatggcaagacctacctgaactggtatcagcagaagcccggcaaggcccctaagctgctgatctacctggtgtccaagctggatagcggcgtgcccagcagattttctggcagcggcagcggaaccgacttcaccctgacaatatccagcctccagcctgaggacttcgccacctactactgcttccaaggcacccactttccatacaccttcggccagggcaccaaggtggaaatcaaaagaacgcgtgcgaagcccaccacgacgccagcgccgcgaccaccaacaccggcgcccaccatcgcgtcgcagcccctgtccctgcgcccagaggcgtgccggccagcggcggggggcgcagtgcacacgagggggctggacttcgcctgtgacatctacatctgggcgcccttggccgggacttgtggggtccttctcctgtcactggttatcaccctttactgcaaacggggcagaaagaaactcctgtatatattcaaacaaccatttatgagaccagtacaaactactcaagaggaagatggctgtagctgccgatttccagaagaagaagaaggaggatgtgaactgagagtgaagttcagcaggagcgcagacgcccccgcgtaccagcagggccagaaccagctctataacgagctgaatctaggacgaagagaggagtacgatgttttggacaagagacgtggccgggaccctgagatggggggaaagccgagaaggaagaaccctcaggaaggcctgtacaatgaactgcagaaagataagatggcggaggcctacagtgagattgggatgaaaggcgagcgccggaggggcaaggggcacgatggcctttaccagggtctcagtacagccaccaaggacacctacgacgcccttcacatgcaggccctgccccctcgc

SEQ ID NO: 37160 - DNA, 1869 bp, synthetic construct
  source 1..1869: mol_type = other DNA
atggccttaccagtgaccgccttgctcctgccgctggccttgctgctccacgccgccaggccggacatccagatgacacagagccctagcagcctgtctgccagcgtgggagacagagtgaccatcacatgcaagagcagccagagcctgctggactccgatggcaagacctacctgaactggtatcagcagaagcccggcaaggcccctaagctgctgatctacctggtgtccaagctggatagcggcgtgcccagcagattttctggcagcggcagcggaaccgacttcaccctgacaatatccagcctccagcctgaggacttcgccacctactactgcttccaaggcacccactttccatacaccttcggccagggcaccaaggtggaaatcaaaagactcgagatccagaaccctgatcctgccgtgtaccagctgcgggatagcaagagcagcgacaagagcgtgtgtctgttcaccgacttcgacagccagaccaacgtgtcccagagcaaggactccgacgtgtacatcaccgataagtgcgtgctggacatgcggagcatggacttcaagagcaactccgccgtggcctggtccaacaagtccgatttcgcctgcgccaacgccttcaacaacagcattatccccgaggacacattcttcccaagcagcgacgtgccctgcgacgtgaagctggtggaaaagagcttcgagacagacaccaacctgaacttccagaacctgagcgtgatcggcttcagaatcctgctgctgaaagtggccggctttaacctgctgatgaccctgcggctgtggtccagccgcgccaagagaagcggatctggcgtgaagcagaccctgaatttcgacctgctgaagctggctggcgacgtggaatccaacccaggccctactagtatggactggatttggcgcatccttttccttgtcggcgctgctaccggcgcgcattccttcgaagaagtgcagctggttgaatcaggcggaggactggttcagcctggcggatctctgagactgtcttgtgccgccagcggctacaccttcaccaactactggatgaactgggtccgacaggcccctggcaaaggactggaatgggtcggaatgatcgaccccagcgacagcgagacacactacaaccacatcttcaaggaccgcttcaccatcagcgccgacaccagcaagaataccgcctacctccagatgaactccctgagagccgaggacaccgccgtgtactactgcgccagaaacctgtatctgtggggccagggaaccctggtcacagtgtcatctacgcgtgaggacctgaagaacgtgttcccacctgaggtggccgtgttcgagcctagcaaggccgagatcgcccacacccagaaagccaccctcgtgtgcctggctaccggcttctaccccgaccatgtggaactgtcttggtgggtcaacggcaaagaggtgcacagcggcgtgtgtaccgacccccagccactgaaagaacagcccgccctgaacgacagccggtactgcctgagcagcagactgagagtgtccgccaccttctggcagaacccccggaaccacttcagatgccaggtgcagttctacggcctgagcgagaacgacgagtggacccaggacagagccaagcccgtgacccagatcgtgtctgccgaagcctggggcagagccgattgcggcatcaccagcgccagctaccaccagggcgtgctgagcgccaccatcctgtacgagatcctgctgggcaaggccaccctgtacgccgtgctggtgtctgccctggtgctgatggctatggtcaagcggaaggacagccgggga

SEQ ID NO: 37161 - DNA, 1857 bp, synthetic construct
  source 1..1857: mol_type = other DNA
atggccttaccagtgaccgccttgctcctgccgctggccttgctgctccacgccgccaggccggacatccagatgacacagagccctagcagcctgtctgccagcgtgggagacagagtgaccatcacatgcaagagcagccagagcctgctggactccgatggcaagacctacctgaactggtatcagcagaagcccggcaaggcccctaagctgctgatctacctggtgtccaagctggatagcggcgtgcccagcagattttctggcagcggcagcggaaccgacttcaccctgacaatatccagcctccagcctgaggacttcgccacctactactgcttccaaggcacccactttccatacaccttcggccagggcaccaaggtggaaatcaaaagactcgaggacctgaagaacgtgttcccacctgaggtggccgtgttcgagcctagcaaggccgagatcgcccacacccagaaagccaccctcgtgtgcctggctaccggcttctaccccgaccatgtggaactgtcttggtgggtcaacggcaaagaggtgcacagcggcgtgtgtaccgacccccagccactgaaagaacagcccgccctgaacgacagccggtactgcctgagcagcagactgagagtgtccgccaccttctggcagaacccccggaaccacttcagatgccaggtgcagttctacggcctgagcgagaacgacgagtggacccaggacagagccaagcccgtgacccagatcgtgtctgccgaagcctggggcagagccgattgcggcatcaccagcgccagctaccaccagggcgtgctgagcgccaccatcctgtacgagatcctgctgggcaaggccaccctgtacgccgtgctggtgtctgccctggtgctgatggctatggtcaagcggaaggacagccggggaagggccaagcgatctggatctggagcaacaaacttctcactactcaaacaagcaggtgacgtggaggagaatcccgggcctactagtatggactggatttggcgcatccttttccttgtcggcgctgctaccggcgcgcattccttcgaagaagtgcagctggttgaatcaggcggaggactggttcagcctggcggatctctgagactgtcttgtgccgccagcggctacaccttcaccaactactggatgaactgggtccgacaggcccctggcaaaggactggaatgggtcggaatgatcgaccccagcgacagcgagacacactacaaccacatcttcaaggaccgcttcaccatcagcgccgacaccagcaagaataccgcctacctccagatgaactccctgagagccgaggacaccgccgtgtactactgcgccagaaacctgtatctgtggggccagggaaccctggtcacagtgtcatctacgcgtatccagaaccctgatcctgccgtgtaccagctgcgggatagcaagagcagcgacaagagcgtgtgtctgttcaccgacttcgacagccagaccaacgtgtcccagagcaaggactccgacgtgtacatcaccgataagtgcgtgctggacatgcggagcatggacttcaagagcaactccgccgtggcctggtccaacaagtccgatttcgcctgcgccaacgccttcaacaacagcattatccccgaggacacattcttcccaagcagcgacgtgccctgcgacgtgaagctggtggaaaagagcttcgagacagacaccaacctgaacttccagaacctgagcgtgatcggcttcagaatcctgctgctgaaagtggccggctttaacctgctgatgaccctgcggctgtggtccagc

SEQ ID NO: 37162 - DNA, 1857 bp, synthetic construct
  source 1..1857: mol_type = other DNA
atggccttaccagtgaccgccttgctcctgccgctggccttgctgctccacgccgccaggccggacatccagatgacacagagccctagcagcctgtctgccagcgtgggagacagagtgaccatcacatgcaagagcagccagagcctgctggactccgatggcaagacctacctgaactggtatcagcagaagcccggcaaggcccctaagctgctgatctacctggtgtccaagctggatagcggcgtgcccagcagattttctggcagcggcagcggaaccgacttcaccctgacaatatccagcctccagcctgaggacttcgccacctactactgcttccaaggcacccactttccatacaccttcggccagggcaccaaggtggaaatcaaaagactcgaggacctgaagaacgtgttcccacctgaggtggccgtgttcgagcctagcgaggccgagatcagccacacccagaaagccaccctcgtgtgcctggctaccggcttctaccccgaccatgtggaactgtcttggtgggtcaacggcaaagaggtgcacagcggcgtgtgtaccgacccccagccactgaaagaacagcccgccctgaacgacagccggtactgcctgagcagcagactgagagtgtccgccaccttctggcagaacccccggaaccacttcagatgccaggtgcagttctacggcctgagcgagaacgacgagtggacccaggacagagccaagcccgtgacccagatcgtgtctgccgaagcctggggcagagccgattgcggctttaccagcgagagctaccagcagggcgtgctgagcgccaccatcctgtacgagatcctgctgggcaaggccaccctgtacgccgtgctggtgtctgccctggtgctgatggctatggtcaagcggaaggacagccggggaagggccaagcgatctggatctggagcaacaaacttctcactactcaaacaagcaggtgacgtggaggagaatcccgggcctactagtatggactggatttggcgcatccttttccttgtcggcgctgctaccggcgcgcattccttcgaagaagtgcagctggttgaatcaggcggaggactggttcagcctggcggatctctgagactgtcttgtgccgccagcggctacaccttcaccaactactggatgaactgggtccgacaggcccctggcaaaggactggaatgggtcggaatgatcgaccccagcgacagcgagacacactacaaccacatcttcaaggaccgcttcaccatcagcgccgacaccagcaagaataccgcctacctccagatgaactccctgagagccgaggacaccgccgtgtactactgcgccagaaacctgtatctgtggggccagggaaccctggtcacagtgtcatctacgcgtatccagaaccctgatcctgccgtgtaccagctgcgggatagcaagagcagcgacaagagcgtgtgtctgttcaccgacttcgacagccagaccaacgtgtcccagagcaaggactccgacgtgtacatcaccgataagtgcgtgctggacatgcggagcatggacttcaagagcaactccgccgtggcctggtccaacaagtccgatttcgcctgcgccaacgccttcaacaacagcattatccccgaggacacattcttcccaagccccgagagcagctgcgacgtgaagctggtggaaaagagcttcgagacagacaccaacctgaacttccagaacctgagcgtgatcggcttcagaatcctgctgctgaaagtggccggctttaacctgctgatgaccctgcggctgtggtccagc

SEQ ID NO: 37163 - DNA, 1869 bp, synthetic construct
  source 1..1869: mol_type = other DNA
atggccttaccagtgaccgccttgctcctgccgctggccttgctgctccacgccgccaggccggacatccagatgacacagagccctagcagcctgtctgccagcgtgggagacagagtgaccatcacatgcaagagcagccagagcctgctggactccgatggcaagacctacctgaactggtatcagcagaagcccggcaaggcccctaagctgctgatctacctggtgtccaagctggatagcggcgtgcccagcagattttctggcagcggcagcggaaccgacttcaccctgacaatatccagcctccagcctgaggacttcgccacctactactgcttccaaggcacccactttccatacaccttcggccagggcaccaaggtggaaatcaaaagactcgagatccagaaccctgatcctgccgtgtaccagctgcgggatagcaagagcagcgacaagagcgtgtgtctgttcaccgacttcgacagccagaccaacgtgtcccagagcaaggactccgacgtgtacatcaccgataagtgcgtgctggacatgcggagcatggacttcaagagcaactccgccgtggcctggtccaacaagtccgatttcgcctgcgccaacgccttcaacaacagcattatccccgaggacacattcttcccaagccccgagagcagctgcgacgtgaagctggtggaaaagagcttcgagacagacaccaacctgaacttccagaacctgagcgtgatcggcttcagaatcctgctgctgaaagtggccggctttaacctgctgatgaccctgcggctgtggtccagccgcgccaagagaagcggatctggcgtgaagcagaccctgaatttcgacctgctgaagctggctggcgacgtggaatccaacccaggccctactagtatggactggatttggcgcatccttttccttgtcggcgctgctaccggcgcgcattccttcgaagaagtgcagctggttgaatcaggcggaggactggttcagcctggcggatctctgagactgtcttgtgccgccagcggctacaccttcaccaactactggatgaactgggtccgacaggcccctggcaaaggactggaatgggtcggaatgatcgaccccagcgacagcgagacacactacaaccacatcttcaaggaccgcttcaccatcagcgccgacaccagcaagaataccgcctacctccagatgaactccctgagagccgaggacaccgccgtgtactactgcgccagaaacctgtatctgtggggccagggaaccctggtcacagtgtcatctacgcgtgaggacctgaagaacgtgttcccacctgaggtggccgtgttcgagcctagcgaggccgagatcagccacacccagaaagccaccctcgtgtgcctggctaccggcttctaccccgaccatgtggaactgtcttggtgggtcaacggcaaagaggtgcacagcggcgtgtgtaccgacccccagccactgaaagaacagcccgccctgaacgacagccggtactgcctgagcagcagactgagagtgtccgccaccttctggcagaacccccggaaccacttcagatgccaggtgcagttctacggcctgagcgagaacgacgagtggacccaggacagagccaagcccgtgacccagatcgtgtctgccgaagcctggggcagagccgattgcggctttaccagcgagagctaccagcagggcgtgctgagcgccaccatcctgtacgagatcctgctgggcaaggccaccctgtacgccgtgctggtgtctgccctggtgctgatggctatggtcaagcggaaggacagccgggga

SEQ ID NO: 37164 - DNA, 1905 bp, synthetic construct
  source 1..1905: mol_type = other DNA
atggccttaccagtgaccgccttgctcctgccgctggccttgctgctccacgccgccaggccgctcgaggaggacctgaagaacgtgttcccacctgaggtggccgtgttcgagcctagcaaggccgagatcgcccacacccagaaagccaccctcgtgtgcctggctaccggcttctaccccgaccatgtggaactgtcttggtgggtcaacggcaaagaggtgcacagcggcgtgtgtaccgacccccagccactgaaagaacagcccgccctgaacgacagccggtactgcctgagcagcagactgagagtgtccgccaccttctggcagaacccccggaaccacttcagatgccaggtgcagttctacggcctgagcgagaacgacgagtggacccaggacagagccaagcccgtgacccagatcgtgtctgccgaagcctggggcagagccgattgcggcatcaccagcgccagctaccaccagggcgtgctgagcgccaccatcctgtacgagatcctgctgggcaaggccaccctgtacgccgtgctggtgtctgccctggtgctgatggctatggtcaagcggaaggacagccggggaagggccaagcgatctggatctggagcaacaaacttctcactactcaaacaagcaggtgacgtggaggagaatcccgggcctactagcatggccttaccagtgaccgccttgctcctgccgctggccttgctgctccacgccgccaggccggacatccagatgacacagagccctagcagcctgtctgccagcgtgggagacagagtgaccatcacatgcaagagcagccagagcctgctggactccgatggcaagacctacctgaactggtatcagcagaagcccggcaaggcccctaagctgctgatctacctggtgtccaagctggatagcggcgtgcccagcagattttctggcagcggcagcggaaccgacttcaccctgacaatatccagcctccagcctgaggacttcgccacctactactgcttccaaggcacccactttccatacaccttcggccagggcaccaaggtggaaatcaaaagaggcggaggcggaagtggaggcggaggatctggcggcggaggctctgaagtgcagctggttgaatcaggcggaggactggttcagcctggcggatctctgagactgtcttgtgccgccagcggctacaccttcaccaactactggatgaactgggtccgacaggcccctggcaaaggactggaatgggtcggaatgatcgaccccagcgacagcgagacacactacaaccacatcttcaaggaccgcttcaccatcagcgccgacaccagcaagaataccgcctacctccagatgaactccctgagagccgaggacaccgccgtgtactactgcgccagaaacctgtatctgtggggccagggaaccctggtcacagtgtcatctacgcgtatccagaaccctgatcctgccgtgtaccagctgcgggatagcaagagcagcgacaagagcgtgtgtctgttcaccgacttcgacagccagaccaacgtgtcccagagcaaggactccgacgtgtacatcaccgataagtgcgtgctggacatgcggagcatggacttcaagagcaactccgccgtggcctggtccaacaagtccgatttcgcctgcgccaacgccttcaacaacagcattatccccgaggacacattcttcccaagcagcgacgtgccctgcgacgtgaagctggtggaaaagagcttcgagacagacaccaacctgaacttccagaacctgagcgtgatcggcttcagaatcctgctgctgaaagtggccggctttaacctgctgatgaccctgcggctgtggtccagc

SEQ ID NO: 37165 - DNA, 1926 bp, synthetic construct
  source 1..1926: mol_type = other DNA
atggccttaccagtgaccgccttgctcctgccgctggccttgctgctccacgccgccaggccgctcgagggctccggcgatcgccctgatcctgccgtgtaccagctgcgggatagcaagagcagcgacaagagcgtgtgtctgttcaccgacttcgacagccagaccaacgtgtcccagagcaaggactccgacgtgtacatcaccgataagtgcgtgctggacatgcggagcatggacttcaagagcaactccgccgtggcctggtccaacaagtccgatttcgcctgcgccaacgccttcaacaacagcattatccccgaggacacattcttcccaagccccgagagcagctgcgacgtgaagctggtggaaaagagcttcgagacagacaccaacctgaacttccagaacctgagcgtgatcggcttcagaatcctgctgctgaaagtggccggctttaacctgctgatgaccctgcggctgtggtccagctctagtcgcgccaagagaagcggatctggcgtgaagcagaccctgaatttcgacctgctgaagctggctggcgacgtggaatccaacccaggccccactagcatggccttaccagtgaccgccttgctcctgccgctggccttgctgctccacgccgccaggccggacatccagatgacacagagccctagcagcctgtctgccagcgtgggagacagagtgaccatcacatgcaagagcagccagagcctgctggactccgatggcaagacctacctgaactggtatcagcagaagcccggcaaggcccctaagctgctgatctacctggtgtccaagctggatagcggcgtgcccagcagattttctggcagcggcagcggaaccgacttcaccctgacaatatccagcctccagcctgaggacttcgccacctactactgcttccaaggcacccactttccatacaccttcggccagggcaccaaggtggaaatcaaaagaggcggaggcggaagtggaggcggaggatctggcggcggaggctctgaagtgcagctggttgaatcaggcggaggactggttcagcctggcggatctctgagactgtcttgtgccgccagcggctacaccttcaccaactactggatgaactgggtccgacaggcccctggcaaaggactggaatgggtcggaatgatcgaccccagcgacagcgagacacactacaaccacatcttcaaggaccgcttcaccatcagcgccgacaccagcaagaataccgcctacctccagatgaactccctgagagccgaggacaccgccgtgtactactgcgccagaaacctgtatctgtggggccagggaaccctggtcacagtgtcatctacgcgtgaggacctgaagaacgtgttcccacctgaggtggccgtgttcgagcctagcgaggccgagatcagccacacccagaaagccaccctcgtgtgcctggctaccggcttctaccccgaccatgtggaactgtcttggtgggtcaacggcaaagaggtgcacagcggcgtgtgtaccgacccccagccactgaaagaacagcccgccctgaacgacagccggtactgcctgagcagcagactgagagtgtccgccaccttctggcagaacccccggaaccacttcagatgccaggtgcagttctacggcctgagcgagaacgacgagtggacccaggacagagccaagcccgtgacccagatcgtgtctgccgaagcctggggcagagccgattgcggctttaccagcgagagctaccagcagggcgtgctgagcgccaccatcctgtacgagatcctgctgggcaaggccaccctgtacgccgtgctggtgtctgccctggtgctgatggctatggtcaagcggaaggacagccgggga

SEQ ID NO: 37166 - DNA, 1857 bp, synthetic construct
  source 1..1857: mol_type = other DNA
atggccttaccagtgaccgccttgctcctgccgctggccttgctgctccacgccgccaggccggacatccagatgacacagagccctagcagcctgtctgccagcgtgggagacagagtgaccatcacatgcaagagcagccagagcctgctggactccgatggcaagacctacctgaactggtatcagcagaagcccggcaaggcccctaagctgctgatctacctggtgtccaagctggatagcggcgtgcccagcagattttctggcagcggcagcggaaccgacttcaccctgacaatatccagcctccagcctgaggacttcgccacctactactgcttccaaggcacccactttccatacaccttcggccagggcaccaaggtggaaatcaaaagactcgaggacctgaagaacgtgttcccacctgaggtggccgtgttcgagcctagcgaggccgagatcagccacacccagaaagccaccctcgtgtgcctggctaccggcttctaccccgaccatgtggaactgtcttggtgggtcaacggcaaagaggtgcacagcggcgtgtctaccgacccccagccactgaaagaacagcccgccctgaacgacagccggtactgcctgagcagcagactgagagtgtccgccaccttctggcagaacccccggaaccacttcagatgccaggtgcagttctacggcctgagcgagaacgacgagtggacccaggacagagccaagcccgtgacccagatcgtgtctgccgaagcctggggcagagccgattgcggctttaccagcgagagctaccagcagggcgtgctgagcgccaccatcctgtacgagatcctgctgggcaaggccaccctgtacgccgtgctggtgtctgccctggtgctgatggctatggtcaagcggaaggacagccggggaagggccaagcgatctggatctggagcaacaaacttctcactactcaaacaagcaggtgacgtggaggagaatcccgggcctactagtatggactggatttggcgcatccttttccttgtcggcgctgctaccggcgcgcattccttcgaagaagtgcagctggttgaatcaggcggaggactggttcagcctggcggatctctgagactgtcttgtgccgccagcggctacaccttcaccaactactggatgaactgggtccgacaggcccctggcaaaggactggaatgggtcggaatgatcgaccccagcgacagcgagacacactacaaccacatcttcaaggaccgcttcaccatcagcgccgacaccagcaagaataccgcctacctccagatgaactccctgagagccgaggacaccgccgtgtactactgcgccagaaacctgtatctgtggggccagggaaccctggtcacagtgtcatctacgcgtatccagaaccctgatcctgccgtgtaccagctgcgggatagcaagagcagcgacaagagcgtgtgtctgttcaccgacttcgacagccagaccaacgtgtcccagagcaaggactccgacgtgtacatcaccgataagaccgtgctggacatgcggagcatggacttcaagagcaactccgccgtggcctggtccaacaagtccgatttcgcctgcgccaacgccttcaacaacagcattatccccgaggacacattcttcccaagccccgagagcagctgcgacgtgaagctggtggaaaagagcttcgagacagacaccaacctgaacttccagaacctgagcgtgatcggcttcagaatcctgctgctgaaagtggccggctttaacctgctgatgaccctgcggctgtggtccagc

SEQ ID NO: 37167 - DNA, 1881 bp, synthetic construct
  source 1..1881: mol_type = other DNA
atggccttaccagtgaccgccttgctcctgccgctggccttgctgctccacgccgccaggccggacatccagatgacacagagccctagcagcctgtctgccagcgtgggagacagagtgaccatcacatgcaagagcagccagagcctgctggactccgatggcaagacctacctgaactggtatcagcagaagcccggcaaggcccctaagctgctgatctacctggtgtccaagctggatagcggcgtgcccagcagattttctggcagcggcagcggaaccgacttcaccctgacaatatccagcctccagcctgaggacttcgccacctactactgcttccaaggcacccactttccatacaccttcggccagggcaccaaggtggaaatcaaaagactcgaggacaagcagctggacgccgacgtgtcccccaagcctaccatcttcctgccctctatcgccgagacaaagctccagaaggccggcacctacctgtgcctgctggaaaagttcttcccagatgtgattaagatccactggcaggaaaagaagtccaacaccatcctgggcagccaggaaggcaacaccatgaagaccaacgacacctacatgaagttcagctggctgaccgtgcccgagaagtccctggacaaagaacacagatgcatcgtgcggcacgaaaacaacaagaacggcgtggaccaggaaatcatcttcccacccatcaagaccgatgtgattacaatggaccccaaggacaactgctccaaggacgccaacgataccctgctgctccagctgaccaacaccagcgcctactacatgtacttgttgctgctgctgaagtccgtggtgtacttcgccatcatcacatgctgcctgctgcggagaaccgccttctgctgcaacggcgagaagtctagggccaagcgatctggatctggagcaacaaacttctcactactcaaacaagcaggtgacgtggaggagaatcccgggcctactagtatggactggatttggcgcatccttttccttgtcggcgctgctaccggcgcgcattccttcgaagaagtgcagctggttgaatcaggcggaggactggttcagcctggcggatctctgagactgtcttgtgccgccagcggctacaccttcaccaactactggatgaactgggtccgacaggcccctggcaaaggactggaatgggtcggaatgatcgaccccagcgacagcgagacacactacaaccacatcttcaaggaccgcttcaccatcagcgccgacaccagcaagaataccgcctacctccagatgaactccctgagagccgaggacaccgccgtgtactactgcgccagaaacctgtatctgtggggccagggaaccctggtcacagtgtcatctacgcgtagccagcctcacaccaagcccagcgtgttcgtgatgaagaacggcaccaacgtggcctgcctcgtgaaagagttctaccccaaggacatcaggatcaacctggtgtccagcaagaagatcaccgagttcgaccccgccatcgtgatctcccccagcggcaagtacaacgccgtgaagctggggaagtacgaggacagcaacagcgtgacctgctccgtgcagcacgacaacaagaccgtgcacagcaccgactttgaagtgaaaaccgactccaccgaccacgtgaagcccaaagagacagagaacaccaagcagcccagcaagagctgccacaagcccaaggccatcgtgcacaccgagaaagtgaacatgatgagcctgaccgtgctgggcctgcggatgctgttcgccaaaaccgtggccgtgaacttcctgctgaccgccaagctgttcttcctc

SEQ ID NO: 37168 - DNA, 1881 bp, synthetic construct
  source 1..1881: mol_type = other DNA
atggccttaccagtgaccgccttgctcctgccgctggccttgctgctccacgccgccaggccggacatccagatgacacagagccctagcagcctgtctgccagcgtgggagacagagtgaccatcacatgcaagagcagccagagcctgctggactccgatggcaagacctacctgaactggtatcagcagaagcccggcaaggcccctaagctgctgatctacctggtgtccaagctggatagcggcgtgcccagcagattttctggcagcggcagcggaaccgacttcaccctgacaatatccagcctccagcctgaggacttcgccacctactactgcttccaaggcacccactttccatacaccttcggccagggcaccaaggtggaaatcaaaagactcgagagccagcctcacaccaagcccagcgtgttcgtgatgaagaacggcaccaacgtggcctgcctcgtgaaagagttctaccccaaggacatcaggatcaacctggtgtccagcaagaagatcaccgagttcgaccccgccatcgtgatctcccccagcggcaagtacaacgccgtgaagctggggaagtacgaggacagcaacagcgtgacctgctccgtgcagcacgacaacaagaccgtgcacagcaccgactttgaagtgaaaaccgactccaccgaccacgtgaagcccaaagagacagagaacaccaagcagcccagcaagagctgccacaagcccaaggccatcgtgcacaccgagaaagtgaacatgatgagcctgaccgtgctgggcctgcggatgctgttcgccaaaaccgtggccgtgaacttcctgctgaccgccaagctgttcttcctcagggccaagcgatctggatctggagcaacaaacttctcactactcaaacaagcaggtgacgtggaggagaatcccgggcctactagtatggactggatttggcgcatccttttccttgtcggcgctgctaccggcgcgcattccttcgaagaagtgcagctggttgaatcaggcggaggactggttcagcctggcggatctctgagactgtcttgtgccgccagcggctacaccttcaccaactactggatgaactgggtccgacaggcccctggcaaaggactggaatgggtcggaatgatcgaccccagcgacagcgagacacactacaaccacatcttcaaggaccgcttcaccatcagcgccgacaccagcaagaataccgcctacctccagatgaactccctgagagccgaggacaccgccgtgtactactgcgccagaaacctgtatctgtggggccagggaaccctggtcacagtgtcatctacgcgtgacaagcagctggacgccgacgtgtcccccaagcctaccatcttcctgccctctatcgccgagacaaagctccagaaggccggcacctacctgtgcctgctggaaaagttcttcccagatgtgattaagatccactggcaggaaaagaagtccaacaccatcctgggcagccaggaaggcaacaccatgaagaccaacgacacctacatgaagttcagctggctgaccgtgcccgagaagtccctggacaaagaacacagatgcatcgtgcggcacgaaaacaacaagaacggcgtggaccaggaaatcatcttcccacccatcaagaccgatgtgattacaatggaccccaaggacaactgctccaaggacgccaacgataccctgctgctccagctgaccaacaccagcgcctactacatgtacttgttgctgctgctgaagtccgtggtgtacttcgccatcatcacatgctgcctgctgcggagaaccgccttctgctgcaacggcgagaagtct

SEQ ID NO: 37169 - DNA, 1926 bp, synthetic construct
  source 1..1926: mol_type = other DNA
atggccttaccagtgaccgccttgctcctgccgctggccttgctgctccacgccgccaggccgctcgaggacaagcagctggacgccgacgtgtcccccaagcctaccatcttcctgccctctatcgccgagacaaagctccagaaggccggcacctacctgtgcctgctggaaaagttcttcccagatgtgattaagatccactggcaggaaaagaagtccaacaccatcctgggcagccaggaaggcaacaccatgaagaccaacgacacctacatgaagttcagctggctgaccgtgcccgagaagtccctggacaaagaacacagatgcatcgtgcggcacgaaaacaacaagaacggcgtggaccaggaaatcatcttcccacccatcaagaccgatgtgattacaatggaccccaaggacaactgctccaaggacgccaacgataccctgctgctccagctgaccaacaccagcgcctactacatgtacttgttgctgctgctgaagtccgtggtgtacttcgccatcatcacatgctgcctgctgcggagaaccgccttctgctgcaacggcgagaagtctagggccaagcgatctggatctggagcaacaaacttctcactactcaaacaagcaggtgacgtggaggagaatcccgggcctactagcatggccttaccagtgaccgccttgctcctgccgctggccttgctgctccacgccgccaggccggacatccagatgacacagagccctagcagcctgtctgccagcgtgggagacagagtgaccatcacatgcaagagcagccagagcctgctggactccgatggcaagacctacctgaactggtatcagcagaagcccggcaaggcccctaagctgctgatctacctggtgtccaagctggatagcggcgtgcccagcagattttctggcagcggcagcggaaccgacttcaccctgacaatatccagcctccagcctgaggacttcgccacctactactgcttccaaggcacccactttccatacaccttcggccagggcaccaaggtggaaatcaaaagaggcggaggcggaagtggaggcggaggatctggcggcggaggctctgaagtgcagctggttgaatcaggcggaggactggttcagcctggcggatctctgagactgtcttgtgccgccagcggctacaccttcaccaactactggatgaactgggtccgacaggcccctggcaaaggactggaatgggtcggaatgatcgaccccagcgacagcgagacacactacaaccacatcttcaaggaccgcttcaccatcagcgccgacaccagcaagaataccgcctacctccagatgaactccctgagagccgaggacaccgccgtgtactactgcgccagaaacctgtatctgtggggccagggaaccctggtcacagtgtcatctacgcgtagccagcctcacaccaagcccagcgtgttcgtgatgaagaacggcaccaacgtggcctgcctcgtgaaagagttctaccccaaggacatcaggatcaacctggtgtccagcaagaagatcaccgagttcgaccccgccatcgtgatctcccccagcggcaagtacaacgccgtgaagctggggaagtacgaggacagcaacagcgtgacctgctccgtgcagcacgacaacaagaccgtgcacagcaccgactttgaagtgaaaaccgactccaccgaccacgtgaagcccaaagagacagagaacaccaagcagcccagcaagagctgccacaagcccaaggccatcgtgcacaccgagaaagtgaacatgatgagcctgaccgtgctgggcctgcggatgctgttcgccaaaaccgtggccgtgaacttcctgctgaccgccaagctgttcttcctc

SEQ ID NO: 37170 - DNA, 2388 bp, synthetic construct
  source 1..2388: mol_type = other DNA
atggccttaccagtgaccgccttgctcctgccgctggccttgctgctccacgccgccaggccggacatccagatgacacagagccctagcagcctgtctgccagcgtgggagacagagtgaccatcacatgcaagagcagccagagcctgctggactccgatggcaagacctacctgaactggtatcagcagaagcccggcaaggcccctaagctgctgatctacctggtgtccaagctggatagcggcgtgcccagcagattttctggcagcggcagcggaaccgacttcaccctgacaatatccagcctccagcctgaggacttcgccacctactactgcttccaaggcacccactttccatacaccttcggccagggcaccaaggtggaaatcaaaagaggacagcctaaggccaatcctaccgtgacactgttccctccaagcagcgaagaactccaggccaacaaggccacacttgtgtgcctgatctccgacttctaccctggggctgtgacagtggcttggaaggccgatggatctcctgtgaaagccggcgtggaaaccaccaagccatccaagcagagcaacaacaaatacgccgccagctcctacctgagcctgacacctgagcagtggaagtcccacagatcctacagctgccaagtgacccacgaaggcagcaccgtggaaaagacagtggcccctacagagtgcagcggatcccagagcttcggcctgctggaccccaagctgtgctacctgctggatggcatcctgttcatctacggcgtgatcctgaccgccctgttcctgagagtgaagttcagcagaagcgccgacgcccctgcctaccagcagggacagaaccaactgtacaacgagctgaacctgggcagacgggaagagtacgacgtgctggacaagcggagaggcagggaccctgagatgggcggaaagccccagcggagaaagaacccccaggaaggactgtataacgaactccagaaagacaagatggccgaagcctacagcgagatcggcatgaagggcgagcggagaagaggcaagggccacgatggcctgtaccagggcctgagcaccgccaccaaggacacctatgacgccctgcacatgcaggccctgcctccaagaagggccaagcgatctggatctggagcaacaaacttctcactactcaaacaagcaggtgacgtggaggagaatcccgggcctactagtatggactggatttggcgcatccttttccttgtcggcgctgctaccggcgcgcattccttcgaagaagtgcagctggttgaatcaggcggaggactggttcagcctggcggatctctgagactgtcttgtgccgccagcggctacaccttcaccaactactggatgaactgggtccgacaggcccctggcaaaggactggaatgggtcggaatgatcgaccccagcgacagcgagacacactacaaccacatcttcaaggaccgcttcaccatcagcgccgacaccagcaagaataccgcctacctccagatgaactccctgagagccgaggacaccgccgtgtactactgcgccagaaacctgtatctgtggggccagggaaccctggtcacagtgtcatctgcctctacaaagggaccctccgtgtttcctctggctcccagcagcaagtctacaagcggaggaacagccgctctgggctgcctggtcaaggattactttcccgagcctgtgaccgtgtcctggaatagcggagcactgacaagcggcgtgcacacctttccagccgtgctgcaaagcagcggcctgtactctctgagcagcgtggtcacagtgcctagctctagcctgggcacccagacctacatctgcaatgtgaaccacaagcctagcaacaccaaggtggacaagagagtggaacccaagagctgtggtacccagagttttgggttgttggaccctaaattgtgctatctgttggacggaatcctgttcatttacggagtgatcctgaccgcattgttcctgcgggttaagttttccagatccgcagacgcacccgcttaccaacaagggcagaaccaactctacaatgaacttaatttggggcggagggaagagtacgacgttctggacaaaaggaggggacgagatcccgagatgggcggaaagcctcagcgaaggaagaatccgcaagaggggctttataacgaactccagaaagataaaatggcagaagcctatagtgagattgggatgaagggagaaaggaggaggggtaaaggtcacgatgggttgtaccaaggattgagcacagccactaaagatacctatgatgcgctccacatgcaggccctgccgccaaga

SEQ ID NO: 37171 - DNA, 2445 bp, synthetic construct
  source 1..2445: mol_type = other DNA
atggccttaccagtgaccgccttgctcctgccgctggccttgctgctccacgccgccaggccggacatccagatgacacagagccctagcagcctgtctgccagcgtgggagacagagtgaccatcacatgcaagagcagccagagcctgctggactccgatggcaagacctacctgaactggtatcagcagaagcccggcaaggcccctaagctgctgatctacctggtgtccaagctggatagcggcgtgcccagcagattttctggcagcggcagcggaaccgacttcaccctgacaatatccagcctccagcctgaggacttcgccacctactactgcttccaaggcacccactttccatacaccttcggccagggcaccaaggtggaaatcaaaagactcgaggacctgaagaacgtgttcccacctgaggtggccgtgttcgagcctagcgaggccgagatcagccacacccagaaagccaccctcgtgtgcctggctaccggcttctaccccgaccatgtggaactgtcttggtgggtcaacggcaaagaggtgcacagcggcgtgtctaccgacccccagccactgaaagaacagcccgccctgaacgacagccggtactgcctgagcagcagactgagagtgtccgccaccttctggcagaacccccggaaccacttcagatgccaggtgcagttctacggcctgagcgagaacgacgagtggacccaggacagagccaagcccgtgacccagatcgtgtctgccgaagcctggggcagagccgattgcggatcccagagcttcggcctgctggaccccaagctgtgctacctgctggatggcatcctgttcatctacggcgtgatcctgaccgccctgttcctgagagtgaagttcagcagaagcgccgacgcccctgcctaccagcagggacagaaccaactgtacaacgagctgaacctgggcagacgggaagagtacgacgtgctggacaagcggagaggcagggaccctgagatgggcggaaagccccagcggagaaagaacccccaggaaggactgtataacgaactccagaaagacaagatggccgaagcctacagcgagatcggcatgaagggcgagcggagaagaggcaagggccacgatggcctgtaccagggcctgagcaccgccaccaaggacacctatgacgccctgcacatgcaggccctgcctccaagaagggccaagcgatctggatctggagcaacaaacttctcactactcaaacaagcaggtgacgtggaggagaatcccgggcctactagtatggactggatttggcgcatccttttccttgtcggcgctgctaccggcgcgcattccttcgaagaagtgcagctggttgaatcaggcggaggactggttcagcctggcggatctctgagactgtcttgtgccgccagcggctacaccttcaccaactactggatgaactgggtccgacaggcccctggcaaaggactggaatgggtcggaatgatcgaccccagcgacagcgagacacactacaaccacatcttcaaggaccgcttcaccatcagcgccgacaccagcaagaataccgcctacctccagatgaactccctgagagccgaggacaccgccgtgtactactgcgccagaaacctgtatctgtggggccagggaaccctggtcacagtgtcatctacgcgtatccagaaccctgatcctgccgtgtaccagctgcgggatagcaagagcagcgacaagagcgtgtgtctgttcaccgacttcgacagccagaccaacgtgtcccagagcaaggactccgacgtgtacatcaccgataagaccgtgctggacatgcggagcatggacttcaagagcaactccgccgtggcctggtccaacaagtccgatttcgcctgcgccaacgccttcaacaacagcattatccccgaggacacattcttcccaagccccgagagcagctgcggtacccagagttttgggttgttggaccctaaattgtgctatctgttggacggaatcctgttcatttacggagtgatcctgaccgcattgttcctgcgggttaagttttccagatccgcagacgcacccgcttaccaacaagggcagaaccaactctacaatgaacttaatttggggcggagggaagagtacgacgttctggacaaaaggaggggacgagatcccgagatgggcggaaagcctcagcgaaggaagaatccgcaagaggggctttataacgaactccagaaagataaaatggcagaagcctatagtgagattgggatgaagggagaaaggaggaggggtaaaggtcacgatgggttgtaccaaggattgagcacagccactaaagatacctatgatgcgctccacatgcaggccctgccgccaaga

SEQ ID NO: 37172 - DNA, 2571 bp, synthetic construct
  source 1..2571: mol_type = other DNA
atggccttaccagtgaccgccttgctcctgccgctggccttgctgctccacgccgccaggccggacatccagatgacacagagccctagcagcctgtctgccagcgtgggagacagagtgaccatcacatgcaagagcagccagagcctgctggactccgatggcaagacctacctgaactggtatcagcagaagcccggcaaggcccctaagctgctgatctacctggtgtccaagctggatagcggcgtgcccagcagattttctggcagcggcagcggaaccgacttcaccctgacaatatccagcctccagcctgaggacttcgccacctactactgcttccaaggcacccactttccatacaccttcggccagggcaccaaggtggaaatcaaaagactcgaggaggacctgaagaacgtgttcccacctgaggtggccgtgttcgagcctagcgaggccgagatcagccacacccagaaagccaccctcgtgtgcctggctaccggcttctaccccgaccatgtggaactgtcttggtgggtcaacggcaaagaggtgcacagcggcgtgtctaccgacccccagccactgaaagaacagcccgccctgaacgacagccggtactgcctgagcagcagactgagagtgtccgccaccttctggcagaacccccggaaccacttcagatgccaggtgcagttctacggcctgagcgagaacgacgagtggacccaggacagagccaagcccgtgacccagatcgtgtctgccgaagcctggggcagagccgattgcggatcccagagcttcggcctgctggaccccaagctgtgctacctgctggatggcatcctgttcatctacggcgtgatcctgaccgccctgttcctgagagtgaagttcagcagaagcgccgacgcccctgcctaccagcagggacagaaccaactgtacaacgagctgaacctgggcagacgggaagagtacgacgtgctggacaagcggagaggcagggaccctgagatgggcggaaagccccagcggagaaagaacccccaggaaggactgtataacgaactccagaaagacaagatggccgaagcctacagcgagatcggcatgaagggcgagcggagaagaggcaagggccacgatggcctgtaccagggcctgagcaccgccaccaaggacacctatgacgccctgcacatgcaggccctgcctccaagaagggccaagcgatctggatctggagcaacaaacttctcactactcaaacaagcaggtgacgtggaggagaatcccgggcctactagtatggactggatttggcgcatccttttccttgtcggcgctgctaccggcgcgcattccttcgaagaagtgcagctggttgaatcaggcggaggactggttcagcctggcggatctctgagactgtcttgtgccgccagcggctacaccttcaccaactactggatgaactgggtccgacaggcccctggcaaaggactggaatgggtcggaatgatcgaccccagcgacagcgagacacactacaaccacatcttcaaggaccgcttcaccatcagcgccgacaccagcaagaataccgcctacctccagatgaactccctgagagccgaggacaccgccgtgtactactgcgccagaaacctgtatctgtggggccagggaaccctggtcacagtgtcatctacgcgtatccagaaccctgatcctgccgtgtaccagctgcgggatagcaagagcagcgacaagagcgtgtgtctgttcaccgacttcgacagccagaccaacgtgtcccagagcaaggactccgacgtgtacatcaccgataagaccgtgctggacatgcggagcatggacttcaagagcaactccgccgtggcctggtccaacaagtccgatttcgcctgcgccaacgccttcaacaacagcattatccccgaggacacattcttcccaagccccgagagcagctgcggtacccagagttttgggttgttggaccctaaattgtgctatctgttggacggaatcctgttcatttacggagtgatcctgaccgcattgttcctgaggagcaagcggtcacggctgctccacagcgattacatgaatatgacaccacgaagaccgggtcctactcgcaaacactaccaaccctacgcacctccccgcgactttgcagcgtaccgatctcgggttaagttttccagatccgcagacgcacccgcttaccaacaagggcagaaccaactctacaatgaacttaatttggggcggagggaagagtacgacgttctggacaaaaggaggggacgagatcccgagatgggcggaaagcctcagcgaaggaagaatccgcaagaggggctttataacgaactccagaaagataaaatggcagaagcctatagtgagattgggatgaagggagaaaggaggaggggtaaaggtcacgatgggttgtaccaaggattgagcacagccactaaagatacctatgatgcgctccacatgcaggccctgccgccaaga

SEQ ID NO: 37173 - DNA, 2700 bp, synthetic construct
  source 1..2700: mol_type = other DNA
atggccttaccagtgaccgccttgctcctgccgctggccttgctgctccacgccgccaggccggacatccagatgacacagagccctagcagcctgtctgccagcgtgggagacagagtgaccatcacatgcaagagcagccagagcctgctggactccgatggcaagacctacctgaactggtatcagcagaagcccggcaaggcccctaagctgctgatctacctggtgtccaagctggatagcggcgtgcccagcagattttctggcagcggcagcggaaccgacttcaccctgacaatatccagcctccagcctgaggacttcgccacctactactgcttccaaggcacccactttccatacaccttcggccagggcaccaaggtggaaatcaaaagactcgaggaggacctgaagaacgtgttcccacctgaggtggccgtgttcgagcctagcgaggccgagatcagccacacccagaaagccaccctcgtgtgcctggctaccggcttctaccccgaccatgtggaactgtcttggtgggtcaacggcaaagaggtgcacagcggcgtgtctaccgacccccagccactgaaagaacagcccgccctgaacgacagccggtactgcctgagcagcagactgagagtgtccgccaccttctggcagaacccccggaaccacttcagatgccaggtgcagttctacggcctgagcgagaacgacgagtggacccaggacagagccaagcccgtgacccagatcgtgtctgccgaagcctggggcagagccgattgcggatcccagagcttcggcctgctggaccccaagctgtgctacctgctggatggcatcctgttcatctacggcgtgatcctgaccgccctgttcctgaaacggggcagaaagaaactcctgtatatattcaaacaaccatttatgagaccagtacaaactactcaagaggaagatggctgtagctgccgatttccagaagaagaagaaggaggatgtgaactgagagtgaagttcagcagaagcgccgacgcccctgcctaccagcagggacagaaccaactgtacaacgagctgaacctgggcagacgggaagagtacgacgtgctggacaagcggagaggcagggaccctgagatgggcggaaagccccagcggagaaagaacccccaggaaggactgtataacgaactccagaaagacaagatggccgaagcctacagcgagatcggcatgaagggcgagcggagaagaggcaagggccacgatggcctgtaccagggcctgagcaccgccaccaaggacacctatgacgccctgcacatgcaggccctgcctccaagaagggccaagcgatctggatctggagcaacaaacttctcactactcaaacaagcaggtgacgtggaggagaatcccgggcctactagtatggactggatttggcgcatccttttccttgtcggcgctgctaccggcgcgcattccttcgaagaagtgcagctggttgaatcaggcggaggactggttcagcctggcggatctctgagactgtcttgtgccgccagcggctacaccttcaccaactactggatgaactgggtccgacaggcccctggcaaaggactggaatgggtcggaatgatcgaccccagcgacagcgagacacactacaaccacatcttcaaggaccgcttcaccatcagcgccgacaccagcaagaataccgcctacctccagatgaactccctgagagccgaggacaccgccgtgtactactgcgccagaaacctgtatctgtggggccagggaaccctggtcacagtgtcatctacgcgtatccagaaccctgatcctgccgtgtaccagctgcgggatagcaagagcagcgacaagagcgtgtgtctgttcaccgacttcgacagccagaccaacgtgtcccagagcaaggactccgacgtgtacatcaccgataagaccgtgctggacatgcggagcatggacttcaagagcaactccgccgtggcctggtccaacaagtccgatttcgcctgcgccaacgccttcaacaacagcattatccccgaggacacattcttcccaagccccgagagcagctgcggtacccagagttttgggttgttggaccctaaattgtgctatctgttggacggaatcctgttcatttacggagtgatcctgaccgcattgttcctgaagagaggccggaagaagctgctgtacatcttcaagcagcctttcatgcggcccgtgcagaccacccaggaagaggacggctgctcctgccggttccccgaggaagaagaaggcggctgcgagctgcgggttaagttttccagatccgcagacgcacccgcttaccaacaagggcagaaccaactctacaatgaacttaatttggggcggagggaagagtacgacgttctggacaaaaggaggggacgagatcccgagatgggcggaaagcctcagcgaaggaagaatccgcaagaggggctttataacgaactccagaaagataaaatggcagaagcctatagtgagattgggatgaagggagaaaggaggaggggtaaaggtcacgatgggttgtaccaaggattgagcacagccactaaagatacctatgatgcgctccacatgcaggccctgccgccaaga

SEQ ID NO: 37174 - DNA, 1761 bp, synthetic construct
  source 1..1761: mol_type = other DNA
atggccttaccagtgaccgccttgctcctgccgctggccttgctgctccacgccgccaggccggacatccagatgacacagagccctagcagcctgtctgccagcgtgggagacagagtgaccatcacatgcaagagcagccagagcctgctggactccgatggcaagacctacctgaactggtatcagcagaagcccggcaaggcccctaagctgctgatctacctggtgtccaagctggatagcggcgtgcccagcagattttctggcagcggcagcggaaccgacttcaccctgacaatatccagcctccagcctgaggacttcgccacctactactgcttccaaggcacccactttccatacaccttcggccagggcaccaaggtggaaatcaaaagactcgagcagagcttcggcctgctggaccccaagctgtgctacctgctggatggcatcctgttcatctacggcgtgatcctgaccgccctgttcctgagagtgaagttcagcagaagcgccgacgcccctgcctaccagcagggacagaaccaactgtacaacgagctgaacctgggcagacgggaagagtacgacgtgctggacaagcggagaggcagggaccctgagatgggcggaaagccccagcggagaaagaacccccaggaaggactgtataacgaactccagaaagacaagatggccgaagcctacagcgagatcggcatgaagggcgagcggagaagaggcaagggccacgatggcctgtaccagggcctgagcaccgccaccaaggacacctatgacgccctgcacatgcaggccctgcctccaagaagggccaagcgatctggatctggagcaacaaacttctcactactcaaacaagcaggtgacgtggaggagaatcccgggcctactagtatggactggatttggcgcatccttttccttgtcggcgctgctaccggcgcgcattccttcgaagaagtgcagctggttgaatcaggcggaggactggttcagcctggcggatctctgagactgtcttgtgccgccagcggctacaccttcaccaactactggatgaactgggtccgacaggcccctggcaaaggactggaatgggtcggaatgatcgaccccagcgacagcgagacacactacaaccacatcttcaaggaccgcttcaccatcagcgccgacaccagcaagaataccgcctacctccagatgaactccctgagagccgaggacaccgccgtgtactactgcgccagaaacctgtatctgtggggccagggaaccctggtcacagtgtcatctacgcgtcagagttttgggttgttggaccctaaattgtgctatctgttggacggaatcctgttcatttacggagtgatcctgaccgcattgttcctgcgggttaagttttccagatccgcagacgcacccgcttaccaacaagggcagaaccaactctacaatgaacttaatttggggcggagggaagagtacgacgttctggacaaaaggaggggacgagatcccgagatgggcggaaagcctcagcgaaggaagaatccgcaagaggggctttataacgaactccagaaagataaaatggcagaagcctatagtgagattgggatgaagggagaaaggaggaggggtaaaggtcacgatgggttgtaccaaggattgagcacagccactaaagatacctatgatgcgctccacatgcaggccctgccgccaaga

SEQ ID NO: 37175 - DNA, 1935 bp, synthetic construct
  source 1..1935: mol_type = other DNA
atggccttaccagtgaccgccttgctcctgccgctggccttgctgctccacgccgccaggccggacatccagatgacacagagccctagcagcctgtctgccagcgtgggagacagagtgaccatcacatgcaagagcagccagagcctgctggactccgatggcaagacctacctgaactggtatcagcagaagcccggcaaggcccctaagctgctgatctacctggtgtccaagctggatagcggcgtgcccagcagattttctggcagcggcagcggaaccgacttcaccctgacaatatccagcctccagcctgaggacttcgccacctactactgcttccaaggcacccactttccatacaccttcggccagggcaccaaggtggaaatcaaaagactcgagggacagcctaaggccaatcctaccgtgacactgttccctccaagcagcgaagaactccaggccaacaaggccacacttgtgtgcctgatctccgacttctaccctggggctgtgacagtggcttggaaggccgatggatctcctgtgaaagccggcgtggaaaccaccaagccatccaagcagagcaacaacaaatacgccgccagctcctacctgagcctgacacctgagcagtggaagtcccacagatcctacagctgccaagtgacccacgaaggcagcaccgtggaaaagacagtggcccctacagagtgcagccccatcaagaccgatgtgattacaatggaccccaaggacaactgctccaaggacgccaacgataccctgctgctccagctgaccaacaccagcgcctactacatgtacttgttgctgctgctgaagtccgtggtgtacttcgccatcatcacatgctgcctgctgcggagaaccgccttctgctgcaacggcgagaagtctagggccaagcgatctggatctggagcaacaaacttctcactactcaaacaagcaggtgacgtggaggagaatcccgggcctactagtatggactggatttggcgcatccttttccttgtcggcgctgctaccggcgcgcattccttcgaagaagtgcagctggttgaatcaggcggaggactggttcagcctggcggatctctgagactgtcttgtgccgccagcggctacaccttcaccaactactggatgaactgggtccgacaggcccctggcaaaggactggaatgggtcggaatgatcgaccccagcgacagcgagacacactacaaccacatcttcaaggaccgcttcaccatcagcgccgacaccagcaagaataccgcctacctccagatgaactccctgagagccgaggacaccgccgtgtactactgcgccagaaacctgtatctgtggggccagggaaccctggtcacagtgtcatctacgcgtgcctctacaaagggaccctccgtgtttcctctggctcccagcagcaagtctacaagcggaggaacagccgctctgggctgcctggtcaaggattactttcccgagcctgtgaccgtgtcctggaatagcggagcactgacaagcggcgtgcacacctttccagccgtgctgcaaagcagcggcctgtactctctgagcagcgtggtcacagtgcctagctctagcctgggcacccagacctacatctgcaatgtgaaccacaagcctagcaacaccaaggtggacaagagagtggaacccaagagctgtgaagtgaaaaccgactccaccgaccacgtgaagcccaaagagacagagaacaccaagcagcccagcaagagctgccacaagcccaaggccatcgtgcacaccgagaaagtgaacatgatgagcctgaccgtgctgggcctgcggatgctgttcgccaaaaccgtggccgtgaacttcctgctgaccgccaagctgttcttcctc

SEQ ID NO: 37176 - DNA, 1869 bp, synthetic construct
  source 1..1869: mol_type = other DNA
atggccttaccagtgaccgccttgctcctgccgctggccttgctgctccacgccgccaggccggacatccagatgacacagagccctagcagcctgtctgccagcgtgggagacagagtgaccatcacatgcaagagcagccagagcctgctggactccgatggcaagacctacctgaactggtatcagcagaagcccggcaaggcccctaagctgctgatctacctggtgtccaagctggatagcggcgtgcccagcagattttctggcagcggcagcggaaccgacttcaccctgacaatatccagcctccagcctgaggacttcgccacctactactgcttccaaggcacccactttccatacaccttcggccagggcaccaaggtggaaatcaaaagactcgagggacagcctaaggccaatcctaccgtgacactgttccctccaagcagcgaagaactccaggccaacaaggccacacttgtgtgcctgatctccgacttctaccctggggctgtgacagtggcttggaaggccgatggatctcctgtgaaagccggcgtggaaaccaccaagccatccaagcagagcaacaacaaatacgccgccagctcctacctgagcctgacacctgagcagtggaagtcccacagatcctacagctgccaagtgacccacgaaggcagcaccgtggaaaagacagtggcccctacagagtgcagcggcagagccgattgcggcatcaccagcgccagctaccaccagggcgtgctgagcgccaccatcctgtacgagatcctgctgggcaaggccaccctgtacgccgtgctggtgtctgccctggtgctgatggctatggtcaagcggaaggacagccggggaagggccaagcgatctggatctggagcaacaaacttctcactactcaaacaagcaggtgacgtggaggagaatcccgggcctactagtatggactggatttggcgcatccttttccttgtcggcgctgctaccggcgcgcattccttcgaagaagtgcagctggttgaatcaggcggaggactggttcagcctggcggatctctgagactgtcttgtgccgccagcggctacaccttcaccaactactggatgaactgggtccgacaggcccctggcaaaggactggaatgggtcggaatgatcgaccccagcgacagcgagacacactacaaccacatcttcaaggaccgcttcaccatcagcgccgacaccagcaagaataccgcctacctccagatgaactccctgagagccgaggacaccgccgtgtactactgcgccagaaacctgtatctgtggggccagggaaccctggtcacagtgtcatctacgcgtgcctctacaaagggaccctccgtgtttcctctggctcccagcagcaagtctacaagcggaggaacagccgctctgggctgcctggtcaaggattactttcccgagcctgtgaccgtgtcctggaatagcggagcactgacaagcggcgtgcacacctttccagccgtgctgcaaagcagcggcctgtactctctgagcagcgtggtcacagtgcctagctctagcctgggcacccagacctacatctgcaatgtgaaccacaagcctagcaacaccaaggtggacaagagagtggaacccaagagctgtatccccgaggacacattcttcccaagcagcgacgtgccctgcgacgtgaagctggtggaaaagagcttcgagacagacaccaacctgaacttccagaacctgagcgtgatcggcttcagaatcctgctgctgaaagtggccggctttaacctgctgatgaccctgcggctgtggtccagc

SEQ ID NO: 37177 - DNA, 1869 bp, synthetic construct
  source 1..1869: mol_type = other DNA
atggccttaccagtgaccgccttgctcctgccgctggccttgctgctccacgccgccaggccggacatccagatgacacagagccctagcagcctgtctgccagcgtgggagacagagtgaccatcacatgcaagagcagccagagcctgctggactccgatggcaagacctacctgaactggtatcagcagaagcccggcaaggcccctaagctgctgatctacctggtgtccaagctggatagcggcgtgcccagcagattttctggcagcggcagcggaaccgacttcaccctgacaatatccagcctccagcctgaggacttcgccacctactactgcttccaaggcacccactttccatacaccttcggccagggcaccaaggtggaaatcaaaagactcgagggacagcctaaggccaatcctaccgtgacactgttccctccaagcagcgaagaactccaggccaacaaggccacacttgtgtgcctgatctccgacttctaccctggggctgtgacagtggcttggaaggccgatggatctcctgtgaaagccggcgtggaaaccaccaagccatccaagcagagcaacaacaaatacgccgccagctcctacctgagcctgacacctgagcagtggaagtcccacagatcctacagctgccaagtgacccacgaaggcagcaccgtggaaaagacagtggcccctacagagtgcagcggcagagccgattgcggctttaccagcgagagctaccagcagggcgtgctgagcgccaccatcctgtacgagatcctgctgggcaaggccaccctgtacgccgtgctggtgtctgccctggtgctgatggctatggtcaagcggaaggacagccggggaagggccaagcgatctggatctggagcaacaaacttctcactactcaaacaagcaggtgacgtggaggagaatcccgggcctactagtatggactggatttggcgcatccttttccttgtcggcgctgctaccggcgcgcattccttcgaagaagtgcagctggttgaatcaggcggaggactggttcagcctggcggatctctgagactgtcttgtgccgccagcggctacaccttcaccaactactggatgaactgggtccgacaggcccctggcaaaggactggaatgggtcggaatgatcgaccccagcgacagcgagacacactacaaccacatcttcaaggaccgcttcaccatcagcgccgacaccagcaagaataccgcctacctccagatgaactccctgagagccgaggacaccgccgtgtactactgcgccagaaacctgtatctgtggggccagggaaccctggtcacagtgtcatctacgcgtgcctctacaaagggaccctccgtgtttcctctggctcccagcagcaagtctacaagcggaggaacagccgctctgggctgcctggtcaaggattactttcccgagcctgtgaccgtgtcctggaatagcggagcactgacaagcggcgtgcacacctttccagccgtgctgcaaagcagcggcctgtactctctgagcagcgtggtcacagtgcctagctctagcctgggcacccagacctacatctgcaatgtgaaccacaagcctagcaacaccaaggtggacaagagagtggaacccaagagctgtatccccgaggacacattcttcccaagccccgagagcagctgcgacgtgaagctggtggaaaagagcttcgagacagacaccaacctgaacttccagaacctgagcgtgatcggcttcagaatcctgctgctgaaagtggccggctttaacctgctgatgaccctgcggctgtggtccagc

SEQ ID NO: 37178 - DNA, 1347 bp, synthetic construct
  source 1..1347: mol_type = other DNA
atggccttaccagtgaccgccttgctcctgccgctggccttgctgctccacgccgccaggccggacatccagatgacacagagccctagcagcctgtctgccagcgtgggagacagagtgaccatcacatgcaagagcagccagagcctgctggactccgatggcaagacctacctgaactggtatcagcagaagcccggcaaggcccctaagctgctgatctacctggtgtccaagctggatagcggcgtgcccagcagattttctggcagcggcagcggaaccgacttcaccctgacaatatccagcctccagcctgaggacttcgccacctactactgcttccaaggcacccactttccatacaccttcggccagggcaccaaggtggaaatcaaaagaggcggaggcggaagtggaggcggaggatctggcggcggaggctctgaagtgcagctggttgaatcaggcggaggactggttcagcctggcggatctctgagactgtcttgtgccgccagcggctacaccttcaccaactactggatgaactgggtccgacaggcccctggcaaaggactggaatgggtcggaatgatcgaccccagcgacagcgagacacactacaaccacatcttcaaggaccgcttcaccatcagcgccgacaccagcaagaataccgcctacctccagatgaactccctgagagccgaggacaccgccgtgtactactgcgccagaaacctgtatctgtggggccagggaaccctggtcacagtgtcatctacgcgtgacggtaacgaggagatgggaggaatcactcaaaccccttacaaagtctcaatttcaggaacaactgttatccttacatgtccccagtatcctggcagcgagatcctttggcagcataacgacaagaatatagggggagatgaagacgataagaatatcggatctgacgaggatcacttgagcctgaaagagttctccgagcttgaacaaagcggatattatgtgtgctatccgcgcgggtcaaagccggaagacgctaacttttacctttatctccgagccagagtgtgcgaaaattgcatggaaatggacgttatgtccgttgctacaatagttatcgtagatatatgcatcacgggtggactgcttctgctggtttattattggtccaagaatagaaaggccaaagctaaacccgtgaccagaggcgctggcgcaggcggaaggcaaaggggacaaaacaaagaacggccaccaccagtgccaaatccagattatgagcctattcggaaaggacagagggacctgtactctggcctgaatcagagaagaatc

SEQ ID NO: 37179 - DNA, 1242 bp, synthetic construct
  source 1..1242: mol_type = other DNA
atggccttaccagtgaccgccttgctcctgccgctggccttgctgctccacgccgccaggccggacatccagatgacacagagccctagcagcctgtctgccagcgtgggagacagagtgaccatcacatgcaagagcagccagagcctgctggactccgatggcaagacctacctgaactggtatcagcagaagcccggcaaggcccctaagctgctgatctacctggtgtccaagctggatagcggcgtgcccagcagattttctggcagcggcagcggaaccgacttcaccctgacaatatccagcctccagcctgaggacttcgccacctactactgcttccaaggcacccactttccatacaccttcggccagggcaccaaggtggaaatcaaaagaggcggaggcggaagtggaggcggaggatctggcggcggaggctctgaagtgcagctggttgaatcaggcggaggactggttcagcctggcggatctctgagactgtcttgtgccgccagcggctacaccttcaccaactactggatgaactgggtccgacaggcccctggcaaaggactggaatgggtcggaatgatcgaccccagcgacagcgagacacactacaaccacatcttcaaggaccgcttcaccatcagcgccgacaccagcaagaataccgcctacctccagatgaactccctgagagccgaggacaccgccgtgtactactgcgccagaaacctgtatctgtggggccagggaaccctggtcacagtgtcatctacgcgtttcaagatccccatcgaggaactggaagatcgggtgttcgtgaactgcaacacctctatcacctgggtggaaggcaccgtgggaacactgctgagcgacatcaccagactggacctcggcaagcggattctggaccctcggggcatctacagatgcaacggcaccgacatctacaaggacaaagaaagcaccgtgcaggtccactacagaatgtgccagtcctgcgtggaactggaccctgctacagtggccggcatcatcgtgaccgatgtgatcgctactctgctgctggctctgggagtgttctgcttcgccggacacgaaacaggcagactgtctggcgctgccgatacacaggccctgctgagaaacgaccaagtgtatcagcccctgcgcgacagagatgatgcccagtattctcacctcggcggcaactgggctagaaacaag

SEQ ID NO: 37180 - DNA, 1272 bp, synthetic construct
  source 1..1272: mol_type = other DNA
atggccttaccagtgaccgccttgctcctgccgctggccttgctgctccacgccgccaggccggacatccagatgacacagagccctagcagcctgtctgccagcgtgggagacagagtgaccatcacatgcaagagcagccagagcctgctggactccgatggcaagacctacctgaactggtatcagcagaagcccggcaaggcccctaagctgctgatctacctggtgtccaagctggatagcggcgtgcccagcagattttctggcagcggcagcggaaccgacttcaccctgacaatatccagcctccagcctgaggacttcgccacctactactgcttccaaggcacccactttccatacaccttcggccagggcaccaaggtggaaatcaaaagaggcggaggcggaagtggaggcggaggatctggcggcggaggctctgaagtgcagctggttgaatcaggcggaggactggttcagcctggcggatctctgagactgtcttgtgccgccagcggctacaccttcaccaactactggatgaactgggtccgacaggcccctggcaaaggactggaatgggtcggaatgatcgaccccagcgacagcgagacacactacaaccacatcttcaaggaccgcttcaccatcagcgccgacaccagcaagaataccgcctacctccagatgaactccctgagagccgaggacaccgccgtgtactactgcgccagaaacctgtatctgtggggccagggaaccctggtcacagtgtcatctacgcgtcagagcatcaagggcaaccacctggtcaaggtgtacgactaccaagaggacggcagcgtgctgctgacatgtgatgccgaggccaagaacatcacctggtttaaggacggcaagatgatcggcttcctgaccgaggacaagaagaagtggaacctgggcagcaacgctaaggaccccagaggcatgtatcagtgcaagggcagccagaacaagagcaagcccctccaggtgtactaccggatgtgccagaactgcatcgagctgaacgccgctaccatcagcggctttctgttcgccgagatcgtgtccatcttcgtgctggccgtgggcgtgtactttatcgctggacaggatggcgtgcggcagagcagagcttccgataagcaaaccctgctgcctaacgaccagctgtaccagcctctgaaggacagagaggacgaccagtacagccacctccagggcaatcagctgagaagaaac

SEQ ID NO: 37181 - DNA, 1221 bp, synthetic construct
  source 1..1221: mol_type = other DNA
atggccttaccagtgaccgccttgctcctgccgctggccttgctgctccacgccgccaggccggacatccagatgacacagagccctagcagcctgtctgccagcgtgggagacagagtgaccatcacatgcaagagcagccagagcctgctggactccgatggcaagacctacctgaactggtatcagcagaagcccggcaaggcccctaagctgctgatctacctggtgtccaagctggatagcggcgtgcccagcagattttctggcagcggcagcggaaccgacttcaccctgacaatatccagcctccagcctgaggacttcgccacctactactgcttccaaggcacccactttccatacaccttcggccagggcaccaaggtggaaatcaaaagaggcggaggcggaagtggaggcggaggatctggcggcggaggctctgaagtgcagctggttgaatcaggcggaggactggttcagcctggcggatctctgagactgtcttgtgccgccagcggctacaccttcaccaactactggatgaactgggtccgacaggcccctggcaaaggactggaatgggtcggaatgatcgaccccagcgacagcgagacacactacaaccacatcttcaaggaccgcttcaccatcagcgccgacaccagcaagaataccgcctacctccagatgaactccctgagagccgaggacaccgccgtgtactactgcgccagaaacctgtatctgtggggccagggaaccctggtcacagtgtcatctacgcgtcagagttttgggttgttggaccctaaattgtgctatctgttggacggaatcctgttcatttacggagtgatcctgaccgcattgttcctgcgggttaagttttccagatccgcagacgcacccgcttaccaacaagggcagaaccaactctacaatgaacttaatttggggcggagggaagagtacgacgttctggacaaaaggaggggacgagatcccgagatgggcggaaagcctcagcgaaggaagaatccgcaagaggggctttataacgaactccagaaagataaaatggcagaagcctatagtgagattgggatgaagggagaaaggaggaggggtaaaggtcacgatgggttgtaccaaggattgagcacagccactaaagatacctatgatgcgctccacatgcaggccctgccgccaaga

SEQ ID NO: 37182 - DNA, 1506 bp, synthetic construct
  source 1..1506: mol_type = other DNA
atggccttaccagtgaccgccttgctcctgccgctggccttgctgctccacgccgccaggccggacatccagatgacacagagccctagcagcctgtctgccagcgtgggagacagagtgaccatcacatgcaagagcagccagagcctgctggactccgatggcaagacctacctgaactggtatcagcagaagcccggcaaggcccctaagctgctgatctacctggtgtccaagctggatagcggcgtgcccagcagattttctggcagcggcagcggaaccgacttcaccctgacaatatccagcctccagcctgaggacttcgccacctactactgcttccaaggcacccactttccatacaccttcggccagggcaccaaggtggaaatcaaaagaggcggaggcggaagtggaggcggaggatctggcggcggaggctctgaagtgcagctggttgaatcaggcggaggactggttcagcctggcggatctctgagactgtcttgtgccgccagcggctacaccttcaccaactactggatgaactgggtccgacaggcccctggcaaaggactggaatgggtcggaatgatcgaccccagcgacagcgagacacactacaaccacatcttcaaggaccgcttcaccatcagcgccgacaccagcaagaataccgcctacctccagatgaactccctgagagccgaggacaccgccgtgtactactgcgccagaaacctgtatctgtggggccagggaaccctggtcacagtgtcatctacgcgtggaatgaggactgaggatcttcccaaagctgtcgtctttctcgaaccccaatggtatcgggtgctcgaaaaagactctgtgacactgaaatgccaaggggcctactctcccgaggacaactccacacagtggtttcataatgagtccctcatcagctctcaggccagctcttatttcattgatgccgctacagtggacgactccggcgagtatcggtgtcagaccaatctgtctacactgtctgaccccgtgcagcttgaggtccacattggatggttgctcttgcaagccccacgctgggttttcaaagaggaagatccaatccatctgcggtgccacagctggaaaaacaccgctctccacaaagtcacatacctgcaaaatggcaaaggacgcaaatacttccatcacaattccgatttttacattccgaaggctaccctgaaagacagcggcagctatttctgccggggactcgtcggctccaagaatgtgtcctccgaaaccgtgaatatcacgattacccaaggactggctgtgcctacaatctctagcttctttccgcctggataccaagtctccttctgtcttgtgatggtcctcctgtttgctgtggacacaggactgtacttttccgtgaaaacgaacatccgcagctccacacgcgattggaaagatcacaagtttaaatggcgcaaagatccccaggacaag

SEQ ID NO: 37183 - DNA, 1431 bp, synthetic construct
  source 1..1431: mol_type = other DNA
atggccttaccagtgaccgccttgctcctgccgctggccttgctgctccacgccgccaggccggacatccagatgacacagagccctagcagcctgtctgccagcgtgggagacagagtgaccatcacatgcaagagcagccagagcctgctggactccgatggcaagacctacctgaactggtatcagcagaagcccggcaaggcccctaagctgctgatctacctggtgtccaagctggatagcggcgtgcccagcagattttctggcagcggcagcggaaccgacttcaccctgacaatatccagcctccagcctgaggacttcgccacctactactgcttccaaggcacccactttccatacaccttcggccagggcaccaaggtggaaatcaaaagaggcggaggcggaagtggaggcggaggatctggcggcggaggctctgaagtgcagctggttgaatcaggcggaggactggttcagcctggcggatctctgagactgtcttgtgccgccagcggctacaccttcaccaactactggatgaactgggtccgacaggcccctggcaaaggactggaatgggtcggaatgatcgaccccagcgacagcgagacacactacaaccacatcttcaaggaccgcttcaccatcagcgccgacaccagcaagaataccgcctacctccagatgaactccctgagagccgaggacaccgccgtgtactactgcgccagaaacctgtatctgtggggccagggaaccctggtcacagtgtcatctacgcgtggaatgaggactgaggatcttcccaaagctgtcgtctttctcgaaccccaatggtatcgggtgctcgaaaaagactctgtgacactgaaatgccaaggggcctactctcccgaggacaactccacacagtggtttcataatgagtccctcatcagctctcaggccagctcttatttcattgatgccgctacagtggacgactccggcgagtatcggtgtcagaccaatctgtctacactgtctgaccccgtgcagcttgaggtccacattggatggttgctcttgcaagccccacgctgggttttcaaagaggaagatccaatccatctgcggtgccacagctggaaaaacaccgctctccacaaagtcacatacctgcaaaatggcaaaggacgcaaatacttccatcacaattccgatttttacattccgaaggctaccctgaaagacagcggcagctatttctgccggggactcgtcggctccaagaatgtgtcctccgaaaccgtgaatatcacgattacccaaggactggctgtgcctacaatctctagcttctttccgcctggataccaagtctccttctgtcttgtgatggtcctcctgtttgctgtggacacaggactgtacttttccgtg

SEQ ID NO: 37184 - DNA, 1434 bp, synthetic construct
  source 1..1434: mol_type = other DNA
atggccttaccagtgaccgccttgctcctgccgctggccttgctgctccacgccgccaggccggacatccagatgacacagagccctagcagcctgtctgccagcgtgggagacagagtgaccatcacatgcaagagcagccagagcctgctggactccgatggcaagacctacctgaactggtatcagcagaagcccggcaaggcccctaagctgctgatctacctggtgtccaagctggatagcggcgtgcccagcagattttctggcagcggcagcggaaccgacttcaccctgacaatatccagcctccagcctgaggacttcgccacctactactgcttccaaggcacccactttccatacaccttcggccagggcaccaaggtggaaatcaaaagaggcggaggcggaagtggaggcggaggatctggcggcggaggctctgaagtgcagctggttgaatcaggcggaggactggttcagcctggcggatctctgagactgtcttgtgccgccagcggctacaccttcaccaactactggatgaactgggtccgacaggcccctggcaaaggactggaatgggtcggaatgatcgaccccagcgacagcgagacacactacaaccacatcttcaaggaccgcttcaccatcagcgccgacaccagcaagaataccgcctacctccagatgaactccctgagagccgaggacaccgccgtgtactactgcgccagaaacctgtatctgtggggccagggaaccctggtcacagtgtcatctacgcgtggaatgaggactgaggatcttcccaaagctgtcgtctttctcgaaccccaatggtatcgggtgctcgaaaaagactctgtgacactgaaatgccaaggggcctactctcccgaggacaactccacacagtggtttcataatgagtccctcatcagctctcaggccagctcttatttcattgatgccgctacagtggacgactccggcgagtatcggtgtcagaccaatctgtctacactgtctgaccccgtgcagcttgaggtccacattggatggttgctcttgcaagccccacgctgggttttcaaagaggaagatccaatccatctgcggtgccacagctggaaaaacaccgctctccacaaagtcacatacctgcaaaatggcaaaggacgcaaatacttccatcacaattccgatttttacattccgaaggctaccctgaaagacagcggcagctatttctgccggggactcgtcggctccaagaatgtgtcctccgaaaccgtgaatatcacgattacccaaggactggctgtgcctacaatctctagcttctttccgcctggataccaagtctccttctgtcttgtgatggtcctcctgtttgctgtggacacaggactgtacttttccgtgaaa

SEQ ID NO: 37185 - DNA, 2166 bp, synthetic construct
  source 1..2166: mol_type = other DNA
atggccttaccagtgaccgccttgctcctgccgctggccttgctgctccacgccgccaggccggacatccagatgacacagagccctagcagcctgtctgccagcgtgggagacagagtgaccatcacatgcaagagcagccagagcctgctggactccgatggcaagacctacctgaactggtatcagcagaagcccggcaaggcccctaagctgctgatctacctggtgtccaagctggatagcggcgtgcccagcagattttctggcagcggcagcggaaccgacttcaccctgacaatatccagcctccagcctgaggacttcgccacctactactgcttccaaggcacccactttccatacaccttcggccagggcaccaaggtggaaatcaaaagactcgagggacagcctaaggccaatcctaccgtgacactgttccctccaagcagcgaagaactccaggccaacaaggccacacttgtgtgcctgatctccgacttctaccctggggctgtgacagtggcttggaaggccgatggatctcctgtgaaagccggcgtggaaaccaccaagccatccaagcagagcaacaacaaatacgccgccagctcctacctgagcctgacacctgagcagtggaagtcccacagatcctacagctgccaagtgacccacgaaggcagcaccgtggaaaagacagtggcccctacagagtgcagcggatcccagagcttcggcctgctggaccccaagctgtgctacctgctggatggcatcctgttcatctacggcgtgatcctgaccgccctgttcctgagagtgaagttcagcagaagcgccgacgcccctgcctaccagcagggacagaaccaactgtacaacgagctgaacctgggcagacgggaagagtacgacgtgctggacaagcggagaggcagggaccctgagatgggcggaaagccccagcggagaaagaacccccaggaaggactgtataacgaactccagaaagacaagatggccgaagcctacagcgagatcggcatgaagggcgagcggagaagaggcaagggccacgatggcctgtaccagggcctgagcaccgccaccaaggacacctatgacgccctgcacatgcaggccctgcctccaagaagggccaagcgatctggatctggagcaacaaacttctcactactcaaacaagcaggtgacgtggaggagaatcccgggcctactagtatggactggatttggcgcatccttttccttgtcggcgctgctaccggcgcgcattccttcgaagaagtgcagctggttgaatcaggcggaggactggttcagcctggcggatctctgagactgtcttgtgccgccagcggctacaccttcaccaactactggatgaactgggtccgacaggcccctggcaaaggactggaatgggtcggaatgatcgaccccagcgacagcgagacacactacaaccacatcttcaaggaccgcttcaccatcagcgccgacaccagcaagaataccgcctacctccagatgaactccctgagagccgaggacaccgccgtgtactactgcgccagaaacctgtatctgtggggccagggaaccctggtcacagtgtcatctacgcgtgcctctacaaagggaccctccgtgtttcctctggctcccagcagcaagtctacaagcggaggaacagccgctctgggctgcctggtcaaggattactttcccgagcctgtgaccgtgtcctggaatagcggagcactgacaagcggcgtgcacacctttccagccgtgctgcaaagcagcggcctgtactctctgagcagcgtggtcacagtgcctagctctagcctgggcacccagacctacatctgcaatgtgaaccacaagcctagcaacaccaaggtggacaagagagtggaacccaagagctgtggtaccatcactcaaggtttggcagtgtcaaccatctcatcattctttccacctggctaccaagtgtccttctgcctggtcatggtgctgctgttcgccgtggataccggcctgtacttcagcgtcaagaccaacatccggtccagcaccagagactggaaggaccacaagttcaagtggcggaaggaccctcaggacaag

SEQ ID NO: 37186 - DNA, 2211 bp, synthetic construct
  source 1..2211: mol_type = other DNA
atggccttaccagtgaccgccttgctcctgccgctggccttgctgctccacgccgccaggccggacatccagatgacacagagccctagcagcctgtctgccagcgtgggagacagagtgaccatcacatgcaagagcagccagagcctgctggactccgatggcaagacctacctgaactggtatcagcagaagcccggcaaggcccctaagctgctgatctacctggtgtccaagctggatagcggcgtgcccagcagattttctggcagcggcagcggaaccgacttcaccctgacaatatccagcctccagcctgaggacttcgccacctactactgcttccaaggcacccactttccatacaccttcggccagggcaccaaggtggaaatcaaaagactcgaggacctgaagaacgtgttcccacctgaggtggccgtgttcgagcctagcgaggccgagatcagccacacccagaaagccaccctcgtgtgcctggctaccggcttctaccccgaccatgtggaactgtcttggtgggtcaacggcaaagaggtgcacagcggcgtgtctaccgacccccagccactgaaagaacagcccgccctgaacgacagccggtactgcctgagcagcagactgagagtgtccgccaccttctggcagaacccccggaaccacttcagatgccaggtgcagttctacggcctgagcgagaacgacgagtggacccaggacagagccaagcccgtgacccagatcgtgtctgccgaagcctggggcagagccgattgcggatcccagagcttcggcctgctggaccccaagctgtgctacctgctggatggcatcctgttcatctacggcgtgatcctgaccgccctgttcctgagagtgaagttcagcagaagcgccgacgcccctgcctaccagcagggacagaaccaactgtacaacgagctgaacctgggcagacgggaagagtacgacgtgctggacaagcggagaggcagggaccctgagatgggcggaaagccccagcggagaaagaacccccaggaaggactgtataacgaactccagaaagacaagatggccgaagcctacagcgagatcggcatgaagggcgagcggagaagaggcaagggccacgatggcctgtaccagggcctgagcaccgccaccaaggacacctatgacgccctgcacatgcaggccctgcctccaagaagggccaagcgatctggatctggagcaacaaacttctcactactcaaacaagcaggtgacgtggaggagaatcccgggcctactagtatggactggatttggcgcatccttttccttgtcggcgctgctaccggcgcgcattccttcgaagaagtgcagctggttgaatcaggcggaggactggttcagcctggcggatctctgagactgtcttgtgccgccagcggctacaccttcaccaactactggatgaactgggtccgacaggcccctggcaaaggactggaatgggtcggaatgatcgaccccagcgacagcgagacacactacaaccacatcttcaaggaccgcttcaccatcagcgccgacaccagcaagaataccgcctacctccagatgaactccctgagagccgaggacaccgccgtgtactactgcgccagaaacctgtatctgtggggccagggaaccctggtcacagtgtcatctacgcgtatccagaaccctgatcctgccgtgtaccagctgcgggatagcaagagcagcgacaagagcgtgtgtctgttcaccgacttcgacagccagaccaacgtgtcccagagcaaggactccgacgtgtacatcaccgataagaccgtgctggacatgcggagcatggacttcaagagcaactccgccgtggcctggtccaacaagtccgatttcgcctgcgccaacgccttcaacaacagcattatccccgaggacacattcttcccaagccccgagagcagctgcggtaccatcactcaaggtttggcagtgtcaaccatctcatcattctttccacctggctaccaagtgtccttctgcctggtcatggtgctgctgttcgccgtggataccggcctgtacttcagcgtcaagaccaacatccggtccagcaccagagactggaaggaccacaagttcaagtggcggaaggaccctcaggacaag

SEQ ID NO: 37187 - DNA, 2136 bp, synthetic construct
  source 1..2136: mol_type = other DNA
atggccttaccagtgaccgccttgctcctgccgctggccttgctgctccacgccgccaggccggacatccagatgacacagagccctagcagcctgtctgccagcgtgggagacagagtgaccatcacatgcaagagcagccagagcctgctggactccgatggcaagacctacctgaactggtatcagcagaagcccggcaaggcccctaagctgctgatctacctggtgtccaagctggatagcggcgtgcccagcagattttctggcagcggcagcggaaccgacttcaccctgacaatatccagcctccagcctgaggacttcgccacctactactgcttccaaggcacccactttccatacaccttcggccagggcaccaaggtggaaatcaaaagactcgaggacctgaagaacgtgttcccacctgaggtggccgtgttcgagcctagcgaggccgagatcagccacacccagaaagccaccctcgtgtgcctggctaccggcttctaccccgaccatgtggaactgtcttggtgggtcaacggcaaagaggtgcacagcggcgtgtctaccgacccccagccactgaaagaacagcccgccctgaacgacagccggtactgcctgagcagcagactgagagtgtccgccaccttctggcagaacccccggaaccacttcagatgccaggtgcagttctacggcctgagcgagaacgacgagtggacccaggacagagccaagcccgtgacccagatcgtgtctgccgaagcctggggcagagccgattgcggatcccagagcttcggcctgctggaccccaagctgtgctacctgctggatggcatcctgttcatctacggcgtgatcctgaccgccctgttcctgagagtgaagttcagcagaagcgccgacgcccctgcctaccagcagggacagaaccaactgtacaacgagctgaacctgggcagacgggaagagtacgacgtgctggacaagcggagaggcagggaccctgagatgggcggaaagccccagcggagaaagaacccccaggaaggactgtataacgaactccagaaagacaagatggccgaagcctacagcgagatcggcatgaagggcgagcggagaagaggcaagggccacgatggcctgtaccagggcctgagcaccgccaccaaggacacctatgacgccctgcacatgcaggccctgcctccaagaagggccaagcgatctggatctggagcaacaaacttctcactactcaaacaagcaggtgacgtggaggagaatcccgggcctactagtatggactggatttggcgcatccttttccttgtcggcgctgctaccggcgcgcattccttcgaagaagtgcagctggttgaatcaggcggaggactggttcagcctggcggatctctgagactgtcttgtgccgccagcggctacaccttcaccaactactggatgaactgggtccgacaggcccctggcaaaggactggaatgggtcggaatgatcgaccccagcgacagcgagacacactacaaccacatcttcaaggaccgcttcaccatcagcgccgacaccagcaagaataccgcctacctccagatgaactccctgagagccgaggacaccgccgtgtactactgcgccagaaacctgtatctgtggggccagggaaccctggtcacagtgtcatctacgcgtatccagaaccctgatcctgccgtgtaccagctgcgggatagcaagagcagcgacaagagcgtgtgtctgttcaccgacttcgacagccagaccaacgtgtcccagagcaaggactccgacgtgtacatcaccgataagaccgtgctggacatgcggagcatggacttcaagagcaactccgccgtggcctggtccaacaagtccgatttcgcctgcgccaacgccttcaacaacagcattatccccgaggacacattcttcccaagccccgagagcagctgcggtaccatcactcaaggtttggcagtgtcaaccatctcatcattctttccacctggctaccaagtgtccttctgcctggtcatggtgctgctgttcgccgtggataccggcctgtacttcagcgtc

SEQ ID NO: 37188 - DNA, 2139 bp, synthetic construct
  source 1..2139: mol_type = other DNA
atggccttaccagtgaccgccttgctcctgccgctggccttgctgctccacgccgccaggccggacatccagatgacacagagccctagcagcctgtctgccagcgtgggagacagagtgaccatcacatgcaagagcagccagagcctgctggactccgatggcaagacctacctgaactggtatcagcagaagcccggcaaggcccctaagctgctgatctacctggtgtccaagctggatagcggcgtgcccagcagattttctggcagcggcagcggaaccgacttcaccctgacaatatccagcctccagcctgaggacttcgccacctactactgcttccaaggcacccactttccatacaccttcggccagggcaccaaggtggaaatcaaaagactcgaggacctgaagaacgtgttcccacctgaggtggccgtgttcgagcctagcgaggccgagatcagccacacccagaaagccaccctcgtgtgcctggctaccggcttctaccccgaccatgtggaactgtcttggtgggtcaacggcaaagaggtgcacagcggcgtgtctaccgacccccagccactgaaagaacagcccgccctgaacgacagccggtactgcctgagcagcagactgagagtgtccgccaccttctggcagaacccccggaaccacttcagatgccaggtgcagttctacggcctgagcgagaacgacgagtggacccaggacagagccaagcccgtgacccagatcgtgtctgccgaagcctggggcagagccgattgcggatcccagagcttcggcctgctggaccccaagctgtgctacctgctggatggcatcctgttcatctacggcgtgatcctgaccgccctgttcctgagagtgaagttcagcagaagcgccgacgcccctgcctaccagcagggacagaaccaactgtacaacgagctgaacctgggcagacgggaagagtacgacgtgctggacaagcggagaggcagggaccctgagatgggcggaaagccccagcggagaaagaacccccaggaaggactgtataacgaactccagaaagacaagatggccgaagcctacagcgagatcggcatgaagggcgagcggagaagaggcaagggccacgatggcctgtaccagggcctgagcaccgccaccaaggacacctatgacgccctgcacatgcaggccctgcctccaagaagggccaagcgatctggatctggagcaacaaacttctcactactcaaacaagcaggtgacgtggaggagaatcccgggcctactagtatggactggatttggcgcatccttttccttgtcggcgctgctaccggcgcgcattccttcgaagaagtgcagctggttgaatcaggcggaggactggttcagcctggcggatctctgagactgtcttgtgccgccagcggctacaccttcaccaactactggatgaactgggtccgacaggcccctggcaaaggactggaatgggtcggaatgatcgaccccagcgacagcgagacacactacaaccacatcttcaaggaccgcttcaccatcagcgccgacaccagcaagaataccgcctacctccagatgaactccctgagagccgaggacaccgccgtgtactactgcgccagaaacctgtatctgtggggccagggaaccctggtcacagtgtcatctacgcgtatccagaaccctgatcctgccgtgtaccagctgcgggatagcaagagcagcgacaagagcgtgtgtctgttcaccgacttcgacagccagaccaacgtgtcccagagcaaggactccgacgtgtacatcaccgataagaccgtgctggacatgcggagcatggacttcaagagcaactccgccgtggcctggtccaacaagtccgatttcgcctgcgccaacgccttcaacaacagcattatccccgaggacacattcttcccaagccccgagagcagctgcggtaccatcactcaaggtttggcagtgtcaaccatctcatcattctttccacctggctaccaagtgtccttctgcctggtcatggtgctgctgttcgccgtggataccggcctgtacttcagcgtcaag

SEQ ID NO: 37189 - DNA, 2142 bp, synthetic construct
  source 1..2142: mol_type = other DNA
atggccttaccagtgaccgccttgctcctgccgctggccttgctgctccacgccgccaggccggacatccagatgacacagagccctagcagcctgtctgccagcgtgggagacagagtgaccatcacatgcaagagcagccagagcctgctggactccgatggcaagacctacctgaactggtatcagcagaagcccggcaaggcccctaagctgctgatctacctggtgtccaagctggatagcggcgtgcccagcagattttctggcagcggcagcggaaccgacttcaccctgacaatatccagcctccagcctgaggacttcgccacctactactgcttccaaggcacccactttccatacaccttcggccagggcaccaaggtggaaatcaaaagactcgaggacctgaagaacgtgttcccacctgaggtggccgtgttcgagcctagcgaggccgagatcagccacacccagaaagccaccctcgtgtgcctggctaccggcttctaccccgaccatgtggaactgtcttggtgggtcaacggcaaagaggtgcacagcggcgtgtctaccgacccccagccactgaaagaacagcccgccctgaacgacagccggtactgcctgagcagcagactgagagtgtccgccaccttctggcagaacccccggaaccacttcagatgccaggtgcagttctacggcctgagcgagaacgacgagtggacccaggacagagccaagcccgtgacccagatcgtgtctgccgaagcctggggcagagccgattgcggatcccagagcttcggcctgctggaccccaagctgtgctacctgctggatggcatcctgttcatctacggcgtgatcctgaccgccctgttcctgagagtgaagttcagcagaagcgccgacgcccctgcctaccagcagggacagaaccaactgtacaacgagctgaacctgggcagacgggaagagtacgacgtgctggacaagcggagaggcagggaccctgagatgggcggaaagccccagcggagaaagaacccccaggaaggactgtataacgaactccagaaagacaagatggccgaagcctacagcgagatcggcatgaagggcgagcggagaagaggcaagggccacgatggcctgtaccagggcctgagcaccgccaccaaggacacctatgacgccctgcacatgcaggccctgcctccaagaagggccaagcgatctggatctggagcaacaaacttctcactactcaaacaagcaggtgacgtggaggagaatcccgggcctactagtatggactggatttggcgcatccttttccttgtcggcgctgctaccggcgcgcattccttcgaagaagtgcagctggttgaatcaggcggaggactggttcagcctggcggatctctgagactgtcttgtgccgccagcggctacaccttcaccaactactggatgaactgggtccgacaggcccctggcaaaggactggaatgggtcggaatgatcgaccccagcgacagcgagacacactacaaccacatcttcaaggaccgcttcaccatcagcgccgacaccagcaagaataccgcctacctccagatgaactccctgagagccgaggacaccgccgtgtactactgcgccagaaacctgtatctgtggggccagggaaccctggtcacagtgtcatctacgcgtatccagaaccctgatcctgccgtgtaccagctgcgggatagcaagagcagcgacaagagcgtgtgtctgttcaccgacttcgacagccagaccaacgtgtcccagagcaaggactccgacgtgtacatcaccgataagaccgtgctggacatgcggagcatggacttcaagagcaactccgccgtggcctggtccaacaagtccgatttcgcctgcgccaacgccttcaacaacagcattatccccgaggacacattcttcccaagccccgagagcagctgcggtaccatcactcaaggtttggcagtgtcaaccatctcatcattctttccacctggctaccaagtgtccttctgcctggtcatggtgctgctgttcgccgtggataccggcctgtacttcagcgtcaagacc

SEQ ID NO: 37190 - DNA, 1953 bp, synthetic construct
  source 1..1953: mol_type = other DNA
atggccttaccagtgaccgccttgctcctgccgctggccttgctgctccacgccgccaggccggacatccagatgacacagagccctagcagcctgtctgccagcgtgggagacagagtgaccatcacatgcaagagcagccagagcctgctggactccgatggcaagacctacctgaactggtatcagcagaagcccggcaaggcccctaagctgctgatctacctggtgtccaagctggatagcggcgtgcccagcagattttctggcagcggcagcggaaccgacttcaccctgacaatatccagcctccagcctgaggacttcgccacctactactgcttccaaggcacccactttccatacaccttcggccagggcaccaaggtggaaatcaaaagactcgagggacagcctaaggccaatcctaccgtgacactgttccctccaagcagcgaagaactccaggccaacaaggccacacttgtgtgcctgatctccgacttctaccctggggctgtgacagtggcttggaaggccgatggatctcctgtgaaagccggcgtggaaaccaccaagccatccaagcagagcaacaacaaatacgccgccagctcctacctgagcctgacacctgagcagtggaagtcccacagatcctacagctgccaagtgacccacgaaggcagcaccgtggaaaagacagtggcccctacagagtgcagcggatccctgggagagcctcagctgtgctatatcctggacgccatcctgtttctgtacggcatcgtgctgaccctgctgtactgccggctgaagatccaagtgcggaaggccgccatcaccagctacgagaaatccgacggcgtgtacaccggcctgagcaccagaaatcaagagacatacgagacactgaagcacgaaaagcctccacaaagggccaagcgatctggatctggagcaacaaacttctcactactcaaacaagcaggtgacgtggaggagaatcccgggcctactagtatggactggatttggcgcatccttttccttgtcggcgctgctaccggcgcgcattccttcgaagaagtgcagctggttgaatcaggcggaggactggttcagcctggcggatctctgagactgtcttgtgccgccagcggctacaccttcaccaactactggatgaactgggtccgacaggcccctggcaaaggactggaatgggtcggaatgatcgaccccagcgacagcgagacacactacaaccacatcttcaaggaccgcttcaccatcagcgccgacaccagcaagaataccgcctacctccagatgaactccctgagagccgaggacaccgccgtgtactactgcgccagaaacctgtatctgtggggccagggaaccctggtcacagtgtcatctacgcgtgcctctacaaagggaccctccgtgtttcctctggctcccagcagcaagtctacaagcggaggaacagccgctctgggctgcctggtcaaggattactttcccgagcctgtgaccgtgtcctggaatagcggagcactgacaagcggcgtgcacacctttccagccgtgctgcaaagcagcggcctgtactctctgagcagcgtggtcacagtgcctagctctagcctgggcacccagacctacatctgcaatgtgaaccacaagcctagcaacaccaaggtggacaagagagtggaacccaagagctgtggtaccctcggagaaccacagctctgttacattctggatgctatcctgttcctctatgggatcgtcctgacactcctgtattgcagactcaaaattcaagttcgcaaagccgccattacctcttacgagaagagtgatggggtgtacacaggactgtctacccggaatcaagaaacctacgaaaccctcaaacatgagaagccacctcagtaa

SEQ ID NO: 37191 - DNA, 1860 bp, synthetic construct
  source 1..1860: mol_type = other DNA
atggccttaccagtgaccgccttgctcctgccgctggccttgctgctccacgccgccaggccggacatccagatgacacagagccctagcagcctgtctgccagcgtgggagacagagtgaccatcacatgcaagagcagccagagcctgctggactccgatggcaagacctacctgaactggtatcagcagaagcccggcaaggcccctaagctgctgatctacctggtgtccaagctggatagcggcgtgcccagcagattttctggcagcggcagcggaaccgacttcaccctgacaatatccagcctccagcctgaggacttcgccacctactactgcttccaaggcacccactttccatacaccttcggccagggcaccaaggtggaaatcaaaagactcgaggacctgaagaacgtgttcccacctgaggtggccgtgttcgagcctagcgaggccgagatcagccacacccagaaagccaccctcgtgtgcctggctaccggcttctaccccgaccatgtggaactgtcttggtgggtcaacggcaaagaggtgcacagcggcgtgtgtaccgacccccagccactgaaagaacagcccgccctgaacgacagccggtactgcctgagcagcagactgagagtgtccgccaccttctggcagaacccccggaaccacttcagatgccaggtgcagttctacggcctgagcgagaacgacgagtggacccaggacagagccaagcccgtgacccagatcgtgtctgccgaagcctggggcagagccgattgcggctttaccagcgagagctaccagcagggcgtgctgagcgcctactacatgtacttgttgctgctgctgaagtccgtggtgtacttcgccatcatcacatgctgcctgctgcggagaaccgccttctgctgcaacggcgagaagtctagggccaagcgatctggatctggagcaacaaacttctcactactcaaacaagcaggtgacgtggaggagaatcccgggcctactagtatggactggatttggcgcatccttttccttgtcggcgctgctaccggcgcgcattccttcgaagaagtgcagctggttgaatcaggcggaggactggttcagcctggcggatctctgagactgtcttgtgccgccagcggctacaccttcaccaactactggatgaactgggtccgacaggcccctggcaaaggactggaatgggtcggaatgatcgaccccagcgacagcgagacacactacaaccacatcttcaaggaccgcttcaccatcagcgccgacaccagcaagaataccgcctacctccagatgaactccctgagagccgaggacaccgccgtgtactactgcgccagaaacctgtatctgtggggccagggaaccctggtcacagtgtcatctacgcgtatccagaaccctgatcctgccgtgtaccagctgcgggatagcaagagcagcgacaagagcgtgtgtctgttcaccgacttcgacagccagaccaacgtgtcccagagcaaggactccgacgtgtacatcaccgataagtgcgtgctggacatgcggagcatggacttcaagagcaactccgccgtggcctggtccaacaagtccgatttcgcctgcgccaacgccttcaacaacagcattatccccgaggacacattcttcccaagccccgagagcagctgcgacgtgaagctggtggaaaagagcttcgagacagacaccaacctgaacttccagaacctgagcgtgatcggcttcagaatcctgctgctgaaagtggccggctttaacctgctgatgaccctgcggctgtggtccagc

SEQ ID NO: 37192 - DNA, 1881 bp, synthetic construct
  source 1..1881: mol_type = other DNA
atggccttaccagtgaccgccttgctcctgccgctggccttgctgctccacgccgccaggccggacatccagatgacacagagccctagcagcctgtctgccagcgtgggagacagagtgaccatcacatgcaagagcagccagagcctgctggactccgatggcaagacctacctgaactggtatcagcagaagcccggcaaggcccctaagctgctgatctacctggtgtccaagctggatagcggcgtgcccagcagattttctggcagcggcagcggaaccgacttcaccctgacaatatccagcctccagcctgaggacttcgccacctactactgcttccaaggcacccactttccatacaccttcggccagggcaccaaggtggaaatcaaaagactcgaggacaagcagctggacgccgacgtgtcccccaagcctaccatcttcctgccctctatcgccgagacaaagctccagaaggccggcacctacctgtgcctgctggaaaagttcttcccagatgtgattaagatccactggcaggaaaagaagtccaacaccatcctgggcagccaggaaggcaacaccatgaagaccaacgacacctacatgaagttcagctggctgaccgtgcccgagaagtccctggacaaagaacacagatgcatcgtgcggcacgaaaacaacaagaacggcgtggaccaggaaatcatcttcccacccatcaagaccgatgtgattacaatggaccccaaggacaactgctccaaggacgccaacgataccctgctgctccagctgaccaacaccagcgcctactacatgtacgagatcctgctgggcaaggccaccctgtacgccgtgctggtgtctgccctggtgctgatggctatggtcaagcggaaggacagccggggaagggccaagcgatctggatctggagcaacaaacttctcactactcaaacaagcaggtgacgtggaggagaatcccgggcctactagtatggactggatttggcgcatccttttccttgtcggcgctgctaccggcgcgcattccttcgaagaagtgcagctggttgaatcaggcggaggactggttcagcctggcggatctctgagactgtcttgtgccgccagcggctacaccttcaccaactactggatgaactgggtccgacaggcccctggcaaaggactggaatgggtcggaatgatcgaccccagcgacagcgagacacactacaaccacatcttcaaggaccgcttcaccatcagcgccgacaccagcaagaataccgcctacctccagatgaactccctgagagccgaggacaccgccgtgtactactgcgccagaaacctgtatctgtggggccagggaaccctggtcacagtgtcatctacgcgtagccagcctcacaccaagcccagcgtgttcgtgatgaagaacggcaccaacgtggcctgcctcgtgaaagagttctaccccaaggacatcaggatcaacctggtgtccagcaagaagatcaccgagttcgaccccgccatcgtgatctcccccagcggcaagtacaacgccgtgaagctggggaagtatgaggacagcaacagcgtgacctgctccgtgcagcacgacaacaagaccgtgcacagcaccgactttgaagtgaaaaccgactccaccgaccacgtgaagcccaaagagacagagaacaccaagcagcccagcaagagctgccacaagcccaaggccatcgtgcacaccgagaaagtgaacatgatgagcctgaccgtgatcggcttcagaatcctgctgctgaaagtggccggctttaacctgctgatgaccctgcggctgtggtccagctaa

SEQ ID NO: 37193 - DNA, 1881 bp, synthetic construct
  source 1..1881: mol_type = other DNA
atggccttaccagtgaccgccttgctcctgccgctggccttgctgctccacgccgccaggccggacatccagatgacacagagccctagcagcctgtctgccagcgtgggagacagagtgaccatcacatgcaagagcagccagagcctgctggactccgatggcaagacctacctgaactggtatcagcagaagcccggcaaggcccctaagctgctgatctacctggtgtccaagctggatagcggcgtgcccagcagattttctggcagcggcagcggaaccgacttcaccctgacaatatccagcctccagcctgaggacttcgccacctactactgcttccaaggcacccactttccatacaccttcggccagggcaccaaggtggaaatcaaaagactcgaggacaagcagctggacgccgacgtgtcccccaagcctaccatcttcctgccctctatcgccgagacaaagctccagaaggccggcacctacctgtgcctgctggaaaagttcttcccagatgtgattaagatccactggcaggaaaagaagtccaacaccatcctgggcagccaggaaggcaacaccatgaagaccaacgacacctacatgaagttcagctggctgaccgtgcccgagaagtccctggacaaagaacacagatgcatcgtgcggcacgaaaacaacaagaacggcgtggaccaggaaatcatcttcccacccatcaagaccgatgtgattacaatggaccccaaggacaactgctccaaggacgccaacgataccctgctgctccagctgaccaacaccagcgccaccatcctgtacgagatcctgctgggcaaggccaccctgtacgccgtgctggtgtctgccctggtgctgatggctatggtcaagcggaaggacagccggggaagggccaagcgatctggatctggagcaacaaacttctcactactcaaacaagcaggtgacgtggaggagaatcccgggcctactagtatggactggatttggcgcatccttttccttgtcggcgctgctaccggcgcgcattccttcgaagaagtgcagctggttgaatcaggcggaggactggttcagcctggcggatctctgagactgtcttgtgccgccagcggctacaccttcaccaactactggatgaactgggtccgacaggcccctggcaaaggactggaatgggtcggaatgatcgaccccagcgacagcgagacacactacaaccacatcttcaaggaccgcttcaccatcagcgccgacaccagcaagaataccgcctacctccagatgaactccctgagagccgaggacaccgccgtgtactactgcgccagaaacctgtatctgtggggccagggaaccctggtcacagtgtcatctacgcgtagccagcctcacaccaagcccagcgtgttcgtgatgaagaacggcaccaacgtggcctgcctcgtgaaagagttctaccccaaggacatcaggatcaacctggtgtccagcaagaagatcaccgagttcgaccccgccatcgtgatctcccccagcggcaagtacaacgccgtgaagctggggaagtatgaggacagcaacagcgtgacctgctccgtgcagcacgacaacaagaccgtgcacagcaccgactttgaagtgaaaaccgactccaccgaccacgtgaagcccaaagagacagagaacaccaagcagcccagcaagagctgccacaagcccaaggccatcgtgcacaccgagaaagtgaacatgatgagcctgaccgtgatcggcttcagaatcctgctgctgaaagtggccggctttaacctgctgatgaccctgcggctgtggtccagctaa

SEQ ID NO: 37194 - DNA, 1881 bp, synthetic construct
  source 1..1881: mol_type = other DNA
atggccttaccagtgaccgccttgctcctgccgctggccttgctgctccacgccgccaggccggacatccagatgacacagagccctagcagcctgtctgccagcgtgggagacagagtgaccatcacatgcaagagcagccagagcctgctggactccgatggcaagacctacctgaactggtatcagcagaagcccggcaaggcccctaagctgctgatctacctggtgtccaagctggatagcggcgtgcccagcagattttctggcagcggcagcggaaccgacttcaccctgacaatatccagcctccagcctgaggacttcgccacctactactgcttccaaggcacccactttccatacaccttcggccagggcaccaaggtggaaatcaaaagactcgaggacaagcagctggacgccgacgtgtcccccaagcctaccatcttcctgccctctatcgccgagacaaagctccagaaggccggcacctacctgtgcctgctggaaaagttcttcccagatgtgattaagatccactggcaggaaaagaagtccaacaccatcctgggcagccaggaaggcaacaccatgaagaccaacgacacctacatgaagttcagctggctgaccgtgcccgagaagtccctggacaaagaacacagatgcatcgtgcggcacgaaaacaacaagaacggcgtggaccaggaaatcatcttcccacccatcaagaccgatgtgattacaatggaccccaaggacaactgctccaaggacgccaacgataccctgctgctccagctgaccaacaccagcgcctactacatgtacgagatcctgctgggcaaggccaccctgtacgccgtgctggtgtctgccctggtgctgatggctatggtcaagcggaaggacagccggggaagggccaagcgatctggatctggagcaacaaacttctcactactcaaacaagcaggtgacgtggaggagaatcccgggcctactagtatggactggatttggcgcatccttttccttgtcggcgctgctaccggcgcgcattccttcgaagaagtgcagctggttgaatcaggcggaggactggttcagcctggcggatctctgagactgtcttgtgccgccagcggctacaccttcaccaactactggatgaactgggtccgacaggcccctggcaaaggactggaatgggtcggaatgatcgaccccagcgacagcgagacacactacaaccacatcttcaaggaccgcttcaccatcagcgccgacaccagcaagaataccgcctacctccagatgaactccctgagagccgaggacaccgccgtgtactactgcgccagaaacctgtatctgtggggccagggaaccctggtcacagtgtcatctacgcgtagccagcctcacaccaagcccagcgtgttcgtgatgaagaacggcaccaacgtggcctgcctcgtgaaagagttctaccccaaggacatcaggatcaacctggtgtccagcaagaagatcaccgagttcgaccccgccatcgtgatctcccccagcggcaagtacaacgccgtgaagctggggaagtacgaggacagcaacagcgtgacctgctccgtgcagcacgacaacaagaccgtgcacagcaccgactttgaagtgaaaaccgactccaccgaccacgtgaagcccaaagagacagagaacaccaagcagcccagcaagagctgccacaagcccaaggccatcgtgcacaccgagaaagtgaacatgatgagcctgaccgtgctgggcttcagaatcctgctgctgaaagtggccggctttaacctgctgatgaccctgcggctgtggtccagctaa

SEQ ID NO: 37195 - DNA, 1881 bp, synthetic construct
  source 1..1881: mol_type = other DNA
atggccttaccagtgaccgccttgctcctgccgctggccttgctgctccacgccgccaggccggacatccagatgacacagagccctagcagcctgtctgccagcgtgggagacagagtgaccatcacatgcaagagcagccagagcctgctggactccgatggcaagacctacctgaactggtatcagcagaagcccggcaaggcccctaagctgctgatctacctggtgtccaagctggatagcggcgtgcccagcagattttctggcagcggcagcggaaccgacttcaccctgacaatatccagcctccagcctgaggacttcgccacctactactgcttccaaggcacccactttccatacaccttcggccagggcaccaaggtggaaatcaaaagactcgaggacaagcagctggacgccgacgtgtcccccaagcctaccatcttcctgccctctatcgccgagacaaagctccagaaggccggcacctacctgtgcctgctggaaaagttcttcccagatgtgattaagatccactggcaggaaaagaagtccaacaccatcctgggcagccaggaaggcaacaccatgaagaccaacgacacctacatgaagttcagctggctgaccgtgcccgagaagtccctggacaaagaacacagatgcatcgtgcggcacgaaaacaacaagaacggcgtggaccaggaaatcatcttcccacccatcaagaccgatgtgattacaatggaccccaaggacaactgctccaaggacgccaacgataccctgctgctccagctgaccaacaccagcgccaccatcctgtacgagatcctgctgggcaaggccaccctgtacgccgtgctggtgtctgccctggtgctgatggctatggtcaagcggaaggacagccggggaagggccaagcgatctggatctggagcaacaaacttctcactactcaaacaagcaggtgacgtggaggagaatcccgggcctactagtatggactggatttggcgcatccttttccttgtcggcgctgctaccggcgcgcattccttcgaagaagtgcagctggttgaatcaggcggaggactggttcagcctggcggatctctgagactgtcttgtgccgccagcggctacaccttcaccaactactggatgaactgggtccgacaggcccctggcaaaggactggaatgggtcggaatgatcgaccccagcgacagcgagacacactacaaccacatcttcaaggaccgcttcaccatcagcgccgacaccagcaagaataccgcctacctccagatgaactccctgagagccgaggacaccgccgtgtactactgcgccagaaacctgtatctgtggggccagggaaccctggtcacagtgtcatctacgcgtagccagcctcacaccaagcccagcgtgttcgtgatgaagaacggcaccaacgtggcctgcctcgtgaaagagttctaccccaaggacatcaggatcaacctggtgtccagcaagaagatcaccgagttcgaccccgccatcgtgatctcccccagcggcaagtacaacgccgtgaagctggggaagtacgaggacagcaacagcgtgacctgctccgtgcagcacgacaacaagaccgtgcacagcaccgactttgaagtgaaaaccgactccaccgaccacgtgaagcccaaagagacagagaacaccaagcagcccagcaagagctgccacaagcccaaggccatcgtgcacaccgagaaagtgaacatgatgagcctgaccgtgctgggcttcagaatcctgctgctgaaagtggccggctttaacctgctgatgaccctgcggctgtggtccagctaa

SEQ ID NO: 37196 - DNA, 1863 bp, synthetic construct
  source 1..1863: mol_type = other DNA
atggccttaccagtgaccgccttgctcctgccgctggccttgctgctccacgccgccaggccggacatccagatgacacagagccctagcagcctgtctgccagcgtgggagacagagtgaccatcacatgcaagagcagccagagcctgctggactccgatggcaagacctacctgaactggtatcagcagaagcccggcaaggcccctaagctgctgatctacctggtgtccaagctggatagcggcgtgcccagcagattttctggcagcggcagcggaaccgacttcaccctgacaatatccagcctccagcctgaggacttcgccacctactactgcttccaaggcacccactttccatacaccttcggccagggcaccaaggtggaaatcaaaagactcgaggacctgaagaacgtgttcccacctgaggtggccgtgttcgagcctagcgaggccgagatcagccacacccagaaagccaccctcgtgtgcctggctaccggcttctaccccgaccatgtggaactgtcttggtgggtcaacggcaaagaggtgcacagcggcgtgtgtaccgacccccagccactgaaagaacagcccgccctgaacgacagccggtactgcctgagcagcagactgagagtgtccgccaccttctggcagaacccccggaaccacttcagatgccaggtgcagttctacggcctgagcgagaacgacgagtggacccaggacagagccaagcccgtgacccagatcgtgtctgccgaagcctggggcagagccgattgcggctttaccagcgagagctaccagcagggcgtgctgagcgccaccatcctgtacttgttgctgctgctgaagtccgtggtgtacttcgccatcatcacatgctgcctgctgcggagaaccgccttctgctgcaacggcgagaagtctagggccaagcgatctggatctggagcaacaaacttctcactactcaaacaagcaggtgacgtggaggagaatcccgggcctactagtatggactggatttggcgcatccttttccttgtcggcgctgctaccggcgcgcattccttcgaagaagtgcagctggttgaatcaggcggaggactggttcagcctggcggatctctgagactgtcttgtgccgccagcggctacaccttcaccaactactggatgaactgggtccgacaggcccctggcaaaggactggaatgggtcggaatgatcgaccccagcgacagcgagacacactacaaccacatcttcaaggaccgcttcaccatcagcgccgacaccagcaagaataccgcctacctccagatgaactccctgagagccgaggacaccgccgtgtactactgcgccagaaacctgtatctgtggggccagggaaccctggtcacagtgtcatctacgcgtatccagaaccctgatcctgccgtgtaccagctgcgggatagcaagagcagcgacaagagcgtgtgtctgttcaccgacttcgacagccagaccaacgtgtcccagagcaaggactccgacgtgtacatcaccgataagtgcgtgctggacatgcggagcatggacttcaagagcaactccgccgtggcctggtccaacaagtccgatttcgcctgcgccaacgccttcaacaacagcattatccccgaggacacattcttcccaagccccgagagcagctgcgacgtgaagctggtggaaaagagcttcgagacagacaccaacctgaacttccagaacctgagcgtgatcggcctgcggatgctgttcgccaaaaccgtggccgtgaacttcctgctgaccgccaagctgttcttcctctaa

SEQ ID NO: 37197 - DNA, 1950 bp, synthetic construct
  source 1..1950: mol_type = other DNA
atggccttaccagtgaccgccttgctcctgccgctggccttgctgctccacgccgccaggccggacatccagatgacacagagccctagcagcctgtctgccagcgtgggagacagagtgaccatcacatgcaagagcagccagagcctgctggactccgatggcaagacctacctgaactggtatcagcagaagcccggcaaggcccctaagctgctgatctacctggtgtccaagctggatagcggcgtgcccagcagattttctggcagcggcagcggaaccgacttcaccctgacaatatccagcctccagcctgaggacttcgccacctactactgcttccaaggcacccactttccatacaccttcggccagggcaccaaggtggaaatcaaaagactcgaggacctgaagaacgtgttcccacctgaggtggccgtgttcgagcctagcgaggccgagatcagccacacccagaaagccaccctcgtgtgcctggctaccggcttctaccccgaccatgtggaactgtcttggtgggtcaacggcaaagaggtgcacagcggcgtgtctaccgacccccagccactgaaagaacagcccgccctgaacgacagccggtactgcctgagcagcagactgagagtgtccgccaccttctggcagaacccccggaaccacttcagatgccaggtgcagttctacggcctgagcgagaacgacgagtggacccaggacagagccaagcccgtgacccagatcgtgtctgccgaagcctggggcagagccgattgcggatcctccaaggacgccaacgataccctgctgctccagctgaccaacaccagcgcctactacatgtacttgttgctgctgctgaagtccgtggtgtacttcgccatcatcacatgctgcctgctgcggagaaccgccttctgctgcaacggcgagaagtctagggccaagcgatctggatctggagcaacaaacttctcactactcaaacaagcaggtgacgtggaggagaatcccgggcctactagtatggactggatttggcgcatccttttccttgtcggcgctgctaccggcgcgcattccttcgaagaagtgcagctggttgaatcaggcggaggactggttcagcctggcggatctctgagactgtcttgtgccgccagcggctacaccttcaccaactactggatgaactgggtccgacaggcccctggcaaaggactggaatgggtcggaatgatcgaccccagcgacagcgagacacactacaaccacatcttcaaggaccgcttcaccatcagcgccgacaccagcaagaataccgcctacctccagatgaactccctgagagccgaggacaccgccgtgtactactgcgccagaaacctgtatctgtggggccagggaaccctggtcacagtgtcatctacgcgtatccagaaccctgatcctgccgtgtaccagctgcgggatagcaagagcagcgacaagagcgtgtgtctgttcaccgacttcgacagccagaccaacgtgtcccagagcaaggactccgacgtgtacatcaccgataagaccgtgctggacatgcggagcatggacttcaagagcaactccgccgtggcctggtccaacaagtccgatttcgcctgcgccaacgccttcaacaacagcattatccccgaggacacattcttcccaagccccgagagcagctgcggtaccgaagtgaaaaccgactccaccgaccacgtgaagcccaaagagacagagaacaccaagcagcccagcaagagctgccacaagcccaaggccatcgtgcacaccgagaaagtgaacatgatgagcctgaccgtgctgggcctgcggatgctgttcgccaaaaccgtggccgtgaacttcctgctgaccgccaagctgttcttcctctaa

SEQ ID NO: 37198 - DNA, 1860 bp, synthetic construct
  source 1..1860: mol_type = other DNA
atggccttaccagtgaccgccttgctcctgccgctggccttgctgctccacgccgccaggccggacatccagatgacacagagccctagcagcctgtctgccagcgtgggagacagagtgaccatcacatgcaagagcagccagagcctgctggactccgatggcaagacctacctgaactggtatcagcagaagcccggcaaggcccctaagctgctgatctacctggtgtccaagctggatagcggcgtgcccagcagattttctggcagcggcagcggaaccgacttcaccctgacaatatccagcctccagcctgaggacttcgccacctactactgcttccaaggcacccactttccatacaccttcggccagggcaccaaggtggaaatcaaaagactcgaggacctgaagaacgtgttcccacctgaggtggccgtgttcgagcctagcgaggccgagatcagccacacccagaaagccaccctcgtgtgcctggctaccggcttctaccccgaccatgtggaactgtcttggtgggtcaacggcaaagaggtgcacagcggcgtgtgtaccgacccccagccactgaaagaacagcccgccctgaacgacagccggtactgcctgagcagcagactgagagtgtccgccaccttctggcagaacccccggaaccacttcagatgccaggtgcagttctacggcctgagcgagaacgacgagtggacccaggacagagccaagcccgtgacccagatcgtgtctgccgaagcctggggcagagccgattgcgacgtgaagctggtggaaaagagcttcgagacagacaccaacctgaacttccagaacctgagcgtgatcggcttcagaatcctgctgctgaaagtggccggctttaacctgctgatgaccctgcggctgtggtccagcagggccaagcgatctggatctggagcaacaaacttctcactactcaaacaagcaggtgacgtggaggagaatcccgggcctactagtatggactggatttggcgcatccttttccttgtcggcgctgctaccggcgcgcattccttcgaagaagtgcagctggttgaatcaggcggaggactggttcagcctggcggatctctgagactgtcttgtgccgccagcggctacaccttcaccaactactggatgaactgggtccgacaggcccctggcaaaggactggaatgggtcggaatgatcgaccccagcgacagcgagacacactacaaccacatcttcaaggaccgcttcaccatcagcgccgacaccagcaagaataccgcctacctccagatgaactccctgagagccgaggacaccgccgtgtactactgcgccagaaacctgtatctgtggggccagggaaccctggtcacagtgtcatctacgcgtatccagaaccctgatcctgccgtgtaccagctgcgggatagcaagagcagcgacaagagcgtgtgtctgttcaccgacttcgacagccagaccaacgtgtcccagagcaaggactccgacgtgtacatcaccgataagtgcgtgctggacatgcggagcatggacttcaagagcaactccgccgtggcctggtccaacaagtccgatttcgcctgcgccaacgccttcaacaacagcattatccccgaggacacattcttcccaagccccgagagcagctgcggctttaccagcgagagctaccagcagggcgtgctgagcgccaccatcctgtacgagatcctgctgggcaaggccaccctgtacgccgtgctggtgtctgccctggtgctgatggctatggtcaagcggaaggacagccggggataa

SEQ ID NO: 37199 - DNA, 1860 bp, synthetic construct
  source 1..1860: mol_type = other DNA
atggccttaccagtgaccgccttgctcctgccgctggccttgctgctccacgccgccaggccggacatccagatgacacagagccctagcagcctgtctgccagcgtgggagacagagtgaccatcacatgcaagagcagccagagcctgctggactccgatggcaagacctacctgaactggtatcagcagaagcccggcaaggcccctaagctgctgatctacctggtgtccaagctggatagcggcgtgcccagcagattttctggcagcggcagcggaaccgacttcaccctgacaatatccagcctccagcctgaggacttcgccacctactactgcttccaaggcacccactttccatacaccttcggccagggcaccaaggtggaaatcaaaagactcgaggacctgaagaacgtgttcccacctgaggtggccgtgttcgagcctagcgaggccgagatcagccacacccagaaagccaccctcgtgtgcctggctaccggcttctaccccgaccatgtggaactgtcttggtgggtcaacggcaaagaggtgcacagcggcgtgtgtaccgacccccagccactgaaagaacagcccgccctgaacgacagccggtactgcctgagcagcagactgagagtgtccgccaccttctggcagaacccccggaaccacttcagatgccaggtgcagttctacggcctgagcgagaacgacgagtggacccaggacagagccaagcccgtgacccagatcgtgtctgccgaagcctggggcagagccgattgcggctttaccagcgagagctaccagcagggcgtgctgagcgccaccaacctgagcgtgatcggcttcagaatcctgctgctgaaagtggccggctttaacctgctgatgaccctgcggctgtggtccagcagggccaagcgatctggatctggagcaacaaacttctcactactcaaacaagcaggtgacgtggaggagaatcccgggcctactagtatggactggatttggcgcatccttttccttgtcggcgctgctaccggcgcgcattccttcgaagaagtgcagctggttgaatcaggcggaggactggttcagcctggcggatctctgagactgtcttgtgccgccagcggctacaccttcaccaactactggatgaactgggtccgacaggcccctggcaaaggactggaatgggtcggaatgatcgaccccagcgacagcgagacacactacaaccacatcttcaaggaccgcttcaccatcagcgccgacaccagcaagaataccgcctacctccagatgaactccctgagagccgaggacaccgccgtgtactactgcgccagaaacctgtatctgtggggccagggaaccctggtcacagtgtcatctacgcgtatccagaaccctgatcctgccgtgtaccagctgcgggatagcaagagcagcgacaagagcgtgtgtctgttcaccgacttcgacagccagaccaacgtgtcccagagcaaggactccgacgtgtacatcaccgataagtgcgtgctggacatgcggagcatggacttcaagagcaactccgccgtggcctggtccaacaagtccgatttcgcctgcgccaacgccttcaacaacagcattatccccgaggacacattcttcccaagccccgagagcagctgcgacgtgaagctggtggaaaagagcttcgagacagacaccaacctgaacttccagatcctgtacgagatcctgctgggcaaggccaccctgtacgccgtgctggtgtctgccctggtgctgatggctatggtcaagcggaaggacagccggggataa

SEQ ID NO: 37200 - DNA, 1860 bp, synthetic construct; identical to SEQ ID NO: 37198
  source 1..1860: mol_type = other DNA

SEQ ID NO: 37201 - DNA, 1860 bp, synthetic construct; identical to SEQ ID NO: 37199
  source 1..1860: mol_type = other DNA

SEQ ID NO: 37202 - DNA, 1857 bp, synthetic construct
  source 1..1857: mol_type = other DNA
atggccttaccagtgaccgccttgctcctgccgctggccttgctgctccacgccgccaggccggacatccagatgacacagagccctagcagcctgtctgccagcgtgggagacagagtgaccatcacatgcaagagcagccagagcctgctggactccgatggcaagacctacctgaactggtatcagcagaagcccggcaaggcccctaagctgctgatctacctggtgtccaagctggatagcggcgtgcccagcagattttctggcagcggcagcggaaccgacttcaccctgacaatatccagcctccagcctgaggacttcgccacctactactgcttccaaggcacccactttccatacaccttcggccagggcaccaaggtggaaatcaaaagactcgaggacctgaagaacgtgttcccacctgaggtggccgtgttcgagcctagcgaggccgagatcagccacacccagaaagccaccctcgtgtgcctggctaccggcttctaccccgaccatgtggaactgtcttggtgggtcaacggcaaagaggtgcacagcggcgtgtgtaccgacccccagccactgaaagaacagcccgccctgaacgacagccggtactgcctgagcagcagactgagagtgtccgccaccttctggcagaacccccggaaccacttcagatgccaggtgcagttctacggcctgagcgagaacgacgagtggacccaggacagagccaagcccgtgacccagatcgtgtctgccgaagcctggggcagagccgattgcgacgtgaagctggtggaaaagagcttcgagacagacaccaacctgaacttccagaacctgagcgtgatcggcttcagaatcctgctgctgaaagtggccggctttaacctgctgatgaccctgcggctgtggtccagcagggccaagcgatctggatctggagcaacaaacttctcactactcaaacaagcaggtgacgtggaggagaatcccgggcctactagtatggactggatttggcgcatccttttccttgtcggcgctgctaccggcgcgcattccttcgaagaagtgcagctggttgaatcaggcggaggactggttcagcctggcggatctctgagactgtcttgtgccgccagcggctacaccttcaccaactactggatgaactgggtccgacaggcccctggcaaaggactggaatgggtcggaatgatcgaccccagcgacagcgagacacactacaaccacatcttcaaggaccgcttcaccatcagcgccgacaccagcaagaataccgcctacctccagatgaactccctgagagccgaggacaccgccgtgtactactgcgccagaaacctgtatctgtggggccagggaaccctggtcacagtgtcatctacgcgtatccagaaccctgatcctgccgtgtaccagctgcgggatagcaagagcagcgacaagagcgtgtgtctgttcaccgacttcgacagccagaccaacgtgtcccagagcaaggactccgacgtgtacatcaccgataagtgcgtgctggacatgcggagcatggacttcaagagcaactccgccgtggcctggtccaacaagtccgatttcgcctgcgccaacgccttcaacaacagcattatccccgaggacacattcttcccaagccccgagagcagctgcggctttaccagcgagagctaccagcagggcgtgctgagcgccaccatcctgtacgagatcctgctgggcaaggccaccctgtacgccgtgctggtgtctgccctggtgctgatggctatggtcaagcggaaggacagccgggga

SEQ ID NO: 37203 - DNA, 1869 bp, synthetic construct
  source 1..1869: mol_type = other DNA
atggccttaccagtgaccgccttgctcctgccgctggccttgctgctccacgccgccaggccggacatccagatgacacagagccctagcagcctgtctgccagcgtgggagacagagtgaccatcacatgcaagagcagccagagcctgctggactccgatggcaagacctacctgaactggtatcagcagaagcccggcaaggcccctaagctgctgatctacctggtgtccaagctggatagcggcgtgcccagcagattttctggcagcggcagcggaaccgacttcaccctgacaatatccagcctccagcctgaggacttcgccacctactactgcttccaaggcacccactttccatacaccttcggccagggcaccaaggtggaaatcaaaagactcgaggccgacgtgtcccccaagcctaccatcttcctgccctctatcgccgagacaaagctccagaaggccggcacctacctgtgcctgctggaaaagttcttcccagatgtgattaagatccactggcaggaaaagaagtccaacaccatcctgggcagccaggaaggcaacaccatgaagaccaacgacacctacatgaagttcagctggctgaccgtgcccgagaagtccctggacaaagaacacagatgcatcgtgcggcacgaaaacaacaagaacggcgtggaccaggaaatcatcttcccacccatcaagaccgatgtgattacaatggaccccaaggacaactgctccaaggacgccaacgataccctgctgctccagctgaccaacaccagcgcctactacatgtacttgttgctgctgctgaagtccgtggtgtacttcgccatcatcacatgctgcctgctgcggagaaccgccttctgctgcaacggcgagaagtctagggccaagcgatctggatctggagcaacaaacttctcactactcaaacaagcaggtgacgtggaggagaatcccgggcctactagtatggactggatttggcgcatccttttccttgtcggcgctgctaccggcgcgcattccttcgaagaagtgcagctggttgaatcaggcggaggactggttcagcctggcggatctctgagactgtcttgtgccgccagcggctacaccttcaccaactactggatgaactgggtccgacaggcccctggcaaaggactggaatgggtcggaatgatcgaccccagcgacagcgagacacactacaaccacatcttcaaggaccgcttcaccatcagcgccgacaccagcaagaataccgcctacctccagatgaactccctgagagccgaggacaccgccgtgtactactgcgccagaaacctgtatctgtggggccagggaaccctggtcacagtgtcatctacgcgtagccagcctcacaccaagcccagcgtgttcgtgatgaagaacggcaccaacgtggcctgcctcgtgaaagagttctaccccaaggacatcaggatcaacctggtgtccagcaagaagatcaccgagttcgaccccgccatcgtgatctcccccagcggcaagtacaacgccgtgaagctggggaagtatgaggacagcaacagcgtgacctgctccgtgcagcacgacaacaagaccgtgcacagcaccgactttgaagtgaaaaccgactccaccgaccacgtgaagcccaaagagacagagaacaccaagcagcccagcaagagctgccacaagcccaaggccatcgtgcacaccgagaaagtgaacatgatgagcctgaccgtgatcggcttcagaatcctgctgctgaaagtggccggctttaacctgctgatgaccctgcggctgtggtccagctaa

SEQ ID NO: 37204 - DNA, 1869 bp, synthetic construct
  source 1..1869: mol_type = other DNA
atggccttaccagtgaccgccttgctcctgccgctggccttgctgctccacgccgccaggccggacatccagatgacacagagccctagcagcctgtctgccagcgtgggagacagagtgaccatcacatgcaagagcagccagagcctgctggactccgatggcaagacctacctgaactggtatcagcagaagcccggcaaggcccctaagctgctgatctacctggtgtccaagctggatagcggcgtgcccagcagattttctggcagcggcagcggaaccgacttcaccctgacaatatccagcctccagcctgaggacttcgccacctactactgcttccaaggcacccactttccatacaccttcggccagggcaccaaggtggaaatcaaaagactcgaggccgacgtgtcccccaagcctaccatcttcctgccctctatcgccgagacaaagctccagaaggccggcacctacctgtgcctgctggaaaagttcttcccagatgtgattaagatccactggcaggaaaagaagtccaacaccatcctgggcagccaggaaggcaacaccatgaagaccaacgacacctacatgaagttcagctggctgaccgtgcccgagaagtccctggacaaagaacacagatgcatcgtgcggcacgaaaacaacaagaacggcgtggaccaggaaatcatcttcccacccatcaagaccgatgtgattacaatggaccccaaggacaactgctccaaggacgccaacgataccctgctgctccagctgaccaacaccagcgcctactacatgtacttgttgctgctgctgaagtccgtggtgtacttcgccatcatcacatgctgcctgctgcggagaaccgccttctgctgcaacggcgagaagtctagggccaagcgatctggatctggagcaacaaacttctcactactcaaacaagcaggtgacgtggaggagaatcccgggcctactagtatggactggatttggcgcatccttttccttgtcggcgctgctaccggcgcgcattccttcgaagaagtgcagctggttgaatcaggcggaggactggttcagcctggcggatctctgagactgtcttgtgccgccagcggctacaccttcaccaactactggatgaactgggtccgacaggcccctggcaaaggactggaatgggtcggaatgatcgaccccagcgacagcgagacacactacaaccacatcttcaaggaccgcttcaccatcagcgccgacaccagcaagaataccgcctacctccagatgaactccctgagagccgaggacaccgccgtgtactactgcgccagaaacctgtatctgtggggccagggaaccctggtcacagtgtcatctacgcgtagccagcctcacaccaagcccagcgtgttcgtgatgaagaacggcaccaacgtggcctgcctcgtgaaagagttctaccccaaggacatcaggatcaacctggtgtccagcaagaagatcaccgagttcgaccccgccatcgtgatctcccccagcggcaagtacaacgccgtgaagctggggaagtacgaggacagcaacagcgtgacctgctccgtgcagcacgacaacaagaccgtgcacagcaccgactttgaagtgaaaaccgactccaccgaccacgtgaagcccaaagagacagagaacaccaagcagcccagcaagagctgccacaagcccaaggccatcgtgcacaccgagaaagtgaacatgatgagcctgaccgtgctgggcttcagaatcctgctgctgaaagtggccggctttaacctgctgatgaccctgcggctgtggtccagctaa

SEQ ID NO: 37205 - DNA, 1857 bp, synthetic construct; identical to SEQ ID NO: 37202
  source 1..1857: mol_type = other DNA

SEQ ID NO: 37206 - DNA, 1869 bp, synthetic construct
  source 1..1869: mol_type = other DNA
atggccttaccagtgaccgccttgctcctgccgctggccttgctgctccacgccgccaggccggacatccagatgacacagagccctagcagcctgtctgccagcgtgggagacagagtgaccatcacatgcaagagcagccagagcctgctggactccgatggcaagacctacctgaactggtatcagcagaagcccggcaaggcccctaagctgctgatctacctggtgtccaagctggatagcggcgtgcccagcagattttctggcagcggcagcggaaccgacttcaccctgacaatatccagcctccagcctgaggacttcgccacctactactgcttccaaggcacccactttccatacaccttcggccagggcaccaaggtggaaatcaaaagactcgagatccagaaccctgatcctgccgtgtaccagctgcgggatagcaagagcagcgacaagagcgtgtgtctgttcaccgacttcgacagccagaccaacgtgtcccagagcaaggactccgacgtgtacatcaccgataagtgcgtgctggacatgcggagcatggacttcaagagcaactccgccgtggcctggtccaacaagtccgatttcgcctgcgccaacgccttcaacaacagcattatccccgaggacacattcttcccaagccccgagagcagctgcggctttaccagcgagagctaccagcagggcgtgctgagcgccaccatcctgtacgagatcctgctgggcaaggccaccctgtacgccgtgctggtgtctgccctggtgctgatggctatggtcaagcggaaggacagccggggacgcgccaagagaagcggatctggcgtgaagcagaccctgaatttcgacctgctgaagctggctggcgacgtggaatccaacccaggccctactagtatggactggatttggcgcatccttttccttgtcggcgctgctaccggcgcgcattccttcgaagaagtgcagctggttgaatcaggcggaggactggttcagcctggcggatctctgagactgtcttgtgccgccagcggctacaccttcaccaactactggatgaactgggtccgacaggcccctggcaaaggactggaatgggtcggaatgatcgaccccagcgacagcgagacacactacaaccacatcttcaaggaccgcttcaccatcagcgccgacaccagcaagaataccgcctacctccagatgaactccctgagagccgaggacaccgccgtgtactactgcgccagaaacctgtatctgtggggccagggaaccctggtcacagtgtcatctacgcgtgaggacctgaagaacgtgttcccacctgaggtggccgtgttcgagcctagcgaggccgagatcagccacacccagaaagccaccctcgtgtgcctggctaccggcttctaccccgaccatgtggaactgtcttggtgggtcaacggcaaagaggtgcacagcggcgtgtgtaccgacccccagccactgaaagaacagcccgccctgaacgacagccggtactgcctgagcagcagactgagagtgtccgccaccttctggcagaacccccggaaccacttcagatgccaggtgcagttctacggcctgagcgagaacgacgagtggacccaggacagagccaagcccgtgacccagatcgtgtctgccgaagcctggggcagagccgattgcgacgtgaagctggtggaaaagagcttcgagacagacaccaacctgaacttccagaacctgagcgtgatcggcttcagaatcctgctgctgaaagtggccggctttaacctgctgatgaccctgcggctgtggtccagc

SEQ ID NO: 37207 - DNA, 2262 bp, synthetic construct
  source 1..2262: mol_type = other DNA
atggccttaccagtgaccgccttgctcctgccgctggccttgctgctccacgccgccaggccggaagtgcagctggttgaatctggcggaggactggttcagcctggcggatctctgagactgtcttgtgccgccagcggcttcagcttcagcgacttttggatgagctgggtccgacaggcccctggcaaaggacttgaatgggtcgccacaatcagccaggccggcagcgagaaggactacgtggactctgtgaagggcagattcaccatcagccgggacaacgccaagaagtccctgtacctccagatgaacagcctgagagccgaggacaccgccgtgtactattgtgcctctggcgtgtacagcttcgactacagaggccagggcaccctggtcacagtctcttctggtaccggcggaggcggatctggcggcggaggtagcggtggcggaggatctgaattcgacatccagatgacacagagccctagcagcctgtctgccagcgtgggagacagagtgaccatcacatgcaagagcagccagagcctgctggactccgatggcaagacctacctgaactggtatcagcagaagcccggcaaggcccctaagctgctgatctacctggtgtccaagctggatagcggcgtgcccagcagattttctggcagcggcagcggaaccgacttcaccctgacaatatccagcctccagcctgaggacttcgccacctactactgcttccaaggcacccactttccatacaccttcggccagggcaccaaggtggaaatcaaaagactcgaggacctgaagaacgtgttcccacctgaggtggccgtgttcgagcctagcgaggccgagatcagccacacccagaaagccaccctcgtgtgcctggctaccggcttctaccccgaccatgtggaactgtcttggtgggtcaacggcaaagaggtgcacagcggcgtgtgtaccgacccccagccactgaaagaacagcccgccctgaacgacagccggtactgcctgagcagcagactgagagtgtccgccaccttctggcagaacccccggaaccacttcagatgccaggtgcagttctacggcctgagcgagaacgacgagtggacccaggacagagccaagcccgtgacccagatcgtgtctgccgaagcctggggcagagccgattgcgacgtgaagctggtggaaaagagcttcgagacagacaccaacctgaacttccagaacctgagcgtgatcggcttcagaatcctgctgctgaaagtggccggctttaacctgctgatgaccctgcggctgtggtccagcagggccaagcgatctggatctggagcaacaaacttctcactactcaaacaagcaggtgacgtggaggagaatcccgggcctactagtatggactggatttggcgcatccttttccttgtcggcgctgctaccggcgcgcattccttcgaagaagtgcagctggttgaatcaggcggaggactggttcagcctggcggatctctgagactgtcttgtgccgccagcggctacaccttcaccaactactggatgaactgggtccgacaggcccctggcaaaggactggaatgggtcggaatgatcgaccccagcgacagcgagacacactacaaccacatcttcaaggaccgcttcaccatcagcgccgacaccagcaagaataccgcctacctccagatgaactccctgagagccgaggacaccgccgtgtactactgcgccagaaacctgtatctgtggggccagggaaccctggtcacagtgtcatctacgcgtatccagaaccctgatcctgccgtgtaccagctgcgggatagcaagagcagcgacaagagcgtgtgtctgttcaccgacttcgacagccagaccaacgtgtcccagagcaaggactccgacgtgtacatcaccgataagtgcgtgctggacatgcggagcatggacttcaagagcaactccgccgtggcctggtccaacaagtccgatttcgcctgcgccaacgccttcaacaacagcattatccccgaggacacattcttcccaagccccgagagcagctgcggctttaccagcgagagctaccagcagggcgtgctgagcgccaccatcctgtacgagatcctgctgggcaaggccaccctgtacgccgtgctggtgtctgccctggtgctgatggctatggtcaagcggaaggacagccgggga

SEQ ID NO: 37208 - DNA, 2274 bp, synthetic construct
  source 1..2274: mol_type = other DNA
atggccttaccagtgaccgccttgctcctgccgctggccttgctgctccacgccgccaggccggaagtgcagctggttgaatctggcggaggactggttcagcctggcggatctctgagactgtcttgtgccgccagcggcttcagcttcagcgacttttggatgagctgggtccgacaggcccctggcaaaggacttgaatgggtcgccacaatcagccaggccggcagcgagaaggactacgtggactctgtgaagggcagattcaccatcagccgggacaacgccaagaagtccctgtacctccagatgaacagcctgagagccgaggacaccgccgtgtactattgtgcctctggcgtgtacagcttcgactacagaggccagggcaccctggtcacagtctcttctggtaccggcggaggcggatctggcggcggaggtagcggtggcggaggatctgaattcgacatccagatgacacagagccctagcagcctgtctgccagcgtgggagacagagtgaccatcacatgcaagagcagccagagcctgctggactccgatggcaagacctacctgaactggtatcagcagaagcccggcaaggcccctaagctgctgatctacctggtgtccaagctggatagcggcgtgcccagcagattttctggcagcggcagcggaaccgacttcaccctgacaatatccagcctccagcctgaggacttcgccacctactactgcttccaaggcacccactttccatacaccttcggccagggcaccaaggtggaaatcaaaagactcgagatccagaaccctgatcctgccgtgtaccagctgcgggatagcaagagcagcgacaagagcgtgtgtctgttcaccgacttcgacagccagaccaacgtgtcccagagcaaggactccgacgtgtacatcaccgataagtgcgtgctggacatgcggagcatggacttcaagagcaactccgccgtggcctggtccaacaagtccgatttcgcctgcgccaacgccttcaacaacagcattatccccgaggacacattcttcccaagccccgagagcagctgcggctttaccagcgagagctaccagcagggcgtgctgagcgccaccatcctgtacgagatcctgctgggcaaggccaccctgtacgccgtgctggtgtctgccctggtgctgatggctatggtcaagcggaaggacagccggggacgcgccaagagaagcggatctggcgtgaagcagaccctgaatttcgacctgctgaagctggctggcgacgtggaatccaacccaggccctactagtatggactggatttggcgcatccttttccttgtcggcgctgctaccggcgcgcattccttcgaagaagtgcagctggttgaatcaggcggaggactggttcagcctggcggatctctgagactgtcttgtgccgccagcggctacaccttcaccaactactggatgaactgggtccgacaggcccctggcaaaggactggaatgggtcggaatgatcgaccccagcgacagcgagacacactacaaccacatcttcaaggaccgcttcaccatcagcgccgacaccagcaagaataccgcctacctccagatgaactccctgagagccgaggacaccgccgtgtactactgcgccagaaacctgtatctgtggggccagggaaccctggtcacagtgtcatctacgcgtgaggacctgaagaacgtgttcccacctgaggtggccgtgttcgagcctagcgaggccgagatcagccacacccagaaagccaccctcgtgtgcctggctaccggcttctaccccgaccatgtggaactgtcttggtgggtcaacggcaaagaggtgcacagcggcgtgtgtaccgacccccagccactgaaagaacagcccgccctgaacgacagccggtactgcctgagcagcagactgagagtgtccgccaccttctggcagaacccccggaaccacttcagatgccaggtgcagttctacggcctgagcgagaacgacgagtggacccaggacagagccaagcccgtgacccagatcgtgtctgccgaagcctggggcagagccgattgcgacgtgaagctggtggaaaagagcttcgagacagacaccaacctgaacttccagaacctgagcgtgatcggcttcagaatcctgctgctgaaagtggccggctttaacctgctgatgaccctgcggctgtggtccagc

SEQ ID NO: 37209 - DNA, 2673 bp, synthetic construct
  source 1..2673: mol_type = other DNA
atggccttaccagtgaccgccttgctcctgccgctggccttgctgctccacgccgccaggccggaagtgcagctggttgaatctggcggaggactggttcagcctggcggatctctgagactgtcttgtgccgccagcggcttcagcttcagcgacttttggatgagctgggtccgacaggcccctggcaaaggacttgaatgggtcgccacaatcagccaggccggcagcgagaaggactacgtggactctgtgaagggcagattcaccatcagccgggacaacgccaagaagtccctgtacctccagatgaacagcctgagagccgaggacaccgccgtgtactattgtgcctctggcgtgtacagcttcgactacagaggccagggcaccctggtcacagtctcttctggtaccggcggaggcggatctggcggcggaggtagcggtggcggaggatctgaattcgacatccagatgacacagagccctagcagcctgtctgccagcgtgggagacagagtgaccatcacatgcaagagcagccagagcctgctggactccgatggcaagacctacctgaactggtatcagcagaagcccggcaaggcccctaagctgctgatctacctggtgtccaagctggatagcggcgtgcccagcagattttctggcagcggcagcggaaccgacttcaccctgacaatatccagcctccagcctgaggacttcgccacctactactgcttccaaggcacccactttccatacaccttcggccagggcaccaaggtggaaatcaaaagactcgaggacctgaagaacgtgttcccacctgaggtggccgtgttcgagcctagcgaggccgagatcagccacacccagaaagccaccctcgtgtgcctggctaccggcttctaccccgaccatgtggaactgtcttggtgggtcaacggcaaagaggtgcacagcggcgtgtgtaccgacccccagccactgaaagaacagcccgccctgaacgacagccggtactgcctgagcagcagactgagagtgtccgccaccttctggcagaacccccggaaccacttcagatgccaggtgcagttctacggcctgagcgagaacgacgagtggacccaggacagagccaagcccgtgacccagatcgtgtctgccgaagcctggggcagagccgattgcgacgtgaagctggtggaaaagagcttcgagacagacaccaacctgaacttccagaacctgagcgtgatcggcttcagaatcctgctgctgaaagtggccggctttaacctgctgatgaccctgcggctgtggtccagcagggccaagcgatctggatctggagcaacaaacttctcactactcaaacaagcaggtgacgtggaggagaatcccgggcctactagtatggactggatttggcgcatccttttccttgtcggcgctgctaccggcgcgcattccgggccccagctccagctgcaagagtctggacctggcctggtcaagcctagcgagacactgagcctgacctgtaccgtgtccggcgatagcatcagcagcggcgattactactggggctggatcagacagcctcctggcaaaggactggaatggatcggccacatctactacagcggcgtgacctactacaaccccagcctgaagtccagagtgaccatcagcgtggacaccagccggaaccagttctccctgaagctgtctagcgtgacagccgccgataccgccgtgtactactgcaccagagaggacagcagcaactggcggagtagaggccagggaacactggtcacagttagctctggatccggcggaggcggaagtggaggcggaggatctggcggcggaggctctttcgaagaagtgcagctggttgaatcaggcggaggactggttcagcctggcggatctctgagactgtcttgtgccgccagcggctacaccttcaccaactactggatgaactgggtccgacaggcccctggcaaaggactggaatgggtcggaatgatcgaccccagcgacagcgagacacactacaaccacatcttcaaggaccgcttcaccatcagcgccgacaccagcaagaataccgcctacctccagatgaactccctgagagccgaggacaccgccgtgtactactgcgccagaaacctgtatctgtggggccagggaaccctggtcacagtgtcatctacgcgtatccagaaccctgatcctgccgtgtaccagctgcgggatagcaagagcagcgacaagagcgtgtgtctgttcaccgacttcgacagccagaccaacgtgtcccagagcaaggactccgacgtgtacatcaccgataagtgcgtgctggacatgcggagcatggacttcaagagcaactccgccgtggcctggtccaacaagtccgatttcgcctgcgccaacgccttcaacaacagcattatccccgaggacacattcttcccaagccccgagagcagctgcggctttaccagcgagagctaccagcagggcgtgctgagcgccaccatcctgtacgagatcctgctgggcaaggccaccctgtacgccgtgctggtgtctgccctggtgctgatggctatggtcaagcggaaggacagccgggga

SEQ ID NO: 37210 - DNA, 2685 bp, synthetic construct
  source 1..2685: mol_type = other DNA
atggccttaccagtgaccgccttgctcctgccgctggccttgctgctccacgccgccaggccggaagtgcagctggttgaatctggcggaggactggttcagcctggcggatctctgagactgtcttgtgccgccagcggcttcagcttcagcgacttttggatgagctgggtccgacaggcccctggcaaaggacttgaatgggtcgccacaatcagccaggccggcagcgagaaggactacgtggactctgtgaagggcagattcaccatcagccgggacaacgccaagaagtccctgtacctccagatgaacagcctgagagccgaggacaccgccgtgtactattgtgcctctggcgtgtacagcttcgactacagaggccagggcaccctggtcacagtctcttctggtaccggcggaggcggatctggcggcggaggtagcggtggcggaggatctgaattcgacatccagatgacacagagccctagcagcctgtctgccagcgtgggagacagagtgaccatcacatgcaagagcagccagagcctgctggactccgatggcaagacctacctgaactggtatcagcagaagcccggcaaggcccctaagctgctgatctacctggtgtccaagctggatagcggcgtgcccagcagattttctggcagcggcagcggaaccgacttcaccctgacaatatccagcctccagcctgaggacttcgccacctactactgcttccaaggcacccactttccatacaccttcggccagggcaccaaggtggaaatcaaaagactcgagatccagaaccctgatcctgccgtgtaccagctgcgggatagcaagagcagcgacaagagcgtgtgtctgttcaccgacttcgacagccagaccaacgtgtcccagagcaaggactccgacgtgtacatcaccgataagtgcgtgctggacatgcggagcatggacttcaagagcaactccgccgtggcctggtccaacaagtccgatttcgcctgcgccaacgccttcaacaacagcattatccccgaggacacattcttcccaagccccgagagcagctgcggctttaccagcgagagctaccagcagggcgtgctgagcgccaccatcctgtacgagatcctgctgggcaaggccaccctgtacgccgtgctggtgtctgccctggtgctgatggctatggtcaagcggaaggacagccggggacgcgccaagagaagcggatctggcgtgaagcagaccctgaatttcgacctgctgaagctggctggcgacgtggaatccaacccaggccctactagtatggactggatttggcgcatccttttccttgtcggcgctgctaccggcgcgcattccgggccccagctccagctgcaagagtctggacctggcctggtcaagcctagcgagacactgagcctgacctgtaccgtgtccggcgatagcatcagcagcggcgattactactggggctggatcagacagcctcctggcaaaggactggaatggatcggccacatctactacagcggcgtgacctactacaaccccagcctgaagtccagagtgaccatcagcgtggacaccagccggaaccagttctccctgaagctgtctagcgtgacagccgccgataccgccgtgtactactgcaccagagaggacagcagcaactggcggagtagaggccagggaacactggtcacagttagctctggatccggcggaggcggaagtggaggcggaggatctggcggcggaggctctttcgaagaagtgcagctggttgaatcaggcggaggactggttcagcctggcggatctctgagactgtcttgtgccgccagcggctacaccttcaccaactactggatgaactgggtccgacaggcccctggcaaaggactggaatgggtcggaatgatcgaccccagcgacagcgagacacactacaaccacatcttcaaggaccgcttcaccatcagcgccgacaccagcaagaataccgcctacctccagatgaactccctgagagccgaggacaccgccgtgtactactgcgccagaaacctgtatctgtggggccagggaaccctggtcacagtgtcatctacgcgtgaggacctgaagaacgtgttcccacctgaggtggccgtgttcgagcctagcgaggccgagatcagccacacccagaaagccaccctcgtgtgcctggctaccggcttctaccccgaccatgtggaactgtcttggtgggtcaacggcaaagaggtgcacagcggcgtgtgtaccgacccccagccactgaaagaacagcccgccctgaacgacagccggtactgcctgagcagcagactgagagtgtccgccaccttctggcagaacccccggaaccacttcagatgccaggtgcagttctacggcctgagcgagaacgacgagtggacccaggacagagccaagcccgtgacccagatcgtgtctgccgaagcctggggcagagccgattgcgacgtgaagctggtggaaaagagcttcgagacagacaccaacctgaacttccagaacctgagcgtgatcggcttcagaatcctgctgctgaaagtggccggctttaacctgctgatgaccctgcggctgtggtccagc

SEQ ID NO: 37211 - DNA, 2067 bp, synthetic construct
  source 1..2067: mol_type = other DNA
atggccttaccagtgaccgccttgctcctgccgctggccttgctgctccacgccgccaggccggacatccagatgacacagagccctagcagcctgtctgccagcgtgggagacagagtgaccatcacatgcaagagcagccagagcctgctggactccgatggcaagacctacctgaactggtatcagcagaagcccggcaaggcccctaagctgctgatctacctggtgtccaagctggatagcggcgtgcccagcagattttctggcagcggcagcggaaccgacttcaccctgacaatatccagcctccagcctgaggacttcgccacctactactgcttccaaggcacccactttccatacaccttcggccagggcaccaaggtggaaatcaaaagactcgaggacctgaagaacgtgttcccacctgaggtggccgtgttcgagcctagcgaggccgagatcagccacacccagaaagccaccctcgtgtgcctggctaccggcttctaccccgaccatgtggaactgtcttggtgggtcaacggcaaagaggtgcacagcggcgtgtgtaccgacccccagccactgaaagaacagcccgccctgaacgacagccggtactgcctgagcagcagactgagagtgtccgccaccttctggcagaacccccggaaccacttcagatgccaggtgcagttctacggcctgagcgagaacgacgagtggacccaggacagagccaagcccgtgacccagatcgtgtctgccgaagcctggggcagagccgattgcgacgtgaagctggtggaaaagagcttcgagacagacaccaacctgaacttccagaacctgagcgtgatcggcttcagaatcctgctgctgaaagtggccggctttaacctgctgatgaccctgcggctgtggtccagcagggccaagcgatctggatctggagcaacaaacttctcactactcaaacaagcaggtgacgtggaggagaatcccgggcctactagtatggactggatttggcgcatccttttccttgtcggcgctgctaccggcgcccattccgggcccatggaccccgacctggaaatcagagccgccttcctgcggcagagaaacacagccctgagaacagaggtggccgagctggaacaagaggtgcagcggctggaaaacgaggtgtcccagtacgagacaagatacggccctctcggaggcggaaaaggatccggcggcggaggatctggcggaggcggatctgggggcggaggctctttcgaagaagtgcagctggttgaatcaggcggaggactggttcagcctggcggatctctgagactgtcttgtgccgccagcggctacaccttcaccaactactggatgaactgggtccgacaggcccctggcaaaggactggaatgggtcggaatgatcgaccccagcgacagcgagacacactacaaccacatcttcaaggaccgcttcaccatcagcgccgacaccagcaagaataccgcctacctccagatgaactccctgagagccgaggacaccgccgtgtactactgcgccagaaacctgtatctgtggggccagggaaccctggtcacagtgtcatctacgcgtatccagaaccctgatcctgccgtgtaccagctgcgggatagcaagagcagcgacaagagcgtgtgtctgttcaccgacttcgacagccagaccaacgtgtcccagagcaaggactccgacgtgtacatcaccgataagtgcgtgctggacatgcggagcatggacttcaagagcaactccgccgtggcctggtccaacaagtccgatttcgcctgcgccaacgccttcaacaacagcattatccccgaggacacattcttcccaagccccgagagcagctgcggctttaccagcgagagctaccagcagggcgtgctgagcgccaccatcctgtacgagatcctgctgggcaaggccaccctgtacgccgtgctggtgtctgccctggtgctgatggctatggtcaagcggaaggacagccgggga

SEQ ID NO: 37212 - DNA, 2079 bp, synthetic construct
  source 1..2079: mol_type = other DNA
atggccttaccagtgaccgccttgctcctgccgctggccttgctgctccacgccgccaggccggacatccagatgacacagagccctagcagcctgtctgccagcgtgggagacagagtgaccatcacatgcaagagcagccagagcctgctggactccgatggcaagacctacctgaactggtatcagcagaagcccggcaaggcccctaagctgctgatctacctggtgtccaagctggatagcggcgtgcccagcagattttctggcagcggcagcggaaccgacttcaccctgacaatatccagcctccagcctgaggacttcgccacctactactgcttccaaggcacccactttccatacaccttcggccagggcaccaaggtggaaatcaaaagactcgagatccagaaccctgatcctgccgtgtaccagctgcgggatagcaagagcagcgacaagagcgtgtgtctgttcaccgacttcgacagccagaccaacgtgtcccagagcaaggactccgacgtgtacatcaccgataagtgcgtgctggacatgcggagcatggacttcaagagcaactccgccgtggcctggtccaacaagtccgatttcgcctgcgccaacgccttcaacaacagcattatccccgaggacacattcttcccaagccccgagagcagctgcggctttaccagcgagagctaccagcagggcgtgctgagcgccaccatcctgtacgagatcctgctgggcaaggccaccctgtacgccgtgctggtgtctgccctggtgctgatggctatggtcaagcggaaggacagccggggacgcgccaagagaagcggatctggcgtgaagcagaccctgaatttcgacctgctgaagctggctggcgacgtggaatccaacccaggccctactagtatggactggatttggcgcatccttttccttgtcggcgctgctaccggcgcccattccgggcccatggaccccgacctggaaatcagagccgccttcctgcggcagagaaacacagccctgagaacagaggtggccgagctggaacaagaggtgcagcggctggaaaacgaggtgtcccagtacgagacaagatacggccctctcggaggcggaaaaggatccggcggcggaggatctggcggaggcggatctgggggcggaggctctttcgaagaagtgcagctggttgaatcaggcggaggactggttcagcctggcggatctctgagactgtcttgtgccgccagcggctacaccttcaccaactactggatgaactgggtccgacaggcccctggcaaaggactggaatgggtcggaatgatcgaccccagcgacagcgagacacactacaaccacatcttcaaggaccgcttcaccatcagcgccgacaccagcaagaataccgcctacctccagatgaactccctgagagccgaggacaccgccgtgtactactgcgccagaaacctgtatctgtggggccagggaaccctggtcacagtgtcatctacgcgtgaggacctgaagaacgtgttcccacctgaggtggccgtgttcgagcctagcgaggccgagatcagccacacccagaaagccaccctcgtgtgcctggctaccggcttctaccccgaccatgtggaactgtcttggtgggtcaacggcaaagaggtgcacagcggcgtgtgtaccgacccccagccactgaaagaacagcccgccctgaacgacagccggtactgcctgagcagcagactgagagtgtccgccaccttctggcagaacccccggaaccacttcagatgccaggtgcagttctacggcctgagcgagaacgacgagtggacccaggacagagccaagcccgtgacccagatcgtgtctgccgaagcctggggcagagccgattgcgacgtgaagctggtggaaaagagcttcgagacagacaccaacctgaacttccagaacctgagcgtgatcggcttcagaatcctgctgctgaaagtggccggctttaacctgctgatgaccctgcggctgtggtccagc

SEQ ID NO: 37213 - DNA, 1998 bp, synthetic construct
  source 1..1998: mol_type = other DNA
atggccttaccagtgaccgccttgctcctgccgctggccttgctgctccacgccgccaggccggacatccagatgacacagagccctagcagcctgtctgccagcgtgggagacagagtgaccatcacatgcaagagcagccagagcctgctggactccgatggcaagacctacctgaactggtatcagcagaagcccggcaaggcccctaagctgctgatctacctggtgtccaagctggatagcggcgtgcccagcagattttctggcagcggcagcggaaccgacttcaccctgacaatatccagcctccagcctgaggacttcgccacctactactgcttccaaggcacccactttccatacaccttcggccagggcaccaaggtggaaatcaaaagactcgaggacctgaagaacgtgttcccacctgaggtggccgtgttcgagcctagcgaggccgagatcagccacacccagaaagccaccctcgtgtgcctggctaccggcttctaccccgaccatgtggaactgtcttggtgggtcaacggcaaagaggtgcacagcggcgtgtgtaccgacccccagccactgaaagaacagcccgccctgaacgacagccggtactgcctgagcagcagactgagagtgtccgccaccttctggcagaacccccggaaccacttcagatgccaggtgcagttctacggcctgagcgagaacgacgagtggacccaggacagagccaagcccgtgacccagatcgtgtctgccgaagcctggggcagagccgattgcgacgtgaagctggtggaaaagagcttcgagacagacaccaacctgaacttccagaacctgagcgtgatcggcttcagaatcctgctgctgaaagtggccggctttaacctgctgatgaccctgcggctgtggtccagcagggccaagcgatctggatctggagcaacaaacttctcactactcaaacaagcaggtgacgtggaggagaatcccgggcctactagtatggactggatttggcgcatccttttccttgtcggcgctgctaccggcgcccattccgggcccgaagttgctgccctcgagaaggaggtagcagctttggaaaaagaagtcgcagcccttgagaaagaagttgcggctctggagaagggatccggcggcggaggatctggcggaggcggatctgggggcggaggctctttcgaagaagtgcagctggttgaatcaggcggaggactggttcagcctggcggatctctgagactgtcttgtgccgccagcggctacaccttcaccaactactggatgaactgggtccgacaggcccctggcaaaggactggaatgggtcggaatgatcgaccccagcgacagcgagacacactacaaccacatcttcaaggaccgcttcaccatcagcgccgacaccagcaagaataccgcctacctccagatgaactccctgagagccgaggacaccgccgtgtactactgcgccagaaacctgtatctgtggggccagggaaccctggtcacagtgtcatctacgcgtatccagaaccctgatcctgccgtgtaccagctgcgggatagcaagagcagcgacaagagcgtgtgtctgttcaccgacttcgacagccagaccaacgtgtcccagagcaaggactccgacgtgtacatcaccgataagtgcgtgctggacatgcggagcatggacttcaagagcaactccgccgtggcctggtccaacaagtccgatttcgcctgcgccaacgccttcaacaacagcattatccccgaggacacattcttcccaagccccgagagcagctgcggctttaccagcgagagctaccagcagggcgtgctgagcgccaccatcctgtacgagatcctgctgggcaaggccaccctgtacgccgtgctggtgtctgccctggtgctgatggctatggtcaagcggaaggacagccgggga

SEQ ID NO: 37214 - DNA, 2010 bp, synthetic construct
  source 1..2010: mol_type = other DNA
atggccttaccagtgaccgccttgctcctgccgctggccttgctgctccacgccgccaggccggacatccagatgacacagagccctagcagcctgtctgccagcgtgggagacagagtgaccatcacatgcaagagcagccagagcctgctggactccgatggcaagacctacctgaactggtatcagcagaagcccggcaaggcccctaagctgctgatctacctggtgtccaagctggatagcggcgtgcccagcagattttctggcagcggcagcggaaccgacttcaccctgacaatatccagcctccagcctgaggacttcgccacctactactgcttccaaggcacccactttccatacaccttcggccagggcaccaaggtggaaatcaaaagactcgagatccagaaccctgatcctgccgtgtaccagctgcgggatagcaagagcagcgacaagagcgtgtgtctgttcaccgacttcgacagccagaccaacgtgtcccagagcaaggactccgacgtgtacatcaccgataagtgcgtgctggacatgcggagcatggacttcaagagcaactccgccgtggcctggtccaacaagtccgatttcgcctgcgccaacgccttcaacaacagcattatccccgaggacacattcttcccaagccccgagagcagctgcggctttaccagcgagagctaccagcagggcgtgctgagcgccaccatcctgtacgagatcctgctgggcaaggccaccctgtacgccgtgctggtgtctgccctggtgctgatggctatggtcaagcggaaggacagccggggacgcgccaagagaagcggatctggcgtgaagcagaccctgaatttcgacctgctgaagctggctggcgacgtggaatccaacccaggccctactagtatggactggatttggcgcatccttttccttgtcggcgctgctaccggcgcccattccgggcccgaagttgctgccctcgagaaggaggtagcagctttggaaaaagaagtcgcagcccttgagaaagaagttgcggctctggagaagggatccggcggcggaggatctggcggaggcggatctgggggcggaggctctttcgaagaagtgcagctggttgaatcaggcggaggactggttcagcctggcggatctctgagactgtcttgtgccgccagcggctacaccttcaccaactactggatgaactgggtccgacaggcccctggcaaaggactggaatgggtcggaatgatcgaccccagcgacagcgagacacactacaaccacatcttcaaggaccgcttcaccatcagcgccgacaccagcaagaataccgcctacctccagatgaactccctgagagccgaggacaccgccgtgtactactgcgccagaaacctgtatctgtggggccagggaaccctggtcacagtgtcatctacgcgtgaggacctgaagaacgtgttcccacctgaggtggccgtgttcgagcctagcgaggccgagatcagccacacccagaaagccaccctcgtgtgcctggctaccggcttctaccccgaccatgtggaactgtcttggtgggtcaacggcaaagaggtgcacagcggcgtgtgtaccgacccccagccactgaaagaacagcccgccctgaacgacagccggtactgcctgagcagcagactgagagtgtccgccaccttctggcagaacccccggaaccacttcagatgccaggtgcagttctacggcctgagcgagaacgacgagtggacccaggacagagccaagcccgtgacccagatcgtgtctgccgaagcctggggcagagccgattgcgacgtgaagctggtggaaaagagcttcgagacagacaccaacctgaacttccagaacctgagcgtgatcggcttcagaatcctgctgctgaaagtggccggctttaacctgctgatgaccctgcggctgtggtccagc

SEQ ID NO: 37215 - DNA, 2268 bp, synthetic construct
  source 1..2268: mol_type = other DNA
atggccttaccagtgaccgccttgctcctgccgctggccttgctgctccacgccgccaggccggacatccagatgacacagagccctagcagcctgtctgccagcgtgggagacagagtgaccatcacatgcaagagcagccagagcctgctggactccgatggcaagacctacctgaactggtatcagcagaagcccggcaaggcccctaagctgctgatctacctggtgtccaagctggatagcggcgtgcccagcagattttctggcagcggcagcggaaccgacttcaccctgacaatatccagcctccagcctgaggacttcgccacctactactgcttccaaggcacccactttccatacaccttcggccagggcaccaaggtggaaatcaaaagactcgaggacctgaagaacgtgttcccacctgaggtggccgtgttcgagcctagcgaggccgagatcagccacacccagaaagccaccctcgtgtgcctggctaccggcttctaccccgaccatgtggaactgtcttggtgggtcaacggcaaagaggtgcacagcggcgtgtgtaccgacccccagccactgaaagaacagcccgccctgaacgacagccggtactgcctgagcagcagactgagagtgtccgccaccttctggcagaacccccggaaccacttcagatgccaggtgcagttctacggcctgagcgagaacgacgagtggacccaggacagagccaagcccgtgacccagatcgtgtctgccgaagcctggggcagagccgattgcgacgtgaagctggtggaaaagagcttcgagacagacaccaacctgaacttccagaacctgagcgtgatcggcttcagaatcctgctgctgaaagtggccggctttaacctgctgatgaccctgcggctgtggtccagcagggccaagcgatctggatctggagcaacaaacttctcactactcaaacaagcaggtgacgtggaggagaatcccgggcctactagtatggactggatttggcgcatccttttccttgtcggcgctgctaccggcgcccattccgggccccaggttcagctgcaagagtctggcggaggacttgctcaagctggcggaagcctgagactgtcttgtgccgcctctggcagaaccttcagcatgggctggtttagacaggcccctggcaaagagagagagttcgtcgccgccatcacatacagcggcggcagcccttactacgcctcttctgtcagaggccggttcaccatcagccgggacaacgccaagaacaccgtgtacctccagatgaacagcctgaagccagaggacaccgccgtgtactactgtgccgccaatccaacctacggcagcgactggaatgccgagaattggggccagggcacccaagtgacagtgtctagtggatccggcggcggaggatctggcggaggcggatctgggggcggaggctctttcgaagaagtgcagctggttgaatcaggcggaggactggttcagcctggcggatctctgagactgtcttgtgccgccagcggctacaccttcaccaactactggatgaactgggtccgacaggcccctggcaaaggactggaatgggtcggaatgatcgaccccagcgacagcgagacacactacaaccacatcttcaaggaccgcttcaccatcagcgccgacaccagcaagaataccgcctacctccagatgaactccctgagagccgaggacaccgccgtgtactactgcgccagaaacctgtatctgtggggccagggaaccctggtcacagtgtcatctacgcgtatccagaaccctgatcctgccgtgtaccagctgcgggatagcaagagcagcgacaagagcgtgtgtctgttcaccgacttcgacagccagaccaacgtgtcccagagcaaggactccgacgtgtacatcaccgataagtgcgtgctggacatgcggagcatggacttcaagagcaactccgccgtggcctggtccaacaagtccgatttcgcctgcgccaacgccttcaacaacagcattatccccgaggacacattcttcccaagccccgagagcagctgcggctttaccagcgagagctaccagcagggcgtgctgagcgccaccatcctgtacgagatcctgctgggcaaggccaccctgtacgccgtgctggtgtctgccctggtgctgatggctatggtcaagcggaaggacagccgggga

SEQ ID NO: 37216 - DNA, 2280 bp, synthetic construct
  source 1..2280: mol_type = other DNA
atggccttaccagtgaccgccttgctcctgccgctggccttgctgctccacgccgccaggccggacatccagatgacacagagccctagcagcctgtctgccagcgtgggagacagagtgaccatcacatgcaagagcagccagagcctgctggactccgatggcaagacctacctgaactggtatcagcagaagcccggcaaggcccctaagctgctgatctacctggtgtccaagctggatagcggcgtgcccagcagattttctggcagcggcagcggaaccgacttcaccctgacaatatccagcctccagcctgaggacttcgccacctactactgcttccaaggcacccactttccatacaccttcggccagggcaccaaggtggaaatcaaaagactcgagatccagaaccctgatcctgccgtgtaccagctgcgggatagcaagagcagcgacaagagcgtgtgtctgttcaccgacttcgacagccagaccaacgtgtcccagagcaaggactccgacgtgtacatcaccgataagtgcgtgctggacatgcggagcatggacttcaagagcaactccgccgtggcctggtccaacaagtccgatttcgcctgcgccaacgccttcaacaacagcattatccccgaggacacattcttcccaagccccgagagcagctgcggctttaccagcgagagctaccagcagggcgtgctgagcgccaccatcctgtacgagatcctgctgggcaaggccaccctgtacgccgtgctggtgtctgccctggtgctgatggctatggtcaagcggaaggacagccggggacgcgccaagagaagcggatctggcgtgaagcagaccctgaatttcgacctgctgaagctggctggcgacgtggaatccaacccaggccctactagtatggactggatttggcgcatccttttccttgtcggcgctgctaccggcgcccattccgggccccaggttcagctgcaagagtctggcggaggacttgctcaagctggcggaagcctgagactgtcttgtgccgcctctggcagaaccttcagcatgggctggtttagacaggcccctggcaaagagagagagttcgtcgccgccatcacatacagcggcggcagcccttactacgcctcttctgtcagaggccggttcaccatcagccgggacaacgccaagaacaccgtgtacctccagatgaacagcctgaagccagaggacaccgccgtgtactactgtgccgccaatccaacctacggcagcgactggaatgccgagaattggggccagggcacccaagtgacagtgtctagtggatccggcggcggaggatctggcggaggcggatctgggggcggaggctctttcgaagaagtgcagctggttgaatcaggcggaggactggttcagcctggcggatctctgagactgtcttgtgccgccagcggctacaccttcaccaactactggatgaactgggtccgacaggcccctggcaaaggactggaatgggtcggaatgatcgaccccagcgacagcgagacacactacaaccacatcttcaaggaccgcttcaccatcagcgccgacaccagcaagaataccgcctacctccagatgaactccctgagagccgaggacaccgccgtgtactactgcgccagaaacctgtatctgtggggccagggaaccctggtcacagtgtcatctacgcgtgaggacctgaagaacgtgttcccacctgaggtggccgtgttcgagcctagcgaggccgagatcagccacacccagaaagccaccctcgtgtgcctggctaccggcttctaccccgaccatgtggaactgtcttggtgggtcaacggcaaagaggtgcacagcggcgtgtgtaccgacccccagccactgaaagaacagcccgccctgaacgacagccggtactgcctgagcagcagactgagagtgtccgccaccttctggcagaacccccggaaccacttcagatgccaggtgcagttctacggcctgagcgagaacgacgagtggacccaggacagagccaagcccgtgacccagatcgtgtctgccgaagcctggggcagagccgattgcgacgtgaagctggtggaaaagagcttcgagacagacaccaacctgaacttccagaacctgagcgtgatcggcttcagaatcctgctgctgaaagtggccggctttaacctgctgatgaccctgcggctgtggtccagc

SEQ ID NO: 37217 - DNA, 2286 bp, synthetic construct
  source 1..2286: mol_type = other DNA
atggccttaccagtgaccgccttgctcctgccgctggccttgctgctccacgccgccaggccggaagtgcaactggtggaatctggaggctctctggtgcagccagggggaagcctgagactgtcttgtgccgcttccggcttcaccttcgacgactacgccatgagctgggtgcgccaggtgccaggcaaaggcctggaatgggtgtccagcatcaactggagcggcacccacaccgattacgccgactccgtgaaaggcagattcacaatcagcagaaacaacgccaacaataccctgtacctgcagatgaactccctgaagtctgaggatacagcagtgtattattgcgccaagaactggcgggacgccggcaccacttggtttgagaaaagcggctctgccggacagggaacccaagtgacagtgtcctccggtaccggcggaggcggatctggcggcggaggtagcggtggcggaggatctgaattcgacatccagatgacacagagccctagcagcctgtctgccagcgtgggagacagagtgaccatcacatgcaagagcagccagagcctgctggactccgatggcaagacctacctgaactggtatcagcagaagcccggcaaggcccctaagctgctgatctacctggtgtccaagctggatagcggcgtgcccagcagattttctggcagcggcagcggaaccgacttcaccctgacaatatccagcctccagcctgaggacttcgccacctactactgcttccaaggcacccactttccatacaccttcggccagggcaccaaggtggaaatcaaaagactcgaggacctgaagaacgtgttcccacctgaggtggccgtgttcgagcctagcgaggccgagatcagccacacccagaaagccaccctcgtgtgcctggctaccggcttctaccccgaccatgtggaactgtcttggtgggtcaacggcaaagaggtgcacagcggcgtgtgtaccgacccccagccactgaaagaacagcccgccctgaacgacagccggtactgcctgagcagcagactgagagtgtccgccaccttctggcagaacccccggaaccacttcagatgccaggtgcagttctacggcctgagcgagaacgacgagtggacccaggacagagccaagcccgtgacccagatcgtgtctgccgaagcctggggcagagccgattgcgacgtgaagctggtggaaaagagcttcgagacagacaccaacctgaacttccagaacctgagcgtgatcggcttcagaatcctgctgctgaaagtggccggctttaacctgctgatgaccctgcggctgtggtccagcagggccaagcgatctggatctggagcaacaaacttctcactactcaaacaagcaggtgacgtggaggagaatcccgggcctactagtatggactggatttggcgcatccttttccttgtcggcgctgctaccggcgcgcattccttcgaagaagtgcagctggttgaatcaggcggaggactggttcagcctggcggatctctgagactgtcttgtgccgccagcggctacaccttcaccaactactggatgaactgggtccgacaggcccctggcaaaggactggaatgggtcggaatgatcgaccccagcgacagcgagacacactacaaccacatcttcaaggaccgcttcaccatcagcgccgacaccagcaagaataccgcctacctccagatgaactccctgagagccgaggacaccgccgtgtactactgcgccagaaacctgtatctgtggggccagggaaccctggtcacagtgtcatctacgcgtatccagaaccctgatcctgccgtgtaccagctgcgggatagcaagagcagcgacaagagcgtgtgtctgttcaccgacttcgacagccagaccaacgtgtcccagagcaaggactccgacgtgtacatcaccgataagtgcgtgctggacatgcggagcatggacttcaagagcaactccgccgtggcctggtccaacaagtccgatttcgcctgcgccaacgccttcaacaacagcattatccccgaggacacattcttcccaagccccgagagcagctgcggctttaccagcgagagctaccagcagggcgtgctgagcgccaccatcctgtacgagatcctgctgggcaaggccaccctgtacgccgtgctggtgtctgccctggtgctgatggctatggtcaagcggaaggacagccgggga

SEQ ID NO: 37218 - DNA, 2298 bp, synthetic construct
  source 1..2298: mol_type = other DNA
atggccttaccagtgaccgccttgctcctgccgctggccttgctgctccacgccgccaggccggaagtgcaactggtggaatctggaggctctctggtgcagccagggggaagcctgagactgtcttgtgccgcttccggcttcaccttcgacgactacgccatgagctgggtgcgccaggtgccaggcaaaggcctggaatgggtgtccagcatcaactggagcggcacccacaccgattacgccgactccgtgaaaggcagattcacaatcagcagaaacaacgccaacaataccctgtacctgcagatgaactccctgaagtctgaggatacagcagtgtattattgcgccaagaactggcgggacgccggcaccacttggtttgagaaaagcggctctgccggacagggaacccaagtgacagtgtcctccggtaccggcggaggcggatctggcggcggaggtagcggtggcggaggatctgaattcgacatccagatgacacagagccctagcagcctgtctgccagcgtgggagacagagtgaccatcacatgcaagagcagccagagcctgctggactccgatggcaagacctacctgaactggtatcagcagaagcccggcaaggcccctaagctgctgatctacctggtgtccaagctggatagcggcgtgcccagcagattttctggcagcggcagcggaaccgacttcaccctgacaatatccagcctccagcctgaggacttcgccacctactactgcttccaaggcacccactttccatacaccttcggccagggcaccaaggtggaaatcaaaagactcgagatccagaaccctgatcctgccgtgtaccagctgcgggatagcaagagcagcgacaagagcgtgtgtctgttcaccgacttcgacagccagaccaacgtgtcccagagcaaggactccgacgtgtacatcaccgataagtgcgtgctggacatgcggagcatggacttcaagagcaactccgccgtggcctggtccaacaagtccgatttcgcctgcgccaacgccttcaacaacagcattatccccgaggacacattcttcccaagccccgagagcagctgcggctttaccagcgagagctaccagcagggcgtgctgagcgccaccatcctgtacgagatcctgctgggcaaggccaccctgtacgccgtgctggtgtctgccctggtgctgatggctatggtcaagcggaaggacagccggggacgcgccaagagaagcggatctggcgtgaagcagaccctgaatttcgacctgctgaagctggctggcgacgtggaatccaacccaggccctactagtatggactggatttggcgcatccttttccttgtcggcgctgctaccggcgcgcattccttcgaagaagtgcagctggttgaatcaggcggaggactggttcagcctggcggatctctgagactgtcttgtgccgccagcggctacaccttcaccaactactggatgaactgggtccgacaggcccctggcaaaggactggaatgggtcggaatgatcgaccccagcgacagcgagacacactacaaccacatcttcaaggaccgcttcaccatcagcgccgacaccagcaagaataccgcctacctccagatgaactccctgagagccgaggacaccgccgtgtactactgcgccagaaacctgtatctgtggggccagggaaccctggtcacagtgtcatctacgcgtgaggacctgaagaacgtgttcccacctgaggtggccgtgttcgagcctagcgaggccgagatcagccacacccagaaagccaccctcgtgtgcctggctaccggcttctaccccgaccatgtggaactgtcttggtgggtcaacggcaaagaggtgcacagcggcgtgtgtaccgacccccagccactgaaagaacagcccgccctgaacgacagccggtactgcctgagcagcagactgagagtgtccgccaccttctggcagaacccccggaaccacttcagatgccaggtgcagttctacggcctgagcgagaacgacgagtggacccaggacagagccaagcccgtgacccagatcgtgtctgccgaagcctggggcagagccgattgcgacgtgaagctggtggaaaagagcttcgagacagacaccaacctgaacttccagaacctgagcgtgatcggcttcagaatcctgctgctgaaagtggccggctttaacctgctgatgaccctgcggctgtggtccagc

SEQ ID NO: 37219 - DNA, 2280 bp, synthetic construct
  source 1..2280: mol_type = other DNA
atggccttaccagtgaccgccttgctcctgccgctggccttgctgctccacgccgccaggccggaagttcagctgcttgagtctggcggaggactggttcaacctggcggaagcctgagactgtcttgtgccgccagcggcttcatcttcagcagctacgccatgagctgggtccgacaggctcctggaaagggccaagaatgggtttccggcgttagcggcacaggcgtgaacacctactacgccgatagcgtgaagggcagattcaccatcagccgggacaacagcaagaacaccctgtacctccagatgaacagcctgagagccgaggacaccgccgtgtactattgtgcctctggcaaaggctgggacagcggctcttggtacgaggactatagaggccagggcaccctggtcacagtttcttcaggtaccggcggaggcggatctggcggcggaggtagcggtggcggaggatctgaattcgacatccagatgacacagagccctagcagcctgtctgccagcgtgggagacagagtgaccatcacatgcaagagcagccagagcctgctggactccgatggcaagacctacctgaactggtatcagcagaagcccggcaaggcccctaagctgctgatctacctggtgtccaagctggatagcggcgtgcccagcagattttctggcagcggcagcggaaccgacttcaccctgacaatatccagcctccagcctgaggacttcgccacctactactgcttccaaggcacccactttccatacaccttcggccagggcaccaaggtggaaatcaaaagactcgaggacctgaagaacgtgttcccacctgaggtggccgtgttcgagcctagcgaggccgagatcagccacacccagaaagccaccctcgtgtgcctggctaccggcttctaccccgaccatgtggaactgtcttggtgggtcaacggcaaagaggtgcacagcggcgtgtgtaccgacccccagccactgaaagaacagcccgccctgaacgacagccggtactgcctgagcagcagactgagagtgtccgccaccttctggcagaacccccggaaccacttcagatgccaggtgcagttctacggcctgagcgagaacgacgagtggacccaggacagagccaagcccgtgacccagatcgtgtctgccgaagcctggggcagagccgattgcgacgtgaagctggtggaaaagagcttcgagacagacaccaacctgaacttccagaacctgagcgtgatcggcttcagaatcctgctgctgaaagtggccggctttaacctgctgatgaccctgcggctgtggtccagcagggccaagcgatctggatctggagcaacaaacttctcactactcaaacaagcaggtgacgtggaggagaatcccgggcctactagtatggactggatttggcgcatccttttccttgtcggcgctgctaccggcgcgcattccttcgaagaagtgcagctggttgaatcaggcggaggactggttcagcctggcggatctctgagactgtcttgtgccgccagcggctacaccttcaccaactactggatgaactgggtccgacaggcccctggcaaaggactggaatgggtcggaatgatcgaccccagcgacagcgagacacactacaaccacatcttcaaggaccgcttcaccatcagcgccgacaccagcaagaataccgcctacctccagatgaactccctgagagccgaggacaccgccgtgtactactgcgccagaaacctgtatctgtggggccagggaaccctggtcacagtgtcatctacgcgtatccagaaccctgatcctgccgtgtaccagctgcgggatagcaagagcagcgacaagagcgtgtgtctgttcaccgacttcgacagccagaccaacgtgtcccagagcaaggactccgacgtgtacatcaccgataagtgcgtgctggacatgcggagcatggacttcaagagcaactccgccgtggcctggtccaacaagtccgatttcgcctgcgccaacgccttcaacaacagcattatccccgaggacacattcttcccaagccccgagagcagctgcggctttaccagcgagagctaccagcagggcgtgctgagcgccaccatcctgtacgagatcctgctgggcaaggccaccctgtacgccgtgctggtgtctgccctggtgctgatggctatggtcaagcggaaggacagccgggga

SEQ ID NO: 37220 - DNA, 2292 bp, synthetic construct
  source 1..2292: mol_type = other DNA
atggccttaccagtgaccgccttgctcctgccgctggccttgctgctccacgccgccaggccggaagttcagctgcttgagtctggcggaggactggttcaacctggcggaagcctgagactgtcttgtgccgccagcggcttcatcttcagcagctacgccatgagctgggtccgacaggctcctggaaagggccaagaatgggtttccggcgttagcggcacaggcgtgaacacctactacgccgatagcgtgaagggcagattcaccatcagccgggacaacagcaagaacaccctgtacctccagatgaacagcctgagagccgaggacaccgccgtgtactattgtgcctctggcaaaggctgggacagcggctcttggtacgaggactatagaggccagggcaccctggtcacagtttcttcaggtaccggcggaggcggatctggcggcggaggtagcggtggcggaggatctgaattcgacatccagatgacacagagccctagcagcctgtctgccagcgtgggagacagagtgaccatcacatgcaagagcagccagagcctgctggactccgatggcaagacctacctgaactggtatcagcagaagcccggcaaggcccctaagctgctgatctacctggtgtccaagctggatagcggcgtgcccagcagattttctggcagcggcagcggaaccgacttcaccctgacaatatccagcctccagcctgaggacttcgccacctactactgcttccaaggcacccactttccatacaccttcggccagggcaccaaggtggaaatcaaaagactcgagatccagaaccctgatcctgccgtgtaccagctgcgggatagcaagagcagcgacaagagcgtgtgtctgttcaccgacttcgacagccagaccaacgtgtcccagagcaaggactccgacgtgtacatcaccgataagtgcgtgctggacatgcggagcatggacttcaagagcaactccgccgtggcctggtccaacaagtccgatttcgcctgcgccaacgccttcaacaacagcattatccccgaggacacattcttcccaagccccgagagcagctgcggctttaccagcgagagctaccagcagggcgtgctgagcgccaccatcctgtacgagatcctgctgggcaaggccaccctgtacgccgtgctggtgtctgccctggtgctgatggctatggtcaagcggaaggacagccggggacgcgccaagagaagcggatctggcgtgaagcagaccctgaatttcgacctgctgaagctggctggcgacgtggaatccaacccaggccctactagtatggactggatttggcgcatccttttccttgtcggcgctgctaccggcgcgcattccttcgaagaagtgcagctggttgaatcaggcggaggactggttcagcctggcggatctctgagactgtcttgtgccgccagcggctacaccttcaccaactactggatgaactgggtccgacaggcccctggcaaaggactggaatgggtcggaatgatcgaccccagcgacagcgagacacactacaaccacatcttcaaggaccgcttcaccatcagcgccgacaccagcaagaataccgcctacctccagatgaactccctgagagccgaggacaccgccgtgtactactgcgccagaaacctgtatctgtggggccagggaaccctggtcacagtgtcatctacgcgtgaggacctgaagaacgtgttcccacctgaggtggccgtgttcgagcctagcgaggccgagatcagccacacccagaaagccaccctcgtgtgcctggctaccggcttctaccccgaccatgtggaactgtcttggtgggtcaacggcaaagaggtgcacagcggcgtgtgtaccgacccccagccactgaaagaacagcccgccctgaacgacagccggtactgcctgagcagcagactgagagtgtccgccaccttctggcagaacccccggaaccacttcagatgccaggtgcagttctacggcctgagcgagaacgacgagtggacccaggacagagccaagcccgtgacccagatcgtgtctgccgaagcctggggcagagccgattgcgacgtgaagctggtggaaaagagcttcgagacagacaccaacctgaacttccagaacctgagcgtgatcggcttcagaatcctgctgctgaaagtggccggctttaacctgctgatgaccctgcggctgtggtccagc

SEQ ID NO: 37221 - DNA, 2184 bp, synthetic construct
  source 1..2184: mol_type = other DNA
atggccttaccagtgaccgccttgctcctgccgctggccttgctgctccacgccgccaggccgatgctgcccgctcctaagaatctggtggtgtccagaatcaccgaggacagcgccagactgtcttggacagctcctgatgccgccttcgacagcttccccatccggtacatcgagacactgatctggggcgaagccatctggctggatgtgcctggaagcgagagaagctacgacctgaccggactgaagcctggcacagagtatgccgtggtcatcaccggcgtgaaaggcggcagattctctagccctctggtggcctctttcaccaccggtaccggcggaggcggatctggcggcggaggtagcggtggcggaggatctgaattcgacatccagatgacacagagccctagcagcctgtctgccagcgtgggagacagagtgaccatcacatgcaagagcagccagagcctgctggactccgatggcaagacctacctgaactggtatcagcagaagcccggcaaggcccctaagctgctgatctacctggtgtccaagctggatagcggcgtgcccagcagattttctggcagcggcagcggaaccgacttcaccctgacaatatccagcctccagcctgaggacttcgccacctactactgcttccaaggcacccactttccatacaccttcggccagggcaccaaggtggaaatcaaaagactcgaggacctgaagaacgtgttcccacctgaggtggccgtgttcgagcctagcgaggccgagatcagccacacccagaaagccaccctcgtgtgcctggctaccggcttctaccccgaccatgtggaactgtcttggtgggtcaacggcaaagaggtgcacagcggcgtgtgtaccgacccccagccactgaaagaacagcccgccctgaacgacagccggtactgcctgagcagcagactgagagtgtccgccaccttctggcagaacccccggaaccacttcagatgccaggtgcagttctacggcctgagcgagaacgacgagtggacccaggacagagccaagcccgtgacccagatcgtgtctgccgaagcctggggcagagccgattgcgacgtgaagctggtggaaaagagcttcgagacagacaccaacctgaacttccagaacctgagcgtgatcggcttcagaatcctgctgctgaaagtggccggctttaacctgctgatgaccctgcggctgtggtccagcagggccaagcgatctggatctggagcaacaaacttctcactactcaaacaagcaggtgacgtggaggagaatcccgggcctactagtatggactggatttggcgcatccttttccttgtcggcgctgctaccggcgcgcattccttcgaagaagtgcagctggttgaatcaggcggaggactggttcagcctggcggatctctgagactgtcttgtgccgccagcggctacaccttcaccaactactggatgaactgggtccgacaggcccctggcaaaggactggaatgggtcggaatgatcgaccccagcgacagcgagacacactacaaccacatcttcaaggaccgcttcaccatcagcgccgacaccagcaagaataccgcctacctccagatgaactccctgagagccgaggacaccgccgtgtactactgcgccagaaacctgtatctgtggggccagggaaccctggtcacagtgtcatctacgcgtatccagaaccctgatcctgccgtgtaccagctgcgggatagcaagagcagcgacaagagcgtgtgtctgttcaccgacttcgacagccagaccaacgtgtcccagagcaaggactccgacgtgtacatcaccgataagtgcgtgctggacatgcggagcatggacttcaagagcaactccgccgtggcctggtccaacaagtccgatttcgcctgcgccaacgccttcaacaacagcattatccccgaggacacattcttcccaagccccgagagcagctgcggctttaccagcgagagctaccagcagggcgtgctgagcgccaccatcctgtacgagatcctgctgggcaaggccaccctgtacgccgtgctggtgtctgccctggtgctgatggctatggtcaagcggaaggacagccgggga

SEQ ID NO: 37222 - DNA, 2196 bp, synthetic construct
  source 1..2196: mol_type = other DNA
atggccttaccagtgaccgccttgctcctgccgctggccttgctgctccacgccgccaggccgatgctgcccgctcctaagaatctggtggtgtccagaatcaccgaggacagcgccagactgtcttggacagctcctgatgccgccttcgacagcttccccatccggtacatcgagacactgatctggggcgaagccatctggctggatgtgcctggaagcgagagaagctacgacctgaccggactgaagcctggcacagagtatgccgtggtcatcaccggcgtgaaaggcggcagattctctagccctctggtggcctctttcaccaccggtaccggcggaggcggatctggcggcggaggtagcggtggcggaggatctgaattcgacatccagatgacacagagccctagcagcctgtctgccagcgtgggagacagagtgaccatcacatgcaagagcagccagagcctgctggactccgatggcaagacctacctgaactggtatcagcagaagcccggcaaggcccctaagctgctgatctacctggtgtccaagctggatagcggcgtgcccagcagattttctggcagcggcagcggaaccgacttcaccctgacaatatccagcctccagcctgaggacttcgccacctactactgcttccaaggcacccactttccatacaccttcggccagggcaccaaggtggaaatcaaaagactcgagatccagaaccctgatcctgccgtgtaccagctgcgggatagcaagagcagcgacaagagcgtgtgtctgttcaccgacttcgacagccagaccaacgtgtcccagagcaaggactccgacgtgtacatcaccgataagtgcgtgctggacatgcggagcatggacttcaagagcaactccgccgtggcctggtccaacaagtccgatttcgcctgcgccaacgccttcaacaacagcattatccccgaggacacattcttcccaagccccgagagcagctgcggctttaccagcgagagctaccagcagggcgtgctgagcgccaccatcctgtacgagatcctgctgggcaaggccaccctgtacgccgtgctggtgtctgccctggtgctgatggctatggtcaagcggaaggacagccggggacgcgccaagagaagcggatctggcgtgaagcagaccctgaatttcgacctgctgaagctggctggcgacgtggaatccaacccaggccctactagtatggactggatttggcgcatccttttccttgtcggcgctgctaccggcgcgcattccttcgaagaagtgcagctggttgaatcaggcggaggactggttcagcctggcggatctctgagactgtcttgtgccgccagcggctacaccttcaccaactactggatgaactgggtccgacaggcccctggcaaaggactggaatgggtcggaatgatcgaccccagcgacagcgagacacactacaaccacatcttcaaggaccgcttcaccatcagcgccgacaccagcaagaataccgcctacctccagatgaactccctgagagccgaggacaccgccgtgtactactgcgccagaaacctgtatctgtggggccagggaaccctggtcacagtgtcatctacgcgtgaggacctgaagaacgtgttcccacctgaggtggccgtgttcgagcctagcgaggccgagatcagccacacccagaaagccaccctcgtgtgcctggctaccggcttctaccccgaccatgtggaactgtcttggtgggtcaacggcaaagaggtgcacagcggcgtgtgtaccgacccccagccactgaaagaacagcccgccctgaacgacagccggtactgcctgagcagcagactgagagtgtccgccaccttctggcagaacccccggaaccacttcagatgccaggtgcagttctacggcctgagcgagaacgacgagtggacccaggacagagccaagcccgtgacccagatcgtgtctgccgaagcctggggcagagccgattgcgacgtgaagctggtggaaaagagcttcgagacagacaccaacctgaacttccagaacctgagcgtgatcggcttcagaatcctgctgctgaaagtggccggctttaacctgctgatgaccctgcggctgtggtccagc

SEQ ID NO: 37223 - DNA, 2271 bp, synthetic construct
  source 1..2271: mol_type = other DNA
atggccttaccagtgaccgccttgctcctgccgctggccttgctgctccacgccgccaggccggaggtgcagctggttgaatctggcggaggactggttcagcctggcggatctctgagactgtcttgtgccgccagcggcttcaacatcaaggatacctgtatcggctgggttcgcagagcccctggcaaagaggaagaactggtcgccaaaatctgcaagtacagcggccacaccagatacgccgacagcgtgaagggcagattcaccatcagcgccgacaccagcaagaacaccgcctacctccagatgaacagcctgagagccgaggacaccgccgtgtactattgtgccgctgtgtccgtcagagatgggcactacaattactggggccagggcaccaccgtgaccgtttcttcaggtaccggcggaggcggatctggcggcggaggtagcggtggcggaggatctgaattcgacatccagatgacacagagccctagcagcctgtctgccagcgtgggagacagagtgaccatcacatgcaagagcagccagagcctgctggactccgatggcaagacctacctgaactggtatcagcagaagcccggcaaggcccctaagctgctgatctacctggtgtccaagctggatagcggcgtgcccagcagattttctggcagcggcagcggaaccgacttcaccctgacaatatccagcctccagcctgaggacttcgccacctactactgcttccaaggcacccactttccatacaccttcggccagggcaccaaggtggaaatcaaaagactcgaggacctgaagaacgtgttcccacctgaggtggccgtgttcgagcctagcgaggccgagatcagccacacccagaaagccaccctcgtgtgcctggctaccggcttctaccccgaccatgtggaactgtcttggtgggtcaacggcaaagaggtgcacagcggcgtgtgtaccgacccccagccactgaaagaacagcccgccctgaacgacagccggtactgcctgagcagcagactgagagtgtccgccaccttctggcagaacccccggaaccacttcagatgccaggtgcagttctacggcctgagcgagaacgacgagtggacccaggacagagccaagcccgtgacccagatcgtgtctgccgaagcctggggcagagccgattgcgacgtgaagctggtggaaaagagcttcgagacagacaccaacctgaacttccagaacctgagcgtgatcggcttcagaatcctgctgctgaaagtggccggctttaacctgctgatgaccctgcggctgtggtccagcagggccaagcgatctggatctggagcaacaaacttctcactactcaaacaagcaggtgacgtggaggagaatcccgggcctactagtatggactggatttggcgcatccttttccttgtcggcgctgctaccggcgcgcattccttcgaagaagtgcagctggttgaatcaggcggaggactggttcagcctggcggatctctgagactgtcttgtgccgccagcggctacaccttcaccaactactggatgaactgggtccgacaggcccctggcaaaggactggaatgggtcggaatgatcgaccccagcgacagcgagacacactacaaccacatcttcaaggaccgcttcaccatcagcgccgacaccagcaagaataccgcctacctccagatgaactccctgagagccgaggacaccgccgtgtactactgcgccagaaacctgtatctgtggggccagggaaccctggtcacagtgtcatctacgcgtatccagaaccctgatcctgccgtgtaccagctgcgggatagcaagagcagcgacaagagcgtgtgtctgttcaccgacttcgacagccagaccaacgtgtcccagagcaaggactccgacgtgtacatcaccgataagtgcgtgctggacatgcggagcatggacttcaagagcaactccgccgtggcctggtccaacaagtccgatttcgcctgcgccaacgccttcaacaacagcattatccccgaggacacattcttcccaagccccgagagcagctgcggctttaccagcgagagctaccagcagggcgtgctgagcgccaccatcctgtacgagatcctgctgggcaaggccaccctgtacgccgtgctggtgtctgccctggtgctgatggctatggtcaagcggaaggacagccgggga

SEQ ID NO: 37224 - DNA, 2283 bp, synthetic construct
  source 1..2283: mol_type = other DNA
atggccttaccagtgaccgccttgctcctgccgctggccttgctgctccacgccgccaggccggaggtgcagctggttgaatctggcggaggactggttcagcctggcggatctctgagactgtcttgtgccgccagcggcttcaacatcaaggatacctgtatcggctgggttcgcagagcccctggcaaagaggaagaactggtcgccaaaatctgcaagtacagcggccacaccagatacgccgacagcgtgaagggcagattcaccatcagcgccgacaccagcaagaacaccgcctacctccagatgaacagcctgagagccgaggacaccgccgtgtactattgtgccgctgtgtccgtcagagatgggcactacaattactggggccagggcaccaccgtgaccgtttcttcaggtaccggcggaggcggatctggcggcggaggtagcggtggcggaggatctgaattcgacatccagatgacacagagccctagcagcctgtctgccagcgtgggagacagagtgaccatcacatgcaagagcagccagagcctgctggactccgatggcaagacctacctgaactggtatcagcagaagcccggcaaggcccctaagctgctgatctacctggtgtccaagctggatagcggcgtgcccagcagattttctggcagcggcagcggaaccgacttcaccctgacaatatccagcctccagcctgaggacttcgccacctactactgcttccaaggcacccactttccatacaccttcggccagggcaccaaggtggaaatcaaaagactcgagatccagaaccctgatcctgccgtgtaccagctgcgggatagcaagagcagcgacaagagcgtgtgtctgttcaccgacttcgacagccagaccaacgtgtcccagagcaaggactccgacgtgtacatcaccgataagtgcgtgctggacatgcggagcatggacttcaagagcaactccgccgtggcctggtccaacaagtccgatttcgcctgcgccaacgccttcaacaacagcattatccccgaggacacattcttcccaagccccgagagcagctgcggctttaccagcgagagctaccagcagggcgtgctgagcgccaccatcctgtacgagatcctgctgggcaaggccaccctgtacgccgtgctggtgtctgccctggtgctgatggctatggtcaagcggaaggacagccggggacgcgccaagagaagcggatctggcgtgaagcagaccctgaatttcgacctgctgaagctggctggcgacgtggaatccaacccaggccctactagtatggactggatttggcgcatccttttccttgtcggcgctgctaccggcgcgcattccttcgaagaagtgcagctggttgaatcaggcggaggactggttcagcctggcggatctctgagactgtcttgtgccgccagcggctacaccttcaccaactactggatgaactgggtccgacaggcccctggcaaaggactggaatgggtcggaatgatcgaccccagcgacagcgagacacactacaaccacatcttcaaggaccgcttcaccatcagcgccgacaccagcaagaataccgcctacctccagatgaactccctgagagccgaggacaccgccgtgtactactgcgccagaaacctgtatctgtggggccagggaaccctggtcacagtgtcatctacgcgtgaggacctgaagaacgtgttcccacctgaggtggccgtgttcgagcctagcgaggccgagatcagccacacccagaaagccaccctcgtgtgcctggctaccggcttctaccccgaccatgtggaactgtcttggtgggtcaacggcaaagaggtgcacagcggcgtgtgtaccgacccccagccactgaaagaacagcccgccctgaacgacagccggtactgcctgagcagcagactgagagtgtccgccaccttctggcagaacccccggaaccacttcagatgccaggtgcagttctacggcctgagcgagaacgacgagtggacccaggacagagccaagcccgtgacccagatcgtgtctgccgaagcctggggcagagccgattgcgacgtgaagctggtggaaaagagcttcgagacagacaccaacctgaacttccagaacctgagcgtgatcggcttcagaatcctgctgctgaaagtggccggctttaacctgctgatgaccctgcggctgtggtccagc

SEQ ID NO: 37225 - DNA, 3387 bp, synthetic construct
  source 1..3387: mol_type = other DNA
atggccttaccagtgaccgccttgctcctgccgctggccttgctgctccacgccgccaggccggaagtgcagctggttgaatctggcggaggactggttcaggctggcggatctctgagactgtcttgtgccgccagcggcagaacctttagcatgggctggtttagacaggcccctggcaaagagagagagttcgtcgccgccatcacatactctggcggcagcccttactacgccgactctgtgaagggcagattcaccatcagccgggacaacgccaagaacaccgtgtacctccagatgaacagcctgaagcctgaggacaccgccgtgtactactgcgccgccaatccaacatacggcagcgactggaacgccgagaattggggccagggaacccaagtgacagtgtctagcggtaccggcggaggcggatctggcggcggaggtagcggtggcggaggatctgaattcgacatccagatgacacagagccctagcagcctgtctgccagcgtgggagacagagtgaccatcacatgcaagagcagccagagcctgctggactccgatggcaagacctacctgaactggtatcagcagaagcccggcaaggcccctaagctgctgatctacctggtgtccaagctggatagcggcgtgcccagcagattttctggcagcggcagcggaaccgacttcaccctgacaatatccagcctccagcctgaggacttcgccacctactactgcttccaaggcacccactttccatacaccttcggccagggcaccaaggtggaaatcaaaagactcgaggacctgaagaacgtgttcccacctgaggtggccgtgttcgagcctagcgaggccgagatcagccacacccagaaagccaccctcgtgtgcctggctaccggcttctaccccgaccatgtggaactgtcttggtgggtcaacggcaaagaggtgcacagcggcgtgtgtaccgacccccagccactgaaagaacagcccgccctgaacgacagccggtactgcctgagcagcagactgagagtgtccgccaccttctggcagaacccccggaaccacttcagatgccaggtgcagttctacggcctgagcgagaacgacgagtggacccaggacagagccaagcccgtgacccagatcgtgtctgccgaagcctggggcagagccgattgcgacgtgaagctggtggaaaagagcttcgagacagacaccaacctgaacttccagaacctgagcgtgatcggcttcagaatcctgctgctgaaagtggccggctttaacctgctgatgaccctgcggctgtggtccagcagggccaagcgatctggatctggagcaacaaacttctcactactcaaacaagcaggtgacgtggaggagaatcccgggcctactagtgccaccatggactggatttggcgcatccttttccttgtcggcgctgctaccggcgcccattccgggcccgaagtgcaactggttgaatccggtggcggcctggtgcaagcaggcggatctctcagacttagctgtgccgcctccggcagaaccttcacaatgggatggtttaggcaggctccagggaaagagagagagttcgtcgccgccatctctctgtctcccacactggcctactacgccgactctgtgaaaggccggttcaccatctccagagataatgccaagaacaccgtggtgctgcaaatgaactctctgaaacccgaggatacagccctgtactattgtgccgctgaccggaagtccgtgatgagcatcagacccgattactggggacagggcacacaagtcacagtgtcctctggatccggcggcggaggatctggcggaggcggatctgggggcggaggctctttcgaagaagtgcagctggttgaatcaggcggaggactggttcagcctggcggatctctgagactgtcttgtgccgccagcggctacaccttcaccaactactggatgaactgggtccgacaggcccctggcaaaggactggaatgggtcggaatgatcgaccccagcgacagcgagacacactacaaccacatcttcaaggaccgcttcaccatcagcgccgacaccagcaagaataccgcctacctccagatgaactccctgagagccgaggacaccgccgtgtactactgcgccagaaacctgtatctgtggggccagggaaccctggtcacagtgtcatctacgcgtatccagaaccctgatcctgccgtgtaccagctgcgggatagcaagagcagcgacaagagcgtgtgtctgttcaccgacttcgacagccagaccaacgtgtcccagagcaaggactccgacgtgtacatcaccgataagtgcgtgctggacatgcggagcatggacttcaagagcaactccgccgtggcctggtccaacaagtccgatttcgcctgcgccaacgccttcaacaacagcattatccccgaggacacattcttcccaagccccgagagcagctgcggctttaccagcgagagctaccagcagggcgtgctgagcgccaccatcctgtacgagatcctgctgggcaaggccaccctgtacgccgtgctggtgtctgccctggtgctgatggctatggtcaagcggaaggacagccggggacgcgccaagagaagcggatctggcgtgaagcagaccctgaatttcgacctgctgaagctggctggcgacgtggaatccaacccaggcccttctagaggccatatgaccgagtacaagcccacggtgcgcctcgccacccgcgacgacgtccccagggccgtacgcaccctcgccgccgcgttcgccgactaccccgccacgcgccacaccgtcgatccggaccgccacatcgagcgggtcaccgagctgcaagaactcttcctcacgcgcgtcgggctcgacatcggcaaggtgtgggtcgcggacgacggcgccgcggtggcggtctggaccacgccggagagcgtcgaagcgggggcggtgttcgccgagatcggcccgcgcatggccgagttgagcggttcccggctggccgcgcagcaacagatggaaggcctcctggcgccgcaccggcccaaggagcccgcgtggttcctggccaccgtcggcgtctcgcccgaccaccagggcaagggtctgggcagcgccgtcgtgctccccggagtggaggcggccgagcgcgccggggtgcccgccttcctggagacctccgcgccccgcaacctccccttctacgagcggctcggcttcaccgtcaccgccgacgtcgaggtgcccgaaggaccgcgcacctggtgcatgacccgcaagcccggtgcctga

SEQ ID NO: 37226 - DNA, 2301 bp, synthetic construct
  source 1..2301: mol_type = other DNA
atggccttaccagtgaccgccttgctcctgccgctggccttgctgctccacgccgccaggccggaagtgcagctggttgaatctggcggaggactggttcagcctggcggatctctgagactgtcttgtgccgcctctggcttcgccagcgactactatatcatcggctggttcagacaggcccctggcaaagagagagagggcgtcagctgtatcagcagcagatacgccaacaccaactacgccgacagcgtgaagggcagattcaccatcagccgggacaacgccaagaacaccgtgtacctccagatgaacagcctgaagcctgaggacaccgccgtgtactactgtgccgccgacaccagaagatacacctgtcctgacattgccaccatgcaccggaacttcgattcttggggccagggcacactggtcaccgtttcttctggtaccggcggaggcggatctggcggcggaggtagcggtggcggaggatctgaattcgacatccagatgacacagagccctagcagcctgtctgccagcgtgggagacagagtgaccatcacatgcaagagcagccagagcctgctggactccgatggcaagacctacctgaactggtatcagcagaagcccggcaaggcccctaagctgctgatctacctggtgtccaagctggatagcggcgtgcccagcagattttctggcagcggcagcggaaccgacttcaccctgacaatatccagcctccagcctgaggacttcgccacctactactgcttccaaggcacccactttccatacaccttcggccagggcaccaaggtggaaatcaaaagactcgaggacctgaagaacgtgttcccacctgaggtggccgtgttcgagcctagcgaggccgagatcagccacacccagaaagccaccctcgtgtgcctggctaccggcttctaccccgaccatgtggaactgtcttggtgggtcaacggcaaagaggtgcacagcggcgtgtgtaccgacccccagccactgaaagaacagcccgccctgaacgacagccggtactgcctgagcagcagactgagagtgtccgccaccttctggcagaacccccggaaccacttcagatgccaggtgcagttctacggcctgagcgagaacgacgagtggacccaggacagagccaagcccgtgacccagatcgtgtctgccgaagcctggggcagagccgattgcgacgtgaagctggtggaaaagagcttcgagacagacaccaacctgaacttccagaacctgagcgtgatcggcttcagaatcctgctgctgaaagtggccggctttaacctgctgatgaccctgcggctgtggtccagcagggccaagcgatctggatctggagcaacaaacttctcactactcaaacaagcaggtgacgtggaggagaatcccgggcctactagtatggactggatttggcgcatccttttccttgtcggcgctgctaccggcgcgcattccttcgaagaagtgcagctggttgaatcaggcggaggactggttcagcctggcggatctctgagactgtcttgtgccgccagcggctacaccttcaccaactactggatgaactgggtccgacaggcccctggcaaaggactggaatgggtcggaatgatcgaccccagcgacagcgagacacactacaaccacatcttcaaggaccgcttcaccatcagcgccgacaccagcaagaataccgcctacctccagatgaactccctgagagccgaggacaccgccgtgtactactgcgccagaaacctgtatctgtggggccagggaaccctggtcacagtgtcatctacgcgtatccagaaccctgatcctgccgtgtaccagctgcgggatagcaagagcagcgacaagagcgtgtgtctgttcaccgacttcgacagccagaccaacgtgtcccagagcaaggactccgacgtgtacatcaccgataagtgcgtgctggacatgcggagcatggacttcaagagcaactccgccgtggcctggtccaacaagtccgatttcgcctgcgccaacgccttcaacaacagcattatccccgaggacacattcttcccaagccccgagagcagctgcggctttaccagcgagagctaccagcagggcgtgctgagcgccaccatcctgtacgagatcctgctgggcaaggccaccctgtacgccgtgctggtgtctgccctggtgctgatggctatggtcaagcggaaggacagccggggataa

SEQ ID NO: 37227 - DNA, 2301 bp, synthetic construct
  source 1..2301: mol_type = other DNA
atggccttaccagtgaccgccttgctcctgccgctggccttgctgctccacgccgccaggccggaagtgcagctggttgaatctggcggaggactggttcagcctggcggatctctgagactgagctgtgaagccagcggcttcgccagcgacgattacatcatcggctggttcagacaggcccctggcaaagagagagagggcgtcagctgcatcagctctaagtacgccaacaccgtgtacaccgacagcgtgaagggcagattcagactgagcagaggcaccgccaagaataccgtgtacctccagatgagcgccctgaagcctgaggataccgccgtgtactactgcgctatggacagccgcagagtgacatgccctgagatcagcaccatgcaccggaacttcgattcttggggccagggcacactggtcacagtgtcatctggtaccggcggaggcggatctggcggcggaggtagcggtggcggaggatctgaattcgacatccagatgacacagagccctagcagcctgtctgccagcgtgggagacagagtgaccatcacatgcaagagcagccagagcctgctggactccgatggcaagacctacctgaactggtatcagcagaagcccggcaaggcccctaagctgctgatctacctggtgtccaagctggatagcggcgtgcccagcagattttctggcagcggcagcggaaccgacttcaccctgacaatatccagcctccagcctgaggacttcgccacctactactgcttccaaggcacccactttccatacaccttcggccagggcaccaaggtggaaatcaaaagactcgaggacctgaagaacgtgttcccacctgaggtggccgtgttcgagcctagcgaggccgagatcagccacacccagaaagccaccctcgtgtgcctggctaccggcttctaccccgaccatgtggaactgtcttggtgggtcaacggcaaagaggtgcacagcggcgtgtgtaccgacccccagccactgaaagaacagcccgccctgaacgacagccggtactgcctgagcagcagactgagagtgtccgccaccttctggcagaacccccggaaccacttcagatgccaggtgcagttctacggcctgagcgagaacgacgagtggacccaggacagagccaagcccgtgacccagatcgtgtctgccgaagcctggggcagagccgattgcgacgtgaagctggtggaaaagagcttcgagacagacaccaacctgaacttccagaacctgagcgtgatcggcttcagaatcctgctgctgaaagtggccggctttaacctgctgatgaccctgcggctgtggtccagcagggccaagcgatctggatctggagcaacaaacttctcactactcaaacaagcaggtgacgtggaggagaatcccgggcctactagtatggactggatttggcgcatccttttccttgtcggcgctgctaccggcgcgcattccttcgaagaagtgcagctggttgaatcaggcggaggactggttcagcctggcggatctctgagactgtcttgtgccgccagcggctacaccttcaccaactactggatgaactgggtccgacaggcccctggcaaaggactggaatgggtcggaatgatcgaccccagcgacagcgagacacactacaaccacatcttcaaggaccgcttcaccatcagcgccgacaccagcaagaataccgcctacctccagatgaactccctgagagccgaggacaccgccgtgtactactgcgccagaaacctgtatctgtggggccagggaaccctggtcacagtgtcatctacgcgtatccagaaccctgatcctgccgtgtaccagctgcgggatagcaagagcagcgacaagagcgtgtgtctgttcaccgacttcgacagccagaccaacgtgtcccagagcaaggactccgacgtgtacatcaccgataagtgcgtgctggacatgcggagcatggacttcaagagcaactccgccgtggcctggtccaacaagtccgatttcgcctgcgccaacgccttcaacaacagcattatccccgaggacacattcttcccaagccccgagagcagctgcggctttaccagcgagagctaccagcagggcgtgctgagcgccaccatcctgtacgagatcctgctgggcaaggccaccctgtacgccgtgctggtgtctgccctggtgctgatggctatggtcaagcggaaggacagccggggataa

SEQ ID NO: 37228 - DNA, 2298 bp, synthetic construct
  source 1..2298: mol_type = other DNA
atggccttaccagtgaccgccttgctcctgccgctggccttgctgctccacgccgccaggccggaagtgcagctggttgaatctggcggaggactggttcagcctggcggatctctgagactgtcttgtgccgcctctggcttcgccagcgactactatatcatcggctggttcagacaggcccctggcaaagagagagagggcgtcagctgtatcagcagcagatacgccaacaccaactacgccgacagcgtgaagggcagattcaccatcagccgggacaacgccaagaacaccgtgtacctccagatgaacagcctgaagcctgaggacaccgccgtgtactactgtgccgccgacaccagaagatacacctgtcctgacattgccaccatgcaccggaacttcgattcttggggccagggcacactggtcaccgtttcttctggtaccggcggaggcggatctggcggcggaggtagcggtggcggaggatctgaattcgacatccagatgacacagagccctagcagcctgtctgccagcgtgggagacagagtgaccatcacatgcaagagcagccagagcctgctggactccgatggcaagacctacctgaactggtatcagcagaagcccggcaaggcccctaagctgctgatctacctggtgtccaagctggatagcggcgtgcccagcagattttctggcagcggcagcggaaccgacttcaccctgacaatatccagcctccagcctgaggacttcgccacctactactgcttccaaggcacccactttccatacaccttcggccagggcaccaaggtggaaatcaaaagactcgagatccagaaccctgatcctgccgtgtaccagctgcgggatagcaagagcagcgacaagagcgtgtgtctgttcaccgacttcgacagccagaccaacgtgtcccagagcaaggactccgacgtgtacatcaccgataagtgcgtgctggacatgcggagcatggacttcaagagcaactccgccgtggcctggtccaacaagtccgatttcgcctgcgccaacgccttcaacaacagcattatccccgaggacacattcttcccaagccccgagagcagctgcggctttaccagcgagagctaccagcagggcgtgctgagcgccaccatcctgtacgagatcctgctgggcaaggccaccctgtacgccgtgctggtgtctgccctggtgctgatggctatggtcaagcggaaggacagccggggaagggccaagcgatctggatctggagcaacaaacttctcactactcaaacaagcaggtgacgtggaggagaatcccgggcctactagtatggactggatttggcgcatccttttccttgtcggcgctgctaccggcgcgcattccttcgaagaagtgcagctggttgaatcaggcggaggactggttcagcctggcggatctctgagactgtcttgtgccgccagcggctacaccttcaccaactactggatgaactgggtccgacaggcccctggcaaaggactggaatgggtcggaatgatcgaccccagcgacagcgagacacactacaaccacatcttcaaggaccgcttcaccatcagcgccgacaccagcaagaataccgcctacctccagatgaactccctgagagccgaggacaccgccgtgtactactgcgccagaaacctgtatctgtggggccagggaaccctggtcacagtgtcatctacgcgtgacctgaagaacgtgttcccacctgaggtggccgtgttcgagcctagcgaggccgagatcagccacacccagaaagccaccctcgtgtgcctggctaccggcttctaccccgaccatgtggaactgtcttggtgggtcaacggcaaagaggtgcacagcggcgtgtgtaccgacccccagccactgaaagaacagcccgccctgaacgacagccggtactgcctgagcagcagactgagagtgtccgccaccttctggcagaacccccggaaccacttcagatgccaggtgcagttctacggcctgagcgagaacgacgagtggacccaggacagagccaagcccgtgacccagatcgtgtctgccgaagcctggggcagagccgattgcgacgtgaagctggtggaaaagagcttcgagacagacaccaacctgaacttccagaacctgagcgtgatcggcttcagaatcctgctgctgaaagtggccggctttaacctgctgatgaccctgcggctgtggtccagc

SEQ ID NO: 37229 - DNA, 2298 bp, synthetic construct
  source 1..2298: mol_type = other DNA
atggccttaccagtgaccgccttgctcctgccgctggccttgctgctccacgccgccaggccggaagtgcagctggttgaatctggcggaggactggttcagcctggcggatctctgagactgagctgtgaagccagcggcttcgccagcgacgattacatcatcggctggttcagacaggcccctggcaaagagagagagggcgtcagctgcatcagctctaagtacgccaacaccgtgtacaccgacagcgtgaagggcagattcagactgagcagaggcaccgccaagaataccgtgtacctccagatgagcgccctgaagcctgaggataccgccgtgtactactgcgctatggacagccgcagagtgacatgccctgagatcagcaccatgcaccggaacttcgattcttggggccagggcacactggtcacagtgtcatctggtaccggcggaggcggatctggcggcggaggtagcggtggcggaggatctgaattcgacatccagatgacacagagccctagcagcctgtctgccagcgtgggagacagagtgaccatcacatgcaagagcagccagagcctgctggactccgatggcaagacctacctgaactggtatcagcagaagcccggcaaggcccctaagctgctgatctacctggtgtccaagctggatagcggcgtgcccagcagattttctggcagcggcagcggaaccgacttcaccctgacaatatccagcctccagcctgaggacttcgccacctactactgcttccaaggcacccactttccatacaccttcggccagggcaccaaggtggaaatcaaaagactcgagatccagaaccctgatcctgccgtgtaccagctgcgggatagcaagagcagcgacaagagcgtgtgtctgttcaccgacttcgacagccagaccaacgtgtcccagagcaaggactccgacgtgtacatcaccgataagtgcgtgctggacatgcggagcatggacttcaagagcaactccgccgtggcctggtccaacaagtccgatttcgcctgcgccaacgccttcaacaacagcattatccccgaggacacattcttcccaagccccgagagcagctgcggctttaccagcgagagctaccagcagggcgtgctgagcgccaccatcctgtacgagatcctgctgggcaaggccaccctgtacgccgtgctggtgtctgccctggtgctgatggctatggtcaagcggaaggacagccggggaagggccaagcgatctggatctggagcaacaaacttctcactactcaaacaagcaggtgacgtggaggagaatcccgggcctactagtatggactggatttggcgcatccttttccttgtcggcgctgctaccggcgcgcattccttcgaagaagtgcagctggttgaatcaggcggaggactggttcagcctggcggatctctgagactgtcttgtgccgccagcggctacaccttcaccaactactggatgaactgggtccgacaggcccctggcaaaggactggaatgggtcggaatgatcgaccccagcgacagcgagacacactacaaccacatcttcaaggaccgcttcaccatcagcgccgacaccagcaagaataccgcctacctccagatgaactccctgagagccgaggacaccgccgtgtactactgcgccagaaacctgtatctgtggggccagggaaccctggtcacagtgtcatctacgcgtgacctgaagaacgtgttcccacctgaggtggccgtgttcgagcctagcgaggccgagatcagccacacccagaaagccaccctcgtgtgcctggctaccggcttctaccccgaccatgtggaactgtcttggtgggtcaacggcaaagaggtgcacagcggcgtgtgtaccgacccccagccactgaaagaacagcccgccctgaacgacagccggtactgcctgagcagcagactgagagtgtccgccaccttctggcagaacccccggaaccacttcagatgccaggtgcagttctacggcctgagcgagaacgacgagtggacccaggacagagccaagcccgtgacccagatcgtgtctgccgaagcctggggcagagccgattgcgacgtgaagctggtggaaaagagcttcgagacagacaccaacctgaacttccagaacctgagcgtgatcggcttcagaatcctgctgctgaaagtggccggctttaacctgctgatgaccctgcggctgtggtccagc

SEQ ID NO: 37230 - DNA, 2271 bp, synthetic construct
  source 1..2271: mol_type = other DNA
atggccttaccagtgaccgccttgctcctgccgctggccttgctgctccacgccgccaggccgcaagtcaaactggaagaaagcggtggcggcctggtgcaacctggcgaatctctgagactgagctgtagcgccagcggctccatcttcaaggtgttcagagtgttcgccatgagctggtacaggcaaggccctggcaagcagagagagctggtcgcctctatcagcagcggcgagacaaccacatacgccgaatctgtgaaaggccggttcaccatcagccgggataatgccaagaataccgcctatctccagatggactccctgaagcctgaagatacagctgtgtactactgcaacgccgaccataccttcaccggcgatttttggggccagggaacccaagtgaccgtgtctagtggtaccggcggaggcggatctggcggcggaggtagcggtggcggaggatctgaattcgacatccagatgacacagagccctagcagcctgtctgccagcgtgggagacagagtgaccatcacatgcaagagcagccagagcctgctggactccgatggcaagacctacctgaactggtatcagcagaagcccggcaaggcccctaagctgctgatctacctggtgtccaagctggatagcggcgtgcccagcagattttctggcagcggcagcggaaccgacttcaccctgacaatatccagcctccagcctgaggacttcgccacctactactgcttccaaggcacccactttccatacaccttcggccagggcaccaaggtggaaatcaaaagactcgagatccagaaccctgatcctgccgtgtaccagctgcgggatagcaagagcagcgacaagagcgtgtgtctgttcaccgacttcgacagccagaccaacgtgtcccagagcaaggactccgacgtgtacatcaccgataagtgcgtgctggacatgcggagcatggacttcaagagcaactccgccgtggcctggtccaacaagtccgatttcgcctgcgccaacgccttcaacaacagcattatccccgaggacacattcttcccaagccccgagagcagctgcggctttaccagcgagagctaccagcagggcgtgctgagcgccaccatcctgtacgagatcctgctgggcaaggccaccctgtacgccgtgctggtgtctgccctggtgctgatggctatggtcaagcggaaggacagccggggaagggccaagcgatctggatctggagcaacaaacttctcactactcaaacaagcaggtgacgtggaggagaatcccgggcctactagtatggactggatttggcgcatccttttccttgtcggcgctgctaccggcgcgcattccttcgaagaagtgcagctggttgaatcaggcggaggactggttcagcctggcggatctctgagactgtcttgtgccgccagcggctacaccttcaccaactactggatgaactgggtccgacaggcccctggcaaaggactggaatgggtcggaatgatcgaccccagcgacagcgagacacactacaaccacatcttcaaggaccgcttcaccatcagcgccgacaccagcaagaataccgcctacctccagatgaactccctgagagccgaggacaccgccgtgtactactgcgccagaaacctgtatctgtggggccagggaaccctggtcacagtgtcatctacgcgtgacctgaagaacgtgttcccacctgaggtggccgtgttcgagcctagcgaggccgagatcagccacacccagaaagccaccctcgtgtgcctggctaccggcttctaccccgaccatgtggaactgtcttggtgggtcaacggcaaagaggtgcacagcggcgtgtgtaccgacccccagccactgaaagaacagcccgccctgaacgacagccggtactgcctgagcagcagactgagagtgtccgccaccttctggcagaacccccggaaccacttcagatgccaggtgcagttctacggcctgagcgagaacgacgagtggacccaggacagagccaagcccgtgacccagatcgtgtctgccgaagcctggggcagagccgattgcgacgtgaagctggtggaaaagagcttcgagacagacaccaacctgaacttccagaacctgagcgtgatcggcttcagaatcctgctgctgaaagtggccggctttaacctgctgatgaccctgcggctgtggtccagc

SEQ ID NO: 37231 - DNA, 2277 bp, synthetic construct
  source 1..2277: mol_type = other DNA
atggccttaccagtgaccgccttgctcctgccgctggccttgctgctccacgccgccaggccggacatccagatgacacagagccctagcagcctgtctgccagcgtgggagacagagtgaccatcacatgcaagagcagccagagcctgctggactccgatggcaagacctacctgaactggtatcagcagaagcccggcaaggcccctaagctgctgatctacctggtgtccaagctggatagcggcgtgcccagcagattttctggcagcggcagcggaaccgacttcaccctgacaatatccagcctccagcctgaggacttcgccacctactactgcttccaaggcacccactttccatacaccttcggccagggcaccaaggtggaaatcaaaagactcgaggacctgaagaacgtgttcccacctgaggtggccgtgttcgagcctagcgaggccgagatcagccacacccagaaagccaccctcgtgtgcctggctaccggcttctaccccgaccatgtggaactgtcttggtgggtcaacggcaaagaggtgcacagcggcgtgtgtaccgacccccagccactgaaagaacagcccgccctgaacgacagccggtactgcctgagcagcagactgagagtgtccgccaccttctggcagaacccccggaaccacttcagatgccaggtgcagttctacggcctgagcgagaacgacgagtggacccaggacagagccaagcccgtgacccagatcgtgtctgccgaagcctggggcagagccgattgcgacgtgaagctggtggaaaagagcttcgagacagacaccaacctgaacttccagaacctgagcgtgatcggcttcagaatcctgctgctgaaagtggccggctttaacctgctgatgaccctgcggctgtggtccagcagggccaagcgatctggatctggagcaacaaacttctcactactcaaacaagcaggtgacgtggaggagaatcccgggcctactagtgccaccatggactggatttggcgcatccttttccttgtcggcgctgctaccggcgcccattccgggcccgaagtgcagctggttgaatctggcggaggactggttcaggctggcggatctctgagactgtcttgtgccgccagcggcagaacctttagcatgggctggtttagacaggcccctggcaaagagagagagttcgtcgccgccatcacatactctggcggcagcccttactacgccgactctgtgaagggcagattcaccatcagccgggacaacgccaagaacaccgtgtacctccagatgaacagcctgaagcctgaggacaccgccgtgtactactgcgccgccaatccaacatacggcagcgactggaacgccgagaattggggccagggaacccaagtgacagtgtctagcggatccggcggcggaggatctggcggaggcggatctgggggcggaggctctttcgaagaagtgcagctggttgaatcaggcggaggactggttcagcctggcggatctctgagactgtcttgtgccgccagcggctacaccttcaccaactactggatgaactgggtccgacaggcccctggcaaaggactggaatgggtcggaatgatcgaccccagcgacagcgagacacactacaaccacatcttcaaggaccgcttcaccatcagcgccgacaccagcaagaataccgcctacctccagatgaactccctgagagccgaggacaccgccgtgtactactgcgccagaaacctgtatctgtggggccagggaaccctggtcacagtgtcatctacgcgtatccagaaccctgatcctgccgtgtaccagctgcgggatagcaagagcagcgacaagagcgtgtgtctgttcaccgacttcgacagccagaccaacgtgtcccagagcaaggactccgacgtgtacatcaccgataagtgcgtgctggacatgcggagcatggacttcaagagcaactccgccgtggcctggtccaacaagtccgatttcgcctgcgccaacgccttcaacaacagcattatccccgaggacacattcttcccaagccccgagagcagctgcggctttaccagcgagagctaccagcagggcgtgctgagcgccaccatcctgtacgagatcctgctgggcaaggccaccctgtacgccgtgctggtgtctgccctggtgctgatggctatggtcaagcggaaggacagccggggataa

SEQ ID NO: 37232 - DNA, 2280 bp, synthetic construct
  source 1..2280: mol_type = other DNA
atggccttaccagtgaccgccttgctcctgccgctggccttgctgctccacgccgccaggccggacatccagatgacacagagccctagcagcctgtctgccagcgtgggagacagagtgaccatcacatgcaagagcagccagagcctgctggactccgatggcaagacctacctgaactggtatcagcagaagcccggcaaggcccctaagctgctgatctacctggtgtccaagctggatagcggcgtgcccagcagattttctggcagcggcagcggaaccgacttcaccctgacaatatccagcctccagcctgaggacttcgccacctactactgcttccaaggcacccactttccatacaccttcggccagggcaccaaggtggaaatcaaaagactcgaggacctgaagaacgtgttcccacctgaggtggccgtgttcgagcctagcgaggccgagatcagccacacccagaaagccaccctcgtgtgcctggctaccggcttctaccccgaccatgtggaactgtcttggtgggtcaacggcaaagaggtgcacagcggcgtgtgtaccgacccccagccactgaaagaacagcccgccctgaacgacagccggtactgcctgagcagcagactgagagtgtccgccaccttctggcagaacccccggaaccacttcagatgccaggtgcagttctacggcctgagcgagaacgacgagtggacccaggacagagccaagcccgtgacccagatcgtgtctgccgaagcctggggcagagccgattgcgacgtgaagctggtggaaaagagcttcgagacagacaccaacctgaacttccagaacctgagcgtgatcggcttcagaatcctgctgctgaaagtggccggctttaacctgctgatgaccctgcggctgtggtccagcagggccaagcgatctggatctggagcaacaaacttctcactactcaaacaagcaggtgacgtggaggagaatcccgggcctactagtgccaccatggactggatttggcgcatccttttccttgtcggcgctgctaccggcgcccattccgggcccgaagtgcaactggtggaatctgggggcggactggtgcagccaggcggaagtctgaggctgtcttgtgccgcctccggcagcatcttcggcttcaacgacatggcctggtatcggcaggctcccggaaaacagcgcgagctggtggctctgattagcagagtgggcgtgaccagcagcgccgactctgtgaagggcagattcacaatctccagagtgaacgccaaggatacagtgtacctccagatgaactctctgaaacctgaggatacagcagtgtactattgctacatggaccagcggctggacggcagcacactggcctactggggacagggaactcaagtgacagtgtctagcggatccggcggcggaggatctggcggaggcggatctgggggcggaggctctttcgaagaagtgcagctggttgaatcaggcggaggactggttcagcctggcggatctctgagactgtcttgtgccgccagcggctacaccttcaccaactactggatgaactgggtccgacaggcccctggcaaaggactggaatgggtcggaatgatcgaccccagcgacagcgagacacactacaaccacatcttcaaggaccgcttcaccatcagcgccgacaccagcaagaataccgcctacctccagatgaactccctgagagccgaggacaccgccgtgtactactgcgccagaaacctgtatctgtggggccagggaaccctggtcacagtgtcatctacgcgtatccagaaccctgatcctgccgtgtaccagctgcgggatagcaagagcagcgacaagagcgtgtgtctgttcaccgacttcgacagccagaccaacgtgtcccagagcaaggactccgacgtgtacatcaccgataagtgcgtgctggacatgcggagcatggacttcaagagcaactccgccgtggcctggtccaacaagtccgatttcgcctgcgccaacgccttcaacaacagcattatccccgaggacacattcttcccaagccccgagagcagctgcggctttaccagcgagagctaccagcagggcgtgctgagcgccaccatcctgtacgagatcctgctgggcaaggccaccctgtacgccgtgctggtgtctgccctggtgctgatggctatggtcaagcggaaggacagccggggataa

SEQ ID NO: 37233 - DNA, 2268 bp, synthetic construct
  source 1..2268: mol_type = other DNA
atggccttaccagtgaccgccttgctcctgccgctggccttgctgctccacgccgccaggccggacatccagatgacacagagccctagcagcctgtctgccagcgtgggagacagagtgaccatcacatgcaagagcagccagagcctgctggactccgatggcaagacctacctgaactggtatcagcagaagcccggcaaggcccctaagctgctgatctacctggtgtccaagctggatagcggcgtgcccagcagattttctggcagcggcagcggaaccgacttcaccctgacaatatccagcctccagcctgaggacttcgccacctactactgcttccaaggcacccactttccatacaccttcggccagggcaccaaggtggaaatcaaaagactcgaggacctgaagaacgtgttcccacctgaggtggccgtgttcgagcctagcgaggccgagatcagccacacccagaaagccaccctcgtgtgcctggctaccggcttctaccccgaccatgtggaactgtcttggtgggtcaacggcaaagaggtgcacagcggcgtgtgtaccgacccccagccactgaaagaacagcccgccctgaacgacagccggtactgcctgagcagcagactgagagtgtccgccaccttctggcagaacccccggaaccacttcagatgccaggtgcagttctacggcctgagcgagaacgacgagtggacccaggacagagccaagcccgtgacccagatcgtgtctgccgaagcctggggcagagccgattgcgacgtgaagctggtggaaaagagcttcgagacagacaccaacctgaacttccagaacctgagcgtgatcggcttcagaatcctgctgctgaaagtggccggctttaacctgctgatgaccctgcggctgtggtccagcagggccaagcgatctggatctggagcaacaaacttctcactactcaaacaagcaggtgacgtggaggagaatcccgggcctactagtgccaccatggactggatttggcgcatccttttccttgtcggcgctgctaccggcgcccattccgggcccgaggtgcagctggttgaatctggcggaggactggttcaggctggcggatctctgagactgtcttgtgccgccagcggctctgtgttcagcggcaatgtgatgggctggtacagacaggcccctggcaaagaaagagagtgggttgccgccattgccagcggcggcagcatctactacagagactctgtgaagggcagattcaccatcagccgggacaacgccaagaacaccgtgtacctccagatgaacagcctgaagcctgaggacaccgccgtgtactactgcaactctcaccctcctacactgccctattggggcctgggaacccaagtgacagtgtcctctggatccggcggcggaggatctggcggaggcggatctgggggcggaggctctttcgaagaagtgcagctggttgaatcaggcggaggactggttcagcctggcggatctctgagactgtcttgtgccgccagcggctacaccttcaccaactactggatgaactgggtccgacaggcccctggcaaaggactggaatgggtcggaatgatcgaccccagcgacagcgagacacactacaaccacatcttcaaggaccgcttcaccatcagcgccgacaccagcaagaataccgcctacctccagatgaactccctgagagccgaggacaccgccgtgtactactgcgccagaaacctgtatctgtggggccagggaaccctggtcacagtgtcatctacgcgtatccagaaccctgatcctgccgtgtaccagctgcgggatagcaagagcagcgacaagagcgtgtgtctgttcaccgacttcgacagccagaccaacgtgtcccagagcaaggactccgacgtgtacatcaccgataagtgcgtgctggacatgcggagcatggacttcaagagcaactccgccgtggcctggtccaacaagtccgatttcgcctgcgccaacgccttcaacaacagcattatccccgaggacacattcttcccaagccccgagagcagctgcggctttaccagcgagagctaccagcagggcgtgctgagcgccaccatcctgtacgagatcctgctgggcaaggccaccctgtacgccgtgctggtgtctgccctggtgctgatggctatggtcaagcggaaggacagccggggataa

SEQ ID NO: 37234 - DNA, 2262 bp, synthetic construct
  source 1..2262: mol_type = other DNA
atggccttaccagtgaccgccttgctcctgccgctggccttgctgctccacgccgccaggccggacatccagatgacacagagccctagcagcctgtctgccagcgtgggagacagagtgaccatcacatgcaagagcagccagagcctgctggactccgatggcaagacctacctgaactggtatcagcagaagcccggcaaggcccctaagctgctgatctacctggtgtccaagctggatagcggcgtgcccagcagattttctggcagcggcagcggaaccgacttcaccctgacaatatccagcctccagcctgaggacttcgccacctactactgcttccaaggcacccactttccatacaccttcggccagggcaccaaggtggaaatcaaaagactcgaggacctgaagaacgtgttcccacctgaggtggccgtgttcgagcctagcgaggccgagatcagccacacccagaaagccaccctcgtgtgcctggctaccggcttctaccccgaccatgtggaactgtcttggtgggtcaacggcaaagaggtgcacagcggcgtgtgtaccgacccccagccactgaaagaacagcccgccctgaacgacagccggtactgcctgagcagcagactgagagtgtccgccaccttctggcagaacccccggaaccacttcagatgccaggtgcagttctacggcctgagcgagaacgacgagtggacccaggacagagccaagcccgtgacccagatcgtgtctgccgaagcctggggcagagccgattgcgacgtgaagctggtggaaaagagcttcgagacagacaccaacctgaacttccagaacctgagcgtgatcggcttcagaatcctgctgctgaaagtggccggctttaacctgctgatgaccctgcggctgtggtccagcagggccaagcgatctggatctggagcaacaaacttctcactactcaaacaagcaggtgacgtggaggagaatcccgggcctactagtgccaccatggactggatttggcgcatccttttccttgtcggcgctgctaccggcgcccattccgggcccgaagttcagctgctggaatctggcggaggactcgttcaacctggcggctctctgagactgagctgtgccgcttctggcttcagcttctctagctacgccctgagctgggttcgacaagctcccggaaagggccttgaatgggtgtccagcatcggcgagaatgacggcaccacagactatgccgatgccgtgaaaggccggtttaccatcagcagagacaattccaagaacacgctctatctgcaaatgaactccctgcgcgtggaagatacagccgtgtattattgcgtgaaggacggcatccactggggacagggaaccctggttacagtgtctagcggatccggcggcggaggatctggcggaggcggatctgggggcggaggctctttcgaagaagtgcagctggttgaatcaggcggaggactggttcagcctggcggatctctgagactgtcttgtgccgccagcggctacaccttcaccaactactggatgaactgggtccgacaggcccctggcaaaggactggaatgggtcggaatgatcgaccccagcgacagcgagacacactacaaccacatcttcaaggaccgcttcaccatcagcgccgacaccagcaagaataccgcctacctccagatgaactccctgagagccgaggacaccgccgtgtactactgcgccagaaacctgtatctgtggggccagggaaccctggtcacagtgtcatctacgcgtatccagaaccctgatcctgccgtgtaccagctgcgggatagcaagagcagcgacaagagcgtgtgtctgttcaccgacttcgacagccagaccaacgtgtcccagagcaaggactccgacgtgtacatcaccgataagtgcgtgctggacatgcggagcatggacttcaagagcaactccgccgtggcctggtccaacaagtccgatttcgcctgcgccaacgccttcaacaacagcattatccccgaggacacattcttcccaagccccgagagcagctgcggctttaccagcgagagctaccagcagggcgtgctgagcgccaccatcctgtacgagatcctgctgggcaaggccaccctgtacgccgtgctggtgtctgccctggtgctgatggctatggtcaagcggaaggacagccggggataa

SEQ ID NO: 37235 - DNA, 3369 bp, synthetic construct
  source 1..3369: mol_type = other DNA
atgggacccagactgctgttttgggctctgctgtgtctgctcggcacaggacctgttgaagctggcgtgacacagagccccacacacctgattaagaccagaggccagcaggccacactgagatgcagccctatcagcggccacaccagcgtgtactggtatcagcaggctctcggactgggcctccagttcctgctttggtacgacgagggcgaagagagaaaccggggcaacttccctcctcggttttccggcagacagttccccaactacagcagcgagctgaacgtgaacgccctggaactggaagatagcgccctgtacctgtgtgcctcttctcttggtggacctcgcggactggctggactgagaggggatgagcagtttttcggccctggcaccagactgaccgtgctggaaggtaccggcggaggcggatctggcggcggagaattcgacatccagatgacacagagccctagcagcctgtctgccagcgtgggagacagagtgaccatcacatgcaagagcagccagagcctgctggactccgatggcaagacctacctgaactggtatcagcagaagcccggcaaggcccctaagctgctgatctacctggtgtccaagctggatagcggcgtgcccagcagattttctggcagcggcagcggaaccgacttcaccctgacaatatccagcctccagcctgaggacttcgccacctactactgcttccaaggcacccactttccatacaccttcggccagggcaccaaggtggaaatcaaaagactcgaggacctgaagaacgtgttcccacctgaggtggccgtgttcgagcctagcgaggccgagatcagccacacccagaaagccaccctcgtgtgcctggctaccggcttctaccccgaccatgtggaactgtcttggtgggtcaacggcaaagaggtgcacagcggcgtgtgtaccgacccccagccactgaaagaacagcccgccctgaacgacagccggtactgcctgagcagcagactgagagtgtccgccaccttctggcagaacccccggaaccacttcagatgccaggtgcagttctacggcctgagcgagaacgacgagtggacccaggacagagccaagcccgtgacccagatcgtgtctgccgaagcctggggcagagccgattgcgacgtgaagctggtggaaaagagcttcgagacagacaccaacctgaacttccagaacctgagcgtgatcggcttcagaatcctgctgctgaaagtggccggctttaacctgctgatgaccctgcggctgtggtccagcagggccaagcgatctggatctggagcaacaaacttctcactactcaaacaagcaggtgacgtggaggagaatcccgggcctactagtgccaccatggactggatttggcgcatccttttccttgtcggcgctgctaccggcgcccattccgggcccgaagtgcagctggttgaatctggcggaggactggttcaggctggcggatctctgagactgtcttgtgccgccagcggcagaacctttagcatgggctggtttagacaggcccctggcaaagagagagagttcgtcgccgccatcacatactctggcggcagcccttactacgccgactctgtgaagggcagattcaccatcagccgggacaacgccaagaacaccgtgtacctccagatgaacagcctgaagcctgaggacaccgccgtgtactactgcgccgccaatccaacatacggcagcgactggaacgccgagaattggggccagggaacccaagtgacagtgtctagcggatccggcggcggaggatctggcggaggcggatctgggggcggaggctctttcgaagaagtgcagctggttgaatcaggcggaggactggttcagcctggcggatctctgagactgtcttgtgccgccagcggctacaccttcaccaactactggatgaactgggtccgacaggcccctggcaaaggactggaatgggtcggaatgatcgaccccagcgacagcgagacacactacaaccacatcttcaaggaccgcttcaccatcagcgccgacaccagcaagaataccgcctacctccagatgaactccctgagagccgaggacaccgccgtgtactactgcgccagaaacctgtatctgtggggccagggaaccctggtcacagtgtcatctacgcgtatccagaaccctgatcctgccgtgtaccagctgcgggatagcaagagcagcgacaagagcgtgtgtctgttcaccgacttcgacagccagaccaacgtgtcccagagcaaggactccgacgtgtacatcaccgataagtgcgtgctggacatgcggagcatggacttcaagagcaactccgccgtggcctggtccaacaagtccgatttcgcctgcgccaacgccttcaacaacagcattatccccgaggacacattcttcccaagccccgagagcagctgcggctttaccagcgagagctaccagcagggcgtgctgagcgccaccatcctgtacgagatcctgctgggcaaggccaccctgtacgccgtgctggtgtctgccctggtgctgatggctatggtcaagcggaaggacagccggggacgcgccaagagaagcggatctggcgtgaagcagaccctgaatttcgacctgctgaagctggctggcgacgtggaatccaacccaggcccttctagaggccatatgaccgagtacaagcccacggtgcgcctcgccacccgcgacgacgtccccagggccgtacgcaccctcgccgccgcgttcgccgactaccccgccacgcgccacaccgtcgatccggaccgccacatcgagcgggtcaccgagctgcaagaactcttcctcacgcgcgtcgggctcgacatcggcaaggtgtgggtcgcggacgacggcgccgcggtggcggtctggaccacgccggagagcgtcgaagcgggggcggtgttcgccgagatcggcccgcgcatggccgagttgagcggttcccggctggccgcgcagcaacagatggaaggcctcctggcgccgcaccggcccaaggagcccgcgtggttcctggccaccgtcggcgtctcgcccgaccaccagggcaagggtctgggcagcgccgtcgtgctccccggagtggaggcggccgagcgcgccggggtgcccgccttcctggagacctccgcgccccgcaacctccccttctacgagcggctcggcttcaccgtcaccgccgacgtcgaggtgcccgaaggaccgcgcacctggtgcatgacccgcaagcccggtgcctga

SEQ ID NO: 37236 - DNA, 3366 bp, synthetic construct
  source 1..3366: mol_type = other DNA
atgggacccagactgctgttttgggctctgctgtgtctgctcggcacaggacctgttgaagctggcgtgacacagagccccacacacctgattaagaccagaggccagcaggccacactgagatgcagccctatcagcggccacaccagcgtgtactggtatcagcaggctctcggactgggcctccagttcctgctttggtacgacgagggcgaagagagaaaccggggcaacttccctcctcggttttccggcagacagttccccaactacagcagcgagctgaacgtgaacgccctggaactggaagatagcgccctgtacctgtgtgccagctctctcggcggagatgaactgggagccgatggcaacgagcagttctttggccctggcaccagactgaccgtgctggaaggtaccggcggaggcggatctggcggcggaagcgaattcgacatccagatgacacagagccctagcagcctgtctgccagcgtgggagacagagtgaccatcacatgcaagagcagccagagcctgctggactccgatggcaagacctacctgaactggtatcagcagaagcccggcaaggcccctaagctgctgatctacctggtgtccaagctggatagcggcgtgcccagcagattttctggcagcggcagcggaaccgacttcaccctgacaatatccagcctccagcctgaggacttcgccacctactactgcttccaaggcacccactttccatacaccttcggccagggcaccaaggtggaaatcaaaagactcgaggacctgaagaacgtgttcccacctgaggtggccgtgttcgagcctagcgaggccgagatcagccacacccagaaagccaccctcgtgtgcctggctaccggcttctaccccgaccatgtggaactgtcttggtgggtcaacggcaaagaggtgcacagcggcgtgtgtaccgacccccagccactgaaagaacagcccgccctgaacgacagccggtactgcctgagcagcagactgagagtgtccgccaccttctggcagaacccccggaaccacttcagatgccaggtgcagttctacggcctgagcgagaacgacgagtggacccaggacagagccaagcccgtgacccagatcgtgtctgccgaagcctggggcagagccgattgcgacgtgaagctggtggaaaagagcttcgagacagacaccaacctgaacttccagaacctgagcgtgatcggcttcagaatcctgctgctgaaagtggccggctttaacctgctgatgaccctgcggctgtggtccagcagggccaagcgatctggatctggagcaacaaacttctcactactcaaacaagcaggtgacgtggaggagaatcccgggcctactagtgccaccatggactggatttggcgcatccttttccttgtcggcgctgctaccggcgcccattccgggcccgaagtgcagctggttgaatctggcggaggactggttcaggctggcggatctctgagactgtcttgtgccgccagcggcagaacctttagcatgggctggtttagacaggcccctggcaaagagagagagttcgtcgccgccatcacatactctggcggcagcccttactacgccgactctgtgaagggcagattcaccatcagccgggacaacgccaagaacaccgtgtacctccagatgaacagcctgaagcctgaggacaccgccgtgtactactgcgccgccaatccaacatacggcagcgactggaacgccgagaattggggccagggaacccaagtgacagtgtctagcggatccggcggcggaggatctggcggaggcggatctgggggcggaggctctttcgaagaagtgcagctggttgaatcaggcggaggactggttcagcctggcggatctctgagactgtcttgtgccgccagcggctacaccttcaccaactactggatgaactgggtccgacaggcccctggcaaaggactggaatgggtcggaatgatcgaccccagcgacagcgagacacactacaaccacatcttcaaggaccgcttcaccatcagcgccgacaccagcaagaataccgcctacctccagatgaactccctgagagccgaggacaccgccgtgtactactgcgccagaaacctgtatctgtggggccagggaaccctggtcacagtgtcatctacgcgtatccagaaccctgatcctgccgtgtaccagctgcgggatagcaagagcagcgacaagagcgtgtgtctgttcaccgacttcgacagccagaccaacgtgtcccagagcaaggactccgacgtgtacatcaccgataagtgcgtgctggacatgcggagcatggacttcaagagcaactccgccgtggcctggtccaacaagtccgatttcgcctgcgccaacgccttcaacaacagcattatccccgaggacacattcttcccaagccccgagagcagctgcggctttaccagcgagagctaccagcagggcgtgctgagcgccaccatcctgtacgagatcctgctgggcaaggccaccctgtacgccgtgctggtgtctgccctggtgctgatggctatggtcaagcggaaggacagccggggacgcgccaagagaagcggatctggcgtgaagcagaccctgaatttcgacctgctgaagctggctggcgacgtggaatccaacccaggcccttctagaggccatatgaccgagtacaagcccacggtgcgcctcgccacccgcgacgacgtccccagggccgtacgcaccctcgccgccgcgttcgccgactaccccgccacgcgccacaccgtcgatccggaccgccacatcgagcgggtcaccgagctgcaagaactcttcctcacgcgcgtcgggctcgacatcggcaaggtgtgggtcgcggacgacggcgccgcggtggcggtctggaccacgccggagagcgtcgaagcgggggcggtgttcgccgagatcggcccgcgcatggccgagttgagcggttcccggctggccgcgcagcaacagatggaaggcctcctggcgccgcaccggcccaaggagcccgcgtggttcctggccaccgtcggcgtctcgcccgaccaccagggcaagggtctgggcagcgccgtcgtgctccccggagtggaggcggccgagcgcgccggggtgcccgccttcctggagacctccgcgccccgcaacctccccttctacgagcggctcggcttcaccgtcaccgccgacgtcgaggtgcccgaaggaccgcgcacctggtgcatgacccgcaagcccggtgcctga

SEQ ID NO: 37237 - DNA, 2841 bp, synthetic construct
  source 1..2841: mol_type = other DNA
atggccttaccagtgaccgccttgctcctgccgctggccttgctgctccacgccgccaggccggacatccagatgacacagagccctagcagcctgtctgccagcgtgggagacagagtgaccatcacatgcaagagcagccagagcctgctggactccgatggcaagacctacctgaactggtatcagcagaagcccggcaaggcccctaagctgctgatctacctggtgtccaagctggatagcggcgtgcccagcagattttctggcagcggcagcggaaccgacttcaccctgacaatatccagcctccagcctgaggacttcgccacctactactgcttccaaggcacccactttccatacaccttcggccagggcaccaaggtggaaatcaaaagactcgaggacctgaagaacgtgttcccacctgaggtggccgtgttcgagcctagcgaggccgagatcagccacacccagaaagccaccctcgtgtgcctggctaccggcttctaccccgaccatgtggaactgtcttggtgggtcaacggcaaagaggtgcacagcggcgtgtgtaccgacccccagccactgaaagaacagcccgccctgaacgacagccggtactgcctgagcagcagactgagagtgtccgccaccttctggcagaacccccggaaccacttcagatgccaggtgcagttctacggcctgagcgagaacgacgagtggacccaggacagagccaagcccgtgacccagatcgtgtctgccgaagcctggggcagagccgattgcgacgtgaagctggtggaaaagagcttcgagacagacaccaacctgaacttccagaacctgagcgtgatcggcttcagaatcctgctgctgaaagtggccggctttaacctgctgatgaccctgcggctgtggtccagcagggccaagcgatctggatctggagcaacaaacttctcactactcaaacaagcaggtgacgtggaggagaatcccgggcctactagtgccaccatggactggatttggcgcatccttttccttgtcggcgctgctaccggcgcccattccgggcccatgggaagctggcttgagttctaccacagactcaacgccattgacagcaggctgtgggcacttggcggaagcgaagctgaactcgccgcttttgaaaaagaaattgccgctttcgagtccgagcttcaggcttacaaaggcaaagggaatcctgaggtcgagagcctgagagatcacgctgcccacattagagagtggttgcaggcataccggcacaatggatccggcggcggaggatctggcggaggcggatctgggggcggaggctctttcgaagaagtgcagctggttgaatcaggcggaggactggttcagcctggcggatctctgagactgtcttgtgccgccagcggctacaccttcaccaactactggatgaactgggtccgacaggcccctggcaaaggactggaatgggtcggaatgatcgaccccagcgacagcgagacacactacaaccacatcttcaaggaccgcttcaccatcagcgccgacaccagcaagaataccgcctacctccagatgaactccctgagagccgaggacaccgccgtgtactactgcgccagaaacctgtatctgtggggccagggaaccctggtcacagtgtcatctacgcgtatccagaaccctgatcctgccgtgtaccagctgcgggatagcaagagcagcgacaagagcgtgtgtctgttcaccgacttcgacagccagaccaacgtgtcccagagcaaggactccgacgtgtacatcaccgataagtgcgtgctggacatgcggagcatggacttcaagagcaactccgccgtggcctggtccaacaagtccgatttcgcctgcgccaacgccttcaacaacagcattatccccgaggacacattcttcccaagccccgagagcagctgcggctttaccagcgagagctaccagcagggcgtgctgagcgccaccatcctgtacgagatcctgctgggcaaggccaccctgtacgccgtgctggtgtctgccctggtgctgatggctatggtcaagcggaaggacagccggggacgcgccaagagaagcggatctggcgtgaagcagaccctgaatttcgacctgctgaagctggctggcgacgtggaatccaacccaggcccttctagaggccatatgaccgagtacaagcccacggtgcgcctcgccacccgcgacgacgtccccagggccgtacgcaccctcgccgccgcgttcgccgactaccccgccacgcgccacaccgtcgatccggaccgccacatcgagcgggtcaccgagctgcaagaactcttcctcacgcgcgtcgggctcgacatcggcaaggtgtgggtcgcggacgacggcgccgcggtggcggtctggaccacgccggagagcgtcgaagcgggggcggtgttcgccgagatcggcccgcgcatggccgagttgagcggttcccggctggccgcgcagcaacagatggaaggcctcctggcgccgcaccggcccaaggagcccgcgtggttcctggccaccgtcggcgtctcgcccgaccaccagggcaagggtctgggcagcgccgtcgtgctccccggagtggaggcggccgagcgcgccggggtgcccgccttcctggagacctccgcgccccgcaacctccccttctacgagcggctcggcttcaccgtcaccgccgacgtcgaggtgcccgaaggaccgcgcacctggtgcatgacccgcaagcccggtgcctga

SEQ ID NO: 37238 - DNA, 2841 bp, synthetic construct
  source 1..2841: mol_type = other DNA
atggccttaccagtgaccgccttgctcctgccgctggccttgctgctccacgccgccaggccggcatgcatgggcagttggttcgagttctacgaccggctgaatgccatcgacgccagactgtgggctctcggaggatctgaagctgagctggccgccttcgagaaagagatcgccgcctttgagagcgagctgcaagcctacaaaggcaagggcaaccccgaggtggaaaacctgagagtgcacgccgctgccatcagagaatggctccaggcttacagacacaacggtaccggcggaggcggatctggcggcggaggtagcggtggcggaggatctgaattcgacatccagatgacacagagccctagcagcctgtctgccagcgtgggagacagagtgaccatcacatgcaagagcagccagagcctgctggactccgatggcaagacctacctgaactggtatcagcagaagcccggcaaggcccctaagctgctgatctacctggtgtccaagctggatagcggcgtgcccagcagattttctggcagcggcagcggaaccgacttcaccctgacaatatccagcctccagcctgaggacttcgccacctactactgcttccaaggcacccactttccatacaccttcggccagggcaccaaggtggaaatcaaaagactcgaggacctgaagaacgtgttcccacctgaggtggccgtgttcgagcctagcgaggccgagatcagccacacccagaaagccaccctcgtgtgcctggctaccggcttctaccccgaccatgtggaactgtcttggtgggtcaacggcaaagaggtgcacagcggcgtgtgtaccgacccccagccactgaaagaacagcccgccctgaacgacagccggtactgcctgagcagcagactgagagtgtccgccaccttctggcagaacccccggaaccacttcagatgccaggtgcagttctacggcctgagcgagaacgacgagtggacccaggacagagccaagcccgtgacccagatcgtgtctgccgaagcctggggcagagccgattgcgacgtgaagctggtggaaaagagcttcgagacagacaccaacctgaacttccagaacctgagcgtgatcggcttcagaatcctgctgctgaaagtggccggctttaacctgctgatgaccctgcggctgtggtccagcagggccaagcgatctggatctggagcaacaaacttctcactactcaaacaagcaggtgacgtggaggagaatcccgggcctactagtatggactggatttggcgcatccttttccttgtcggcgctgctaccggcgcgcattccttcgaagaagtgcagctggttgaatcaggcggaggactggttcagcctggcggatctctgagactgtcttgtgccgccagcggctacaccttcaccaactactggatgaactgggtccgacaggcccctggcaaaggactggaatgggtcggaatgatcgaccccagcgacagcgagacacactacaaccacatcttcaaggaccgcttcaccatcagcgccgacaccagcaagaataccgcctacctccagatgaactccctgagagccgaggacaccgccgtgtactactgcgccagaaacctgtatctgtggggccagggaaccctggtcacagtgtcatctacgcgtatccagaaccctgatcctgccgtgtaccagctgcgggatagcaagagcagcgacaagagcgtgtgtctgttcaccgacttcgacagccagaccaacgtgtcccagagcaaggactccgacgtgtacatcaccgataagtgcgtgctggacatgcggagcatggacttcaagagcaactccgccgtggcctggtccaacaagtccgatttcgcctgcgccaacgccttcaacaacagcattatccccgaggacacattcttcccaagccccgagagcagctgcggctttaccagcgagagctaccagcagggcgtgctgagcgccaccatcctgtacgagatcctgctgggcaaggccaccctgtacgccgtgctggtgtctgccctggtgctgatggctatggtcaagcggaaggacagccggggacgcgccaagagaagcggatctggcgtgaagcagaccctgaatttcgacctgctgaagctggctggcgacgtggaatccaacccaggcccttctagaggccatatgaccgagtacaagcccacggtgcgcctcgccacccgcgacgacgtccccagggccgtacgcaccctcgccgccgcgttcgccgactaccccgccacgcgccacaccgtcgatccggaccgccacatcgagcgggtcaccgagctgcaagaactcttcctcacgcgcgtcgggctcgacatcggcaaggtgtgggtcgcggacgacggcgccgcggtggcggtctggaccacgccggagagcgtcgaagcgggggcggtgttcgccgagatcggcccgcgcatggccgagttgagcggttcccggctggccgcgcagcaacagatggaaggcctcctggcgccgcaccggcccaaggagcccgcgtggttcctggccaccgtcggcgtctcgcccgaccaccagggcaagggtctgggcagcgccgtcgtgctccccggagtggaggcggccgagcgcgccggggtgcccgccttcctggagacctccgcgccccgcaacctccccttctacgagcggctcggcttcaccgtcaccgccgacgtcgaggtgcccgaaggaccgcgcacctggtgcatgacccgcaagcccggtgcctga

SEQ ID NO: 37239 - DNA, 3192 bp, synthetic construct
  source 1..3192: mol_type = other DNA
atggccttaccagtgaccgccttgctcctgccgctggccttgctgctccacgccgccaggccggcatgcatggaccccgacctggaaatcagagccgccttcctgcggcagagaaacacagccctgagaacagaggtggccgagctggaacaagaggtgcagcggctggaaaacgaggtgtcccagtacgagacaagatacggccctctcggaggcggaaaaggtaccggcggaggcggatctggcggcggaggtagcggtggcggaggatctgaattcgacatccagatgacacagagccctagcagcctgtctgccagcgtgggagacagagtgaccatcacatgcaagagcagccagagcctgctggactccgatggcaagacctacctgaactggtatcagcagaagcccggcaaggcccctaagctgctgatctacctggtgtccaagctggatagcggcgtgcccagcagattttctggcagcggcagcggaaccgacttcaccctgacaatatccagcctccagcctgaggacttcgccacctactactgcttccaaggcacccactttccatacaccttcggccagggcaccaaggtggaaatcaaaagactcgaggacctgaagaacgtgttcccacctgaggtggccgtgttcgagcctagcgaggccgagatcagccacacccagaaagccaccctcgtgtgcctggctaccggcttctaccccgaccatgtggaactgtcttggtgggtcaacggcaaagaggtgcacagcggcgtgtgtaccgacccccagccactgaaagaacagcccgccctgaacgacagccggtactgcctgagcagcagactgagagtgtccgccaccttctggcagaacccccggaaccacttcagatgccaggtgcagttctacggcctgagcgagaacgacgagtggacccaggacagagccaagcccgtgacccagatcgtgtctgccgaagcctggggcagagccgattgcgacgtgaagctggtggaaaagagcttcgagacagacaccaacctgaacttccagaacctgagcgtgatcggcttcagaatcctgctgctgaaagtggccggctttaacctgctgatgaccctgcggctgtggtccagcagggccaagcgatctggatctggagcaacaaacttctcactactcaaacaagcaggtgacgtggaggagaatcccgggcctactagtgccaccatggactggatttggcgcatccttttccttgtcggcgctgctaccggcgcccattccgggcccgaagtgcagctggttgaatctggcggaggactggttcaggctggcggatctctgagactgtcttgtgccgccagcggcagaacctttagcatgggctggtttagacaggcccctggcaaagagagagagttcgtcgccgccatcacatactctggcggcagcccttactacgccgactctgtgaagggcagattcaccatcagccgggacaacgccaagaacaccgtgtacctccagatgaacagcctgaagcctgaggacaccgccgtgtactactgcgccgccaatccaacatacggcagcgactggaacgccgagaattggggccagggaacccaagtgacagtgtctagcggatccggcggcggaggatctggcggaggcggatctgggggcggaggctctttcgaagaagtgcagctggttgaatcaggcggaggactggttcagcctggcggatctctgagactgtcttgtgccgccagcggctacaccttcaccaactactggatgaactgggtccgacaggcccctggcaaaggactggaatgggtcggaatgatcgaccccagcgacagcgagacacactacaaccacatcttcaaggaccgcttcaccatcagcgccgacaccagcaagaataccgcctacctccagatgaactccctgagagccgaggacaccgccgtgtactactgcgccagaaacctgtatctgtggggccagggaaccctggtcacagtgtcatctacgcgtatccagaaccctgatcctgccgtgtaccagctgcgggatagcaagagcagcgacaagagcgtgtgtctgttcaccgacttcgacagccagaccaacgtgtcccagagcaaggactccgacgtgtacatcaccgataagtgcgtgctggacatgcggagcatggacttcaagagcaactccgccgtggcctggtccaacaagtccgatttcgcctgcgccaacgccttcaacaacagcattatccccgaggacacattcttcccaagccccgagagcagctgcggctttaccagcgagagctaccagcagggcgtgctgagcgccaccatcctgtacgagatcctgctgggcaaggccaccctgtacgccgtgctggtgtctgccctggtgctgatggctatggtcaagcggaaggacagccggggacgcgccaagagaagcggatctggcgtgaagcagaccctgaatttcgacctgctgaagctggctggcgacgtggaatccaacccaggcccttctagaggccatatgaccgagtacaagcccacggtgcgcctcgccacccgcgacgacgtccccagggccgtacgcaccctcgccgccgcgttcgccgactaccccgccacgcgccacaccgtcgatccggaccgccacatcgagcgggtcaccgagctgcaagaactcttcctcacgcgcgtcgggctcgacatcggcaaggtgtgggtcgcggacgacggcgccgcggtggcggtctggaccacgccggagagcgtcgaagcgggggcggtgttcgccgagatcggcccgcgcatggccgagttgagcggttcccggctggccgcgcagcaacagatggaaggcctcctggcgccgcaccggcccaaggagcccgcgtggttcctggccaccgtcggcgtctcgcccgaccaccagggcaagggtctgggcagcgccgtcgtgctccccggagtggaggcggccgagcgcgccggggtgcccgccttcctggagacctccgcgccccgcaacctccccttctacgagcggctcggcttcaccgtcaccgccgacgtcgaggtgcccgaaggaccgcgcacctggtgcatgacccgcaagcccggtgcctga

SEQ ID NO: 37240 - DNA, 2841 bp, synthetic construct
  source 1..2841: mol_type = other DNA
atggccttaccagtgaccgccttgctcctgccgctggccttgctgctccacgccgccaggccggacatccagatgacacagagccctagcagcctgtctgccagcgtgggagacagagtgaccatcacatgcaagagcagccagagcctgctggactccgatggcaagacctacctgaactggtatcagcagaagcccggcaaggcccctaagctgctgatctacctggtgtccaagctggatagcggcgtgcccagcagattttctggcagcggcagcggaaccgacttcaccctgacaatatccagcctccagcctgaggacttcgccacctactactgcttccaaggcacccactttccatacaccttcggccagggcaccaaggtggaaatcaaaagactcgaggacctgaagaacgtgttcccacctgaggtggccgtgttcgagcctagcgaggccgagatcagccacacccagaaagccaccctcgtgtgcctggctaccggcttctaccccgaccatgtggaactgtcttggtgggtcaacggcaaagaggtgcacagcggcgtgtgtaccgacccccagccactgaaagaacagcccgccctgaacgacagccggtactgcctgagcagcagactgagagtgtccgccaccttctggcagaacccccggaaccacttcagatgccaggtgcagttctacggcctgagcgagaacgacgagtggacccaggacagagccaagcccgtgacccagatcgtgtctgccgaagcctggggcagagccgattgcgacgtgaagctggtggaaaagagcttcgagacagacaccaacctgaacttccagaacctgagcgtgatcggcttcagaatcctgctgctgaaagtggccggctttaacctgctgatgaccctgcggctgtggtccagcagggccaagcgatctggatctggagcaacaaacttctcactactcaaacaagcaggtgacgtggaggagaatcccgggcctactagtgccaccatggactggatttggcgcatccttttccttgtcggcgctgctaccggcgcccattccgggcccatgggatcttggagcgagttttacgatcggctgcacgccattcaccaccggctgtatgctctcggaggaagcgaagctgagctggccgcttttgaaaaagaaattgccgctttcgagtccgagcttcaggcttacaaaggcaaagggaatcctgaggtcgaggccctgagagataccgccgccttcatcagaacccggttgcaggcataccggcacaacggatccggcggcggaggatctggcggaggcggatctgggggcggaggctctttcgaagaagtgcagctggttgaatcaggcggaggactggttcagcctggcggatctctgagactgtcttgtgccgccagcggctacaccttcaccaactactggatgaactgggtccgacaggcccctggcaaaggactggaatgggtcggaatgatcgaccccagcgacagcgagacacactacaaccacatcttcaaggaccgcttcaccatcagcgccgacaccagcaagaataccgcctacctccagatgaactccctgagagccgaggacaccgccgtgtactactgcgccagaaacctgtatctgtggggccagggaaccctggtcacagtgtcatctacgcgtatccagaaccctgatcctgccgtgtaccagctgcgggatagcaagagcagcgacaagagcgtgtgtctgttcaccgacttcgacagccagaccaacgtgtcccagagcaaggactccgacgtgtacatcaccgataagtgcgtgctggacatgcggagcatggacttcaagagcaactccgccgtggcctggtccaacaagtccgatttcgcctgcgccaacgccttcaacaacagcattatccccgaggacacattcttcccaagccccgagagcagctgcggctttaccagcgagagctaccagcagggcgtgctgagcgccaccatcctgtacgagatcctgctgggcaaggccaccctgtacgccgtgctggtgtctgccctggtgctgatggctatggtcaagcggaaggacagccggggacgcgccaagagaagcggatctggcgtgaagcagaccctgaatttcgacctgctgaagctggctggcgacgtggaatccaacccaggcccttctagaggccatatgaccgagtacaagcccacggtgcgcctcgccacccgcgacgacgtccccagggccgtacgcaccctcgccgccgcgttcgccgactaccccgccacgcgccacaccgtcgatccggaccgccacatcgagcgggtcaccgagctgcaagaactcttcctcacgcgcgtcgggctcgacatcggcaaggtgtgggtcgcggacgacggcgccgcggtggcggtctggaccacgccggagagcgtcgaagcgggggcggtgttcgccgagatcggcccgcgcatggccgagttgagcggttcccggctggccgcgcagcaacagatggaaggcctcctggcgccgcaccggcccaaggagcccgcgtggttcctggccaccgtcggcgtctcgcccgaccaccagggcaagggtctgggcagcgccgtcgtgctccccggagtggaggcggccgagcgcgccggggtgcccgccttcctggagacctccgcgccccgcaacctccccttctacgagcggctcggcttcaccgtcaccgccgacgtcgaggtgcccgaaggaccgcgcacctggtgcatgacccgcaagcccggtgcctga

SEQ ID NO: 37241 - DNA, 3471 bp, synthetic construct
  source 1..3471: mol_type = other DNA
atggccttaccagtgaccgccttgctcctgccgctggccttgctgctccacgccgccaggccggacatccagatgacacagagccctagcagcctgtctgccagcgtgggagacagagtgaccatcacatgcaagagcagccagagcctgctggactccgatggcaagacctacctgaactggtatcagcagaagcccggcaaggcccctaagctgctgatctacctggtgtccaagctggatagcggcgtgcccagcagattttctggcagcggcagcggaaccgacttcaccctgacaatatccagcctccagcctgaggacttcgccacctactactgcttccaaggcacccactttccatacaccttcggccagggcaccaaggtggaaatcaaaagactcgaggacctgaagaacgtgttcccacctgaggtggccgtgttcgagcctagcgaggccgagatcagccacacccagaaagccaccctcgtgtgcctggctaccggcttctaccccgaccatgtggaactgtcttggtgggtcaacggcaaagaggtgcacagcggcgtgtgtaccgacccccagccactgaaagaacagcccgccctgaacgacagccggtactgcctgagcagcagactgagagtgtccgccaccttctggcagaacccccggaaccacttcagatgccaggtgcagttctacggcctgagcgagaacgacgagtggacccaggacagagccaagcccgtgacccagatcgtgtctgccgaagcctggggcagagccgattgcgacgtgaagctggtggaaaagagcttcgagacagacaccaacctgaacttccagaacctgagcgtgatcggcttcagaatcctgctgctgaaagtggccggctttaacctgctgatgaccctgcggctgtggtccagcagggccaagcgatctggatctggagcaacaaacttctcactactcaaacaagcaggtgacgtggaggagaatcccgggcctactagtaccatggactggatttggcgcatccttttccttgtcggcgctgctaccggcgcccattccctgttcaatcaagaggtgcagatccctctgaccgagagctactgtggcccctgtcctaagaactggatctgctacaagaacaactgctaccagttcttcgacgagagcaagaattggtacgagagccaggccagctgcatgagccagaatgccagcctgctgaaggtgtacagcaaagaggaccaggacctgctgaaactggtcaagagcgcccactggatgggccttgtgcacatccccaccaatggctcttggcagtgggaggacggcagcattctgagccctaacctgctgaccatcatcgagatgcagaagggcgactgcgccctgtacgccagcagctttaagggctacatcgagaattgcagcaccccgaacacctacatctgtatgcagagaaccgtttctggcggaggcggctctggaggaggcggaagtggcggcggaggcgacctctttaatcaagaagtccagattccactcaccgaatcctactgcggaccttgtccaaaaaattggatttgttataagaacaactgttatcaattctttgatgagtctaaaaattggtatgagtcccaggcttcctgcatgtctcagaacgcttctctgctgaaagtctactctaaagaagatcaggatctcctgaagctcgtcaagtctgcccattggatggggctcgtccacattcctaccaacggaagctggcaatgggaagatggctccatcctgtctccaaatctgctcacgattattgaaatgcagaaaggggattgtgctctctacgccagctccttcaagggatatattgagaactgtagcacgcccaatacttatatctgtatgcaacggaccgtgggatccggcggcggaggatctggcggaggcggatctgggggcggaggctctttcgaagaagtgcagctggttgaatcaggcggaggactggttcagcctggcggatctctgagactgtcttgtgccgccagcggctacaccttcaccaactactggatgaactgggtccgacaggcccctggcaaaggactggaatgggtcggaatgatcgaccccagcgacagcgagacacactacaaccacatcttcaaggaccgcttcaccatcagcgccgacaccagcaagaataccgcctacctccagatgaactccctgagagccgaggacaccgccgtgtactactgcgccagaaacctgtatctgtggggccagggaaccctggtcacagtgtcatctacgcgtatccagaaccctgatcctgccgtgtaccagctgcgggatagcaagagcagcgacaagagcgtgtgtctgttcaccgacttcgacagccagaccaacgtgtcccagagcaaggactccgacgtgtacatcaccgataagtgcgtgctggacatgcggagcatggacttcaagagcaactccgccgtggcctggtccaacaagtccgatttcgcctgcgccaacgccttcaacaacagcattatccccgaggacacattcttcccaagccccgagagcagctgcggctttaccagcgagagctaccagcagggcgtgctgagcgccaccatcctgtacgagatcctgctgggcaaggccaccctgtacgccgtgctggtgtctgccctggtgctgatggctatggtcaagcggaaggacagccggggacgcgccaagagaagcggatctggcgtgaagcagaccctgaatttcgacctgctgaagctggctggcgacgtggaatccaacccaggcccttctagaggccatatgaccgagtacaagcccacggtgcgcctcgccacccgcgacgacgtccccagggccgtacgcaccctcgccgccgcgttcgccgactaccccgccacgcgccacaccgtcgatccggaccgccacatcgagcgggtcaccgagctgcaagaactcttcctcacgcgcgtcgggctcgacatcggcaaggtgtgggtcgcggacgacggcgccgcggtggcggtctggaccacgccggagagcgtcgaagcgggggcggtgttcgccgagatcggcccgcgcatggccgagttgagcggttcccggctggccgcgcagcaacagatggaaggcctcctggcgccgcaccggcccaaggagcccgcgtggttcctggccaccgtcggcgtctcgcccgaccaccagggcaagggtctgggcagcgccgtcgtgctccccggagtggaggcggccgagcgcgccggggtgcccgccttcctggagacctccgcgccccgcaacctccccttctacgagcggctcggcttcaccgtcaccgccgacgtcgaggtgcccgaaggaccgcgcacctggtgcatgacccgcaagcccggtgcctga

SEQ ID NO: 37242 - DNA, 1857 bp, synthetic construct
  source 1..1857: mol_type = other DNA
atggccttaccagtgaccgccttgctcctgccgctggccttgctgctccacgccgccaggccggacatccagatgacacagagccctagcagcctgtctgccagcgtgggagacagagtgaccatcacatgcaagagcagccagagcctgctggactccgatggcaagacctacctgaactggtatcagcagaagcccggcaaggcccctaagctgctgatctacctggtgtccaagctggatagcggcgtgcccagcagattttctggcagcggcagcggaaccgacttcaccctgacaatatccagcctccagcctgaggacttcgccacctactactgcttccaaggcacccactttccatacaccttcggccagggcaccaaggtggaaatcaaaagactcgaggacctgaagaacgtgttcccacctgaggtggccgtgttcgagcctagcgaggccgagatcagccacacccagaaagccaccctcgtgtgcctggctaccggcttctaccccgaccatgtggaactgtcttggtgggtcaacggcaaagaggtgcacagcggcgtgtgtaccgacccccagccactgaaagaacagcccgccctgaacgacagccggtactgcctgagcagcagactgagagtgtccgccaccttctggcagaacccccggaaccacttcagatgccaggtgcagttctacggcctgagcgagaacgacgagtggacccaggacagagccaagcccgtgacccagatcgtgtctgccgaagcctggggcagagccgattgcggctttaccagcgagagctaccagcagggcgtgctgagcgccaccaacctgagcgtgatcggcttcagaatcctgctgctgaaagtggccggctttaacctgctgatgaccctgcggctgtggtccagcagggccaagcgatctggatctggagcaacaaacttctcactactcaaacaagcaggtgacgtggaggagaatcccgggcctactagtatggactggatttggcgcatccttttccttgtcggcgctgctaccggcgcgcattccttcgaagaagtgcagctggttgaatcaggcggaggactggttcagcctggcggatctctgagactgtcttgtgccgccagcggctacaccttcaccaactactggatgaactgggtccgacaggcccctggcaaaggactggaatgggtcggaatgatcgaccccagcgacagcgagacacactacaaccacatcttcaaggaccgcttcaccatcagcgccgacaccagcaagaataccgcctacctccagatgaactccctgagagccgaggacaccgccgtgtactactgcgccagaaacctgtatctgtggggccagggaaccctggtcacagtgtcatctacgcgtatccagaaccctgatcctgccgtgtaccagctgcgggatagcaagagcagcgacaagagcgtgtgtctgttcaccgacttcgacagccagaccaacgtgtcccagagcaaggactccgacgtgtacatcaccgataagtgcgtgctggacatgcggagcatggacttcaagagcaactccgccgtggcctggtccaacaagtccgatttcgcctgcgccaacgccttcaacaacagcattatccccgaggacacattcttcccaagccccgagagcagctgcgacgtgaagctggtggaaaagagcttcgagacagacaccaacctgaacttccagatcctgtacgagatcctgctgggcaaggccaccctgtacgccgtgctggtgtctgccctggtgctgatggctatggtcaagcggaaggacagccgggga

SEQ ID NO: 37243 - DNA, 1869 bp, synthetic construct
  source 1..1869: mol_type = other DNA
atggccttaccagtgaccgccttgctcctgccgctggccttgctgctccacgccgccaggccggacatccagatgacacagagccctagcagcctgtctgccagcgtgggagacagagtgaccatcacatgcaagagcagccagagcctgctggactccgatggcaagacctacctgaactggtatcagcagaagcccggcaaggcccctaagctgctgatctacctggtgtccaagctggatagcggcgtgcccagcagattttctggcagcggcagcggaaccgacttcaccctgacaatatccagcctccagcctgaggacttcgccacctactactgcttccaaggcacccactttccatacaccttcggccagggcaccaaggtggaaatcaaaagactcgagatccagaaccctgatcctgccgtgtaccagctgcgggatagcaagagcagcgacaagagcgtgtgtctgttcaccgacttcgacagccagaccaacgtgtcccagagcaaggactccgacgtgtacatcaccgataagtgcgtgctggacatgcggagcatggacttcaagagcaactccgccgtggcctggtccaacaagtccgatttcgcctgcgccaacgccttcaacaacagcattatccccgaggacacattcttcccaagccccgagagcagctgcgacgtgaagctggtggaaaagagcttcgagacagacaccaacctgaacttccagatcctgtacgagatcctgctgggcaaggccaccctgtacgccgtgctggtgtctgccctggtgctgatggctatggtcaagcggaaggacagccggggacgcgccaagagaagcggatctggcgtgaagcagaccctgaatttcgacctgctgaagctggctggcgacgtggaatccaacccaggccctactagtatggactggatttggcgcatccttttccttgtcggcgctgctaccggcgcgcattccttcgaagaagtgcagctggttgaatcaggcggaggactggttcagcctggcggatctctgagactgtcttgtgccgccagcggctacaccttcaccaactactggatgaactgggtccgacaggcccctggcaaaggactggaatgggtcggaatgatcgaccccagcgacagcgagacacactacaaccacatcttcaaggaccgcttcaccatcagcgccgacaccagcaagaataccgcctacctccagatgaactccctgagagccgaggacaccgccgtgtactactgcgccagaaacctgtatctgtggggccagggaaccctggtcacagtgtcatctacgcgtgaggacctgaagaacgtgttcccacctgaggtggccgtgttcgagcctagcgaggccgagatcagccacacccagaaagccaccctcgtgtgcctggctaccggcttctaccccgaccatgtggaactgtcttggtgggtcaacggcaaagaggtgcacagcggcgtgtgtaccgacccccagccactgaaagaacagcccgccctgaacgacagccggtactgcctgagcagcagactgagagtgtccgccaccttctggcagaacccccggaaccacttcagatgccaggtgcagttctacggcctgagcgagaacgacgagtggacccaggacagagccaagcccgtgacccagatcgtgtctgccgaagcctggggcagagccgattgcggctttaccagcgagagctaccagcagggcgtgctgagcgccaccaacctgagcgtgatcggcttcagaatcctgctgctgaaagtggccggctttaacctgctgatgaccctgcggctgtggtccagc

SEQ ID NO: 37244 - DNA, 2262 bp, synthetic construct
  source 1..2262: mol_type = other DNA
atggccttaccagtgaccgccttgctcctgccgctggccttgctgctccacgccgccaggccggaagtgcagctggttgaatctggcggaggactggttcagcctggcggatctctgagactgtcttgtgccgccagcggcttcagcttcagcgacttttggatgagctgggtccgacaggcccctggcaaaggacttgaatgggtcgccacaatcagccaggccggcagcgagaaggactacgtggactctgtgaagggcagattcaccatcagccgggacaacgccaagaagtccctgtacctccagatgaacagcctgagagccgaggacaccgccgtgtactattgtgcctctggcgtgtacagcttcgactacagaggccagggcaccctggtcacagtctcttctggtaccggcggaggcggatctggcggcggaggtagcggtggcggaggatctgaattcgacatccagatgacacagagccctagcagcctgtctgccagcgtgggagacagagtgaccatcacatgcaagagcagccagagcctgctggactccgatggcaagacctacctgaactggtatcagcagaagcccggcaaggcccctaagctgctgatctacctggtgtccaagctggatagcggcgtgcccagcagattttctggcagcggcagcggaaccgacttcaccctgacaatatccagcctccagcctgaggacttcgccacctactactgcttccaaggcacccactttccatacaccttcggccagggcaccaaggtggaaatcaaaagactcgaggacctgaagaacgtgttcccacctgaggtggccgtgttcgagcctagcgaggccgagatcagccacacccagaaagccaccctcgtgtgcctggctaccggcttctaccccgaccatgtggaactgtcttggtgggtcaacggcaaagaggtgcacagcggcgtgtgtaccgacccccagccactgaaagaacagcccgccctgaacgacagccggtactgcctgagcagcagactgagagtgtccgccaccttctggcagaacccccggaaccacttcagatgccaggtgcagttctacggcctgagcgagaacgacgagtggacccaggacagagccaagcccgtgacccagatcgtgtctgccgaagcctggggcagagccgattgcggctttaccagcgagagctaccagcagggcgtgctgagcgccaccaacctgagcgtgatcggcttcagaatcctgctgctgaaagtggccggctttaacctgctgatgaccctgcggctgtggtccagcagggccaagcgatctggatctggagcaacaaacttctcactactcaaacaagcaggtgacgtggaggagaatcccgggcctactagtatggactggatttggcgcatccttttccttgtcggcgctgctaccggcgcgcattccttcgaagaagtgcagctggttgaatcaggcggaggactggttcagcctggcggatctctgagactgtcttgtgccgccagcggctacaccttcaccaactactggatgaactgggtccgacaggcccctggcaaaggactggaatgggtcggaatgatcgaccccagcgacagcgagacacactacaaccacatcttcaaggaccgcttcaccatcagcgccgacaccagcaagaataccgcctacctccagatgaactccctgagagccgaggacaccgccgtgtactactgcgccagaaacctgtatctgtggggccagggaaccctggtcacagtgtcatctacgcgtatccagaaccctgatcctgccgtgtaccagctgcgggatagcaagagcagcgacaagagcgtgtgtctgttcaccgacttcgacagccagaccaacgtgtcccagagcaaggactccgacgtgtacatcaccgataagtgcgtgctggacatgcggagcatggacttcaagagcaactccgccgtggcctggtccaacaagtccgatttcgcctgcgccaacgccttcaacaacagcattatccccgaggacacattcttcccaagccccgagagcagctgcgacgtgaagctggtggaaaagagcttcgagacagacaccaacctgaacttccagatcctgtacgagatcctgctgggcaaggccaccctgtacgccgtgctggtgtctgccctggtgctgatggctatggtcaagcggaaggacagccgggga

SEQ ID NO: 37245 - DNA, 2274 bp, synthetic construct
  source 1..2274: mol_type = other DNA
atggccttaccagtgaccgccttgctcctgccgctggccttgctgctccacgccgccaggccggaagtgcagctggttgaatctggcggaggactggttcagcctggcggatctctgagactgtcttgtgccgccagcggcttcagcttcagcgacttttggatgagctgggtccgacaggcccctggcaaaggacttgaatgggtcgccacaatcagccaggccggcagcgagaaggactacgtggactctgtgaagggcagattcaccatcagccgggacaacgccaagaagtccctgtacctccagatgaacagcctgagagccgaggacaccgccgtgtactattgtgcctctggcgtgtacagcttcgactacagaggccagggcaccctggtcacagtctcttctggtaccggcggaggcggatctggcggcggaggtagcggtggcggaggatctgaattcgacatccagatgacacagagccctagcagcctgtctgccagcgtgggagacagagtgaccatcacatgcaagagcagccagagcctgctggactccgatggcaagacctacctgaactggtatcagcagaagcccggcaaggcccctaagctgctgatctacctggtgtccaagctggatagcggcgtgcccagcagattttctggcagcggcagcggaaccgacttcaccctgacaatatccagcctccagcctgaggacttcgccacctactactgcttccaaggcacccactttccatacaccttcggccagggcaccaaggtggaaatcaaaagactcgagatccagaaccctgatcctgccgtgtaccagctgcgggatagcaagagcagcgacaagagcgtgtgtctgttcaccgacttcgacagccagaccaacgtgtcccagagcaaggactccgacgtgtacatcaccgataagtgcgtgctggacatgcggagcatggacttcaagagcaactccgccgtggcctggtccaacaagtccgatttcgcctgcgccaacgccttcaacaacagcattatccccgaggacacattcttcccaagccccgagagcagctgcgacgtgaagctggtggaaaagagcttcgagacagacaccaacctgaacttccagatcctgtacgagatcctgctgggcaaggccaccctgtacgccgtgctggtgtctgccctggtgctgatggctatggtcaagcggaaggacagccggggacgcgccaagagaagcggatctggcgtgaagcagaccctgaatttcgacctgctgaagctggctggcgacgtggaatccaacccaggccctactagtatggactggatttggcgcatccttttccttgtcggcgctgctaccggcgcgcattccttcgaagaagtgcagctggttgaatcaggcggaggactggttcagcctggcggatctctgagactgtcttgtgccgccagcggctacaccttcaccaactactggatgaactgggtccgacaggcccctggcaaaggactggaatgggtcggaatgatcgaccccagcgacagcgagacacactacaaccacatcttcaaggaccgcttcaccatcagcgccgacaccagcaagaataccgcctacctccagatgaactccctgagagccgaggacaccgccgtgtactactgcgccagaaacctgtatctgtggggccagggaaccctggtcacagtgtcatctacgcgtgaggacctgaagaacgtgttcccacctgaggtggccgtgttcgagcctagcgaggccgagatcagccacacccagaaagccaccctcgtgtgcctggctaccggcttctaccccgaccatgtggaactgtcttggtgggtcaacggcaaagaggtgcacagcggcgtgtgtaccgacccccagccactgaaagaacagcccgccctgaacgacagccggtactgcctgagcagcagactgagagtgtccgccaccttctggcagaacccccggaaccacttcagatgccaggtgcagttctacggcctgagcgagaacgacgagtggacccaggacagagccaagcccgtgacccagatcgtgtctgccgaagcctggggcagagccgattgcggctttaccagcgagagctaccagcagggcgtgctgagcgccaccaacctgagcgtgatcggcttcagaatcctgctgctgaaagtggccggctttaacctgctgatgaccctgcggctgtggtccagc

SEQ ID NO: 37246 - DNA, 2673 bp, synthetic construct
  source 1..2673: mol_type = other DNA
atggccttaccagtgaccgccttgctcctgccgctggccttgctgctccacgccgccaggccggaagtgcagctggttgaatctggcggaggactggttcagcctggcggatctctgagactgtcttgtgccgccagcggcttcagcttcagcgacttttggatgagctgggtccgacaggcccctggcaaaggacttgaatgggtcgccacaatcagccaggccggcagcgagaaggactacgtggactctgtgaagggcagattcaccatcagccgggacaacgccaagaagtccctgtacctccagatgaacagcctgagagccgaggacaccgccgtgtactattgtgcctctggcgtgtacagcttcgactacagaggccagggcaccctggtcacagtctcttctggtaccggcggaggcggatctggcggcggaggtagcggtggcggaggatctgaattcgacatccagatgacacagagccctagcagcctgtctgccagcgtgggagacagagtgaccatcacatgcaagagcagccagagcctgctggactccgatggcaagacctacctgaactggtatcagcagaagcccggcaaggcccctaagctgctgatctacctggtgtccaagctggatagcggcgtgcccagcagattttctggcagcggcagcggaaccgacttcaccctgacaatatccagcctccagcctgaggacttcgccacctactactgcttccaaggcacccactttccatacaccttcggccagggcaccaaggtggaaatcaaaagactcgaggacctgaagaacgtgttcccacctgaggtggccgtgttcgagcctagcgaggccgagatcagccacacccagaaagccaccctcgtgtgcctggctaccggcttctaccccgaccatgtggaactgtcttggtgggtcaacggcaaagaggtgcacagcggcgtgtgtaccgacccccagccactgaaagaacagcccgccctgaacgacagccggtactgcctgagcagcagactgagagtgtccgccaccttctggcagaacccccggaaccacttcagatgccaggtgcagttctacggcctgagcgagaacgacgagtggacccaggacagagccaagcccgtgacccagatcgtgtctgccgaagcctggggcagagccgattgcggctttaccagcgagagctaccagcagggcgtgctgagcgccaccaacctgagcgtgatcggcttcagaatcctgctgctgaaagtggccggctttaacctgctgatgaccctgcggctgtggtccagcagggccaagcgatctggatctggagcaacaaacttctcactactcaaacaagcaggtgacgtggaggagaatcccgggcctactagtatggactggatttggcgcatccttttccttgtcggcgctgctaccggcgcgcattccgggccccagctccagctgcaagagtctggacctggcctggtcaagcctagcgagacactgagcctgacctgtaccgtgtccggcgatagcatcagcagcggcgattactactggggctggatcagacagcctcctggcaaaggactggaatggatcggccacatctactacagcggcgtgacctactacaaccccagcctgaagtccagagtgaccatcagcgtggacaccagccggaaccagttctccctgaagctgtctagcgtgacagccgccgataccgccgtgtactactgcaccagagaggacagcagcaactggcggagtagaggccagggaacactggtcacagttagctctggatccggcggaggcggaagtggaggcggaggatctggcggcggaggctctttcgaagaagtgcagctggttgaatcaggcggaggactggttcagcctggcggatctctgagactgtcttgtgccgccagcggctacaccttcaccaactactggatgaactgggtccgacaggcccctggcaaaggactggaatgggtcggaatgatcgaccccagcgacagcgagacacactacaaccacatcttcaaggaccgcttcaccatcagcgccgacaccagcaagaataccgcctacctccagatgaactccctgagagccgaggacaccgccgtgtactactgcgccagaaacctgtatctgtggggccagggaaccctggtcacagtgtcatctacgcgtatccagaaccctgatcctgccgtgtaccagctgcgggatagcaagagcagcgacaagagcgtgtgtctgttcaccgacttcgacagccagaccaacgtgtcccagagcaaggactccgacgtgtacatcaccgataagtgcgtgctggacatgcggagcatggacttcaagagcaactccgccgtggcctggtccaacaagtccgatttcgcctgcgccaacgccttcaacaacagcattatccccgaggacacattcttcccaagccccgagagcagctgcgacgtgaagctggtggaaaagagcttcgagacagacaccaacctgaacttccagatcctgtacgagatcctgctgggcaaggccaccctgtacgccgtgctggtgtctgccctggtgctgatggctatggtcaagcggaaggacagccgggga

SEQ ID NO: 37247 - DNA, 2685 bp, synthetic construct
  source 1..2685: mol_type = other DNA
atggccttaccagtgaccgccttgctcctgccgctggccttgctgctccacgccgccaggccggaagtgcagctggttgaatctggcggaggactggttcagcctggcggatctctgagactgtcttgtgccgccagcggcttcagcttcagcgacttttggatgagctgggtccgacaggcccctggcaaaggacttgaatgggtcgccacaatcagccaggccggcagcgagaaggactacgtggactctgtgaagggcagattcaccatcagccgggacaacgccaagaagtccctgtacctccagatgaacagcctgagagccgaggacaccgccgtgtactattgtgcctctggcgtgtacagcttcgactacagaggccagggcaccctggtcacagtctcttctggtaccggcggaggcggatctggcggcggaggtagcggtggcggaggatctgaattcgacatccagatgacacagagccctagcagcctgtctgccagcgtgggagacagagtgaccatcacatgcaagagcagccagagcctgctggactccgatggcaagacctacctgaactggtatcagcagaagcccggcaaggcccctaagctgctgatctacctggtgtccaagctggatagcggcgtgcccagcagattttctggcagcggcagcggaaccgacttcaccctgacaatatccagcctccagcctgaggacttcgccacctactactgcttccaaggcacccactttccatacaccttcggccagggcaccaaggtggaaatcaaaagactcgagatccagaaccctgatcctgccgtgtaccagctgcgggatagcaagagcagcgacaagagcgtgtgtctgttcaccgacttcgacagccagaccaacgtgtcccagagcaaggactccgacgtgtacatcaccgataagtgcgtgctggacatgcggagcatggacttcaagagcaactccgccgtggcctggtccaacaagtccgatttcgcctgcgccaacgccttcaacaacagcattatccccgaggacacattcttcccaagccccgagagcagctgcgacgtgaagctggtggaaaagagcttcgagacagacaccaacctgaacttccagatcctgtacgagatcctgctgggcaaggccaccctgtacgccgtgctggtgtctgccctggtgctgatggctatggtcaagcggaaggacagccggggacgcgccaagagaagcggatctggcgtgaagcagaccctgaatttcgacctgctgaagctggctggcgacgtggaatccaacccaggccctactagtatggactggatttggcgcatccttttccttgtcggcgctgctaccggcgcgcattccgggccccagctccagctgcaagagtctggacctggcctggtcaagcctagcgagacactgagcctgacctgtaccgtgtccggcgatagcatcagcagcggcgattactactggggctggatcagacagcctcctggcaaaggactggaatggatcggccacatctactacagcggcgtgacctactacaaccccagcctgaagtccagagtgaccatcagcgtggacaccagccggaaccagttctccctgaagctgtctagcgtgacagccgccgataccgccgtgtactactgcaccagagaggacagcagcaactggcggagtagaggccagggaacactggtcacagttagctctggatccggcggaggcggaagtggaggcggaggatctggcggcggaggctctttcgaagaagtgcagctggttgaatcaggcggaggactggttcagcctggcggatctctgagactgtcttgtgccgccagcggctacaccttcaccaactactggatgaactgggtccgacaggcccctggcaaaggactggaatgggtcggaatgatcgaccccagcgacagcgagacacactacaaccacatcttcaaggaccgcttcaccatcagcgccgacaccagcaagaataccgcctacctccagatgaactccctgagagccgaggacaccgccgtgtactactgcgccagaaacctgtatctgtggggccagggaaccctggtcacagtgtcatctacgcgtgaggacctgaagaacgtgttcccacctgaggtggccgtgttcgagcctagcgaggccgagatcagccacacccagaaagccaccctcgtgtgcctggctaccggcttctaccccgaccatgtggaactgtcttggtgggtcaacggcaaagaggtgcacagcggcgtgtgtaccgacccccagccactgaaagaacagcccgccctgaacgacagccggtactgcctgagcagcagactgagagtgtccgccaccttctggcagaacccccggaaccacttcagatgccaggtgcagttctacggcctgagcgagaacgacgagtggacccaggacagagccaagcccgtgacccagatcgtgtctgccgaagcctggggcagagccgattgcggctttaccagcgagagctaccagcagggcgtgctgagcgccaccaacctgagcgtgatcggcttcagaatcctgctgctgaaagtggccggctttaacctgctgatgaccctgcggctgtggtccagc

SEQ ID NO: 37248 - DNA, 2169 bp, synthetic construct
  source 1..2169: mol_type = other DNA
atggccttaccagtgaccgccttgctcctgccgctggccttgctgctccacgccgccaggccggacatccagatgacacagagccctagcagcctgtctgccagcgtgggagacagagtgaccatcacatgcaagagcagccagagcctgctggactccgatggcaagacctacctgaactggtatcagcagaagcccggcaaggcccctaagctgctgatctacctggtgtccaagctggatagcggcgtgcccagcagattttctggcagcggcagcggaaccgacttcaccctgacaatatccagcctccagcctgaggacttcgccacctactactgcttccaaggcacccactttccatacaccttcggccagggcaccaaggtggaaatcaaaagactcgaggacctgaagaacgtgttcccacctgaggtggccgtgttcgagcctagcgaggccgagatcagccacacccagaaagccaccctcgtgtgcctggctaccggcttctaccccgaccatgtggaactgtcttggtgggtcaacggcaaagaggtgcacagcggcgtgtgtaccgacccccagccactgaaagaacagcccgccctgaacgacagccggtactgcctgagcagcagactgagagtgtccgccaccttctggcagaacccccggaaccacttcagatgccaggtgcagttctacggcctgagcgagaacgacgagtggacccaggacagagccaagcccgtgacccagatcgtgtctgccgaagcctggggcagagccgatgatgtgattaagatccactggcaggaaaagaagtccaacaccatcctgggcagccaggaaggcaacaccatgaagaccaacgacacctacatgaagttcagctggctgaccgtgcccgagaagtccctggacaaagaacacagatgcatcgtgcggcacgaaaacaacaagaacggcgtggaccaggaaatcatcttcccacccatcaagaccgatgtgattacaatggaccccaaggacaactgctccaaggacgccaacgataccctgctgctccagctgaccaacaccagcgcctactacatgtacttgttgctgctgctgaagtccgtggtgtacttcgccatcatcacatgctgcctgctgatggctatggtcaagcggaaggacagccggggaagggccaagcgatctggatctggagcaacaaacttctcactactcaaacaagcaggtgacgtggaggagaatcccgggcctactagtatggactggatttggcgcatccttttccttgtcggcgctgctaccggcgcgcattccttcgaagaagtgcagctggttgaatcaggcggaggactggttcagcctggcggatctctgagactgtcttgtgccgccagcggctacaccttcaccaactactggatgaactgggtccgacaggcccctggcaaaggactggaatgggtcggaatgatcgaccccagcgacagcgagacacactacaaccacatcttcaaggaccgcttcaccatcagcgccgacaccagcaagaataccgcctacctccagatgaactccctgagagccgaggacaccgccgtgtactactgcgccagaaacctgtatctgtggggccagggaaccctggtcacagtgtcatctacgcgtatccagaaccctgatcctgccgtgtaccagctgcgggatagcaagagcagcgacaagagcgtgtgtctgttcaccgacttcgacagccagaccaacgtgtcccagagcaaggactccgacgtgtacatcaccgataagtgcgtgctggacatgcggagcatggacttcaagagcaactccgccgtggcctggtccaacaagtccgatttcgcctgcgccaacgccttcaacaacagcattatccccgaggacacattcttcccaagccccgagagcagcgactccaccgaccacgtgaagcccaaagagacagagaacaccaagcagcccagcaagagctgccacaagcccaaggccatcgtgcacaccgagaaagtgaacatgatgagcctgaccgtgctgggcctgcggatgctgttcgccaaaaccgtggccgtgaacttcctgctgaccgccaagctgttcttcctcctcaccgcc

SEQ ID NO: 37249 - DNA, 2181 bp, synthetic construct
  source 1..2181: mol_type = other DNA
atggccttaccagtgaccgccttgctcctgccgctggccttgctgctccacgccgccaggccggacatccagatgacacagagccctagcagcctgtctgccagcgtgggagacagagtgaccatcacatgcaagagcagccagagcctgctggactccgatggcaagacctacctgaactggtatcagcagaagcccggcaaggcccctaagctgctgatctacctggtgtccaagctggatagcggcgtgcccagcagattttctggcagcggcagcggaaccgacttcaccctgacaatatccagcctccagcctgaggacttcgccacctactactgcttccaaggcacccactttccatacaccttcggccagggcaccaaggtggaaatcaaaagactcgagatccagaaccctgatcctgccgtgtaccagctgcgggatagcaagagcagcgacaagagcgtgtgtctgttcaccgacttcgacagccagaccaacgtgtcccagagcaaggactccgacgtgtacatcaccgataagtgcgtgctggacatgcggagcatggacttcaagagcaactccgccgtggcctggtccaacaagtccgatttcgcctgcgccaacgccttcaacaacagcattatccccgaggacacattcttcccaagccccgagagcagcgactccaccgaccacgtgaagcccaaagagacagagaacaccaagcagcccagcaagagctgccacaagcccaaggccatcgtgcacaccgagaaagtgaacatgatgagcctgaccgtgctgggcctgcggatgctgttcgccaaaaccgtggccgtgaacttcctgctgaccgccaagctgttcttcctcctcaccgcccgcgccaagagaagcggatctggcgtgaagcagaccctgaatttcgacctgctgaagctggctggcgacgtggaatccaacccaggccctactagtatggactggatttggcgcatccttttccttgtcggcgctgctaccggcgcgcattccttcgaagaagtgcagctggttgaatcaggcggaggactggttcagcctggcggatctctgagactgtcttgtgccgccagcggctacaccttcaccaactactggatgaactgggtccgacaggcccctggcaaaggactggaatgggtcggaatgatcgaccccagcgacagcgagacacactacaaccacatcttcaaggaccgcttcaccatcagcgccgacaccagcaagaataccgcctacctccagatgaactccctgagagccgaggacaccgccgtgtactactgcgccagaaacctgtatctgtggggccagggaaccctggtcacagtgtcatctacgcgtgaggacctgaagaacgtgttcccacctgaggtggccgtgttcgagcctagcgaggccgagatcagccacacccagaaagccaccctcgtgtgcctggctaccggcttctaccccgaccatgtggaactgtcttggtgggtcaacggcaaagaggtgcacagcggcgtgtgtaccgacccccagccactgaaagaacagcccgccctgaacgacagccggtactgcctgagcagcagactgagagtgtccgccaccttctggcagaacccccggaaccacttcagatgccaggtgcagttctacggcctgagcgagaacgacgagtggacccaggacagagccaagcccgtgacccagatcgtgtctgccgaagcctggggcagagccgatgatgtgattaagatccactggcaggaaaagaagtccaacaccatcctgggcagccaggaaggcaacaccatgaagaccaacgacacctacatgaagttcagctggctgaccgtgcccgagaagtccctggacaaagaacacagatgcatcgtgcggcacgaaaacaacaagaacggcgtggaccaggaaatcatcttcccacccatcaagaccgatgtgattacaatggaccccaaggacaactgctccaaggacgccaacgataccctgctgctccagctgaccaacaccagcgcctactacatgtacttgttgctgctgctgaagtccgtggtgtacttcgccatcatcacatgctgcctgctgatggctatggtcaagcggaaggacagccgggga

SEQ ID NO: 37250 - DNA, 2574 bp, synthetic construct
  source 1..2574: mol_type = other DNA
atggccttaccagtgaccgccttgctcctgccgctggccttgctgctccacgccgccaggccggaagtgcagctggttgaatctggcggaggactggttcagcctggcggatctctgagactgtcttgtgccgccagcggcttcagcttcagcgacttttggatgagctgggtccgacaggcccctggcaaaggacttgaatgggtcgccacaatcagccaggccggcagcgagaaggactacgtggactctgtgaagggcagattcaccatcagccgggacaacgccaagaagtccctgtacctccagatgaacagcctgagagccgaggacaccgccgtgtactattgtgcctctggcgtgtacagcttcgactacagaggccagggcaccctggtcacagtctcttctggtaccggcggaggcggatctggcggcggaggtagcggtggcggaggatctgaattcgacatccagatgacacagagccctagcagcctgtctgccagcgtgggagacagagtgaccatcacatgcaagagcagccagagcctgctggactccgatggcaagacctacctgaactggtatcagcagaagcccggcaaggcccctaagctgctgatctacctggtgtccaagctggatagcggcgtgcccagcagattttctggcagcggcagcggaaccgacttcaccctgacaatatccagcctccagcctgaggacttcgccacctactactgcttccaaggcacccactttccatacaccttcggccagggcaccaaggtggaaatcaaaagactcgaggacctgaagaacgtgttcccacctgaggtggccgtgttcgagcctagcgaggccgagatcagccacacccagaaagccaccctcgtgtgcctggctaccggcttctaccccgaccatgtggaactgtcttggtgggtcaacggcaaagaggtgcacagcggcgtgtgtaccgacccccagccactgaaagaacagcccgccctgaacgacagccggtactgcctgagcagcagactgagagtgtccgccaccttctggcagaacccccggaaccacttcagatgccaggtgcagttctacggcctgagcgagaacgacgagtggacccaggacagagccaagcccgtgacccagatcgtgtctgccgaagcctggggcagagccgatgatgtgattaagatccactggcaggaaaagaagtccaacaccatcctgggcagccaggaaggcaacaccatgaagaccaacgacacctacatgaagttcagctggctgaccgtgcccgagaagtccctggacaaagaacacagatgcatcgtgcggcacgaaaacaacaagaacggcgtggaccaggaaatcatcttcccacccatcaagaccgatgtgattacaatggaccccaaggacaactgctccaaggacgccaacgataccctgctgctccagctgaccaacaccagcgcctactacatgtacttgttgctgctgctgaagtccgtggtgtacttcgccatcatcacatgctgcctgctgatggctatggtcaagcggaaggacagccggggaagggccaagcgatctggatctggagcaacaaacttctcactactcaaacaagcaggtgacgtggaggagaatcccgggcctactagtatggactggatttggcgcatccttttccttgtcggcgctgctaccggcgcgcattccttcgaagaagtgcagctggttgaatcaggcggaggactggttcagcctggcggatctctgagactgtcttgtgccgccagcggctacaccttcaccaactactggatgaactgggtccgacaggcccctggcaaaggactggaatgggtcggaatgatcgaccccagcgacagcgagacacactacaaccacatcttcaaggaccgcttcaccatcagcgccgacaccagcaagaataccgcctacctccagatgaactccctgagagccgaggacaccgccgtgtactactgcgccagaaacctgtatctgtggggccagggaaccctggtcacagtgtcatctacgcgtatccagaaccctgatcctgccgtgtaccagctgcgggatagcaagagcagcgacaagagcgtgtgtctgttcaccgacttcgacagccagaccaacgtgtcccagagcaaggactccgacgtgtacatcaccgataagtgcgtgctggacatgcggagcatggacttcaagagcaactccgccgtggcctggtccaacaagtccgatttcgcctgcgccaacgccttcaacaacagcattatccccgaggacacattcttcccaagccccgagagcagcgactccaccgaccacgtgaagcccaaagagacagagaacaccaagcagcccagcaagagctgccacaagcccaaggccatcgtgcacaccgagaaagtgaacatgatgagcctgaccgtgctgggcctgcggatgctgttcgccaaaaccgtggccgtgaacttcctgctgaccgccaagctgttcttcctcctcaccgcc

SEQ ID NO: 37251 - DNA, 2586 bp, synthetic construct
  source 1..2586: mol_type = other DNA
atggccttaccagtgaccgccttgctcctgccgctggccttgctgctccacgccgccaggccggaagtgcagctggttgaatctggcggaggactggttcagcctggcggatctctgagactgtcttgtgccgccagcggcttcagcttcagcgacttttggatgagctgggtccgacaggcccctggcaaaggacttgaatgggtcgccacaatcagccaggccggcagcgagaaggactacgtggactctgtgaagggcagattcaccatcagccgggacaacgccaagaagtccctgtacctccagatgaacagcctgagagccgaggacaccgccgtgtactattgtgcctctggcgtgtacagcttcgactacagaggccagggcaccctggtcacagtctcttctggtaccggcggaggcggatctggcggcggaggtagcggtggcggaggatctgaattcgacatccagatgacacagagccctagcagcctgtctgccagcgtgggagacagagtgaccatcacatgcaagagcagccagagcctgctggactccgatggcaagacctacctgaactggtatcagcagaagcccggcaaggcccctaagctgctgatctacctggtgtccaagctggatagcggcgtgcccagcagattttctggcagcggcagcggaaccgacttcaccctgacaatatccagcctccagcctgaggacttcgccacctactactgcttccaaggcacccactttccatacaccttcggccagggcaccaaggtggaaatcaaaagactcgagatccagaaccctgatcctgccgtgtaccagctgcgggatagcaagagcagcgacaagagcgtgtgtctgttcaccgacttcgacagccagaccaacgtgtcccagagcaaggactccgacgtgtacatcaccgataagtgcgtgctggacatgcggagcatggacttcaagagcaactccgccgtggcctggtccaacaagtccgatttcgcctgcgccaacgccttcaacaacagcattatccccgaggacacattcttcccaagccccgagagcagcgactccaccgaccacgtgaagcccaaagagacagagaacaccaagcagcccagcaagagctgccacaagcccaaggccatcgtgcacaccgagaaagtgaacatgatgagcctgaccgtgctgggcctgcggatgctgttcgccaaaaccgtggccgtgaacttcctgctgaccgccaagctgttcttcctcctcaccgcccgcgccaagagaagcggatctggcgtgaagcagaccctgaatttcgacctgctgaagctggctggcgacgtggaatccaacccaggccctactagtatggactggatttggcgcatccttttccttgtcggcgctgctaccggcgcgcattccttcgaagaagtgcagctggttgaatcaggcggaggactggttcagcctggcggatctctgagactgtcttgtgccgccagcggctacaccttcaccaactactggatgaactgggtccgacaggcccctggcaaaggactggaatgggtcggaatgatcgaccccagcgacagcgagacacactacaaccacatcttcaaggaccgcttcaccatcagcgccgacaccagcaagaataccgcctacctccagatgaactccctgagagccgaggacaccgccgtgtactactgcgccagaaacctgtatctgtggggccagggaaccctggtcacagtgtcatctacgcgtgaggacctgaagaacgtgttcccacctgaggtggccgtgttcgagcctagcgaggccgagatcagccacacccagaaagccaccctcgtgtgcctggctaccggcttctaccccgaccatgtggaactgtcttggtgggtcaacggcaaagaggtgcacagcggcgtgtgtaccgacccccagccactgaaagaacagcccgccctgaacgacagccggtactgcctgagcagcagactgagagtgtccgccaccttctggcagaacccccggaaccacttcagatgccaggtgcagttctacggcctgagcgagaacgacgagtggacccaggacagagccaagcccgtgacccagatcgtgtctgccgaagcctggggcagagccgatgatgtgattaagatccactggcaggaaaagaagtccaacaccatcctgggcagccaggaaggcaacaccatgaagaccaacgacacctacatgaagttcagctggctgaccgtgcccgagaagtccctggacaaagaacacagatgcatcgtgcggcacgaaaacaacaagaacggcgtggaccaggaaatcatcttcccacccatcaagaccgatgtgattacaatggaccccaaggacaactgctccaaggacgccaacgataccctgctgctccagctgaccaacaccagcgcctactacatgtacttgttgctgctgctgaagtccgtggtgtacttcgccatcatcacatgctgcctgctgatggctatggtcaagcggaaggacagccgggga

SEQ ID NO: 37252 - DNA, 2985 bp, synthetic construct
  source 1..2985: mol_type = other DNA
atggccttaccagtgaccgccttgctcctgccgctggccttgctgctccacgccgccaggccggaagtgcagctggttgaatctggcggaggactggttcagcctggcggatctctgagactgtcttgtgccgccagcggcttcagcttcagcgacttttggatgagctgggtccgacaggcccctggcaaaggacttgaatgggtcgccacaatcagccaggccggcagcgagaaggactacgtggactctgtgaagggcagattcaccatcagccgggacaacgccaagaagtccctgtacctccagatgaacagcctgagagccgaggacaccgccgtgtactattgtgcctctggcgtgtacagcttcgactacagaggccagggcaccctggtcacagtctcttctggtaccggcggaggcggatctggcggcggaggtagcggtggcggaggatctgaattcgacatccagatgacacagagccctagcagcctgtctgccagcgtgggagacagagtgaccatcacatgcaagagcagccagagcctgctggactccgatggcaagacctacctgaactggtatcagcagaagcccggcaaggcccctaagctgctgatctacctggtgtccaagctggatagcggcgtgcccagcagattttctggcagcggcagcggaaccgacttcaccctgacaatatccagcctccagcctgaggacttcgccacctactactgcttccaaggcacccactttccatacaccttcggccagggcaccaaggtggaaatcaaaagactcgaggacctgaagaacgtgttcccacctgaggtggccgtgttcgagcctagcgaggccgagatcagccacacccagaaagccaccctcgtgtgcctggctaccggcttctaccccgaccatgtggaactgtcttggtgggtcaacggcaaagaggtgcacagcggcgtgtgtaccgacccccagccactgaaagaacagcccgccctgaacgacagccggtactgcctgagcagcagactgagagtgtccgccaccttctggcagaacccccggaaccacttcagatgccaggtgcagttctacggcctgagcgagaacgacgagtggacccaggacagagccaagcccgtgacccagatcgtgtctgccgaagcctggggcagagccgatgatgtgattaagatccactggcaggaaaagaagtccaacaccatcctgggcagccaggaaggcaacaccatgaagaccaacgacacctacatgaagttcagctggctgaccgtgcccgagaagtccctggacaaagaacacagatgcatcgtgcggcacgaaaacaacaagaacggcgtggaccaggaaatcatcttcccacccatcaagaccgatgtgattacaatggaccccaaggacaactgctccaaggacgccaacgataccctgctgctccagctgaccaacaccagcgcctactacatgtacttgttgctgctgctgaagtccgtggtgtacttcgccatcatcacatgctgcctgctgatggctatggtcaagcggaaggacagccggggaagggccaagcgatctggatctggagcaacaaacttctcactactcaaacaagcaggtgacgtggaggagaatcccgggcctactagtatggactggatttggcgcatccttttccttgtcggcgctgctaccggcgcgcattccgggccccagctccagctgcaagagtctggacctggcctggtcaagcctagcgagacactgagcctgacctgtaccgtgtccggcgatagcatcagcagcggcgattactactggggctggatcagacagcctcctggcaaaggactggaatggatcggccacatctactacagcggcgtgacctactacaaccccagcctgaagtccagagtgaccatcagcgtggacaccagccggaaccagttctccctgaagctgtctagcgtgacagccgccgataccgccgtgtactactgcaccagagaggacagcagcaactggcggagtagaggccagggaacactggtcacagttagctctggatccggcggaggcggaagtggaggcggaggatctggcggcggaggctctttcgaagaagtgcagctggttgaatcaggcggaggactggttcagcctggcggatctctgagactgtcttgtgccgccagcggctacaccttcaccaactactggatgaactgggtccgacaggcccctggcaaaggactggaatgggtcggaatgatcgaccccagcgacagcgagacacactacaaccacatcttcaaggaccgcttcaccatcagcgccgacaccagcaagaataccgcctacctccagatgaactccctgagagccgaggacaccgccgtgtactactgcgccagaaacctgtatctgtggggccagggaaccctggtcacagtgtcatctacgcgtatccagaaccctgatcctgccgtgtaccagctgcgggatagcaagagcagcgacaagagcgtgtgtctgttcaccgacttcgacagccagaccaacgtgtcccagagcaaggactccgacgtgtacatcaccgataagtgcgtgctggacatgcggagcatggacttcaagagcaactccgccgtggcctggtccaacaagtccgatttcgcctgcgccaacgccttcaacaacagcattatccccgaggacacattcttcccaagccccgagagcagcgactccaccgaccacgtgaagcccaaagagacagagaacaccaagcagcccagcaagagctgccacaagcccaaggccatcgtgcacaccgagaaagtgaacatgatgagcctgaccgtgctgggcctgcggatgctgttcgccaaaaccgtggccgtgaacttcctgctgaccgccaagctgttcttcctcctcaccgcc

SEQ ID NO: 37253 - DNA, 2997 bp, synthetic construct
  source 1..2997: mol_type = other DNA
atggccttaccagtgaccgccttgctcctgccgctggccttgctgctccacgccgccaggccggaagtgcagctggttgaatctggcggaggactggttcagcctggcggatctctgagactgtcttgtgccgccagcggcttcagcttcagcgacttttggatgagctgggtccgacaggcccctggcaaaggacttgaatgggtcgccacaatcagccaggccggcagcgagaaggactacgtggactctgtgaagggcagattcaccatcagccgggacaacgccaagaagtccctgtacctccagatgaacagcctgagagccgaggacaccgccgtgtactattgtgcctctggcgtgtacagcttcgactacagaggccagggcaccctggtcacagtctcttctggtaccggcggaggcggatctggcggcggaggtagcggtggcggaggatctgaattcgacatccagatgacacagagccctagcagcctgtctgccagcgtgggagacagagtgaccatcacatgcaagagcagccagagcctgctggactccgatggcaagacctacctgaactggtatcagcagaagcccggcaaggcccctaagctgctgatctacctggtgtccaagctggatagcggcgtgcccagcagattttctggcagcggcagcggaaccgacttcaccctgacaatatccagcctccagcctgaggacttcgccacctactactgcttccaaggcacccactttccatacaccttcggccagggcaccaaggtggaaatcaaaagactcgagatccagaaccctgatcctgccgtgtaccagctgcgggatagcaagagcagcgacaagagcgtgtgtctgttcaccgacttcgacagccagaccaacgtgtcccagagcaaggactccgacgtgtacatcaccgataagtgcgtgctggacatgcggagcatggacttcaagagcaactccgccgtggcctggtccaacaagtccgatttcgcctgcgccaacgccttcaacaacagcattatccccgaggacacattcttcccaagccccgagagcagcgactccaccgaccacgtgaagcccaaagagacagagaacaccaagcagcccagcaagagctgccacaagcccaaggccatcgtgcacaccgagaaagtgaacatgatgagcctgaccgtgctgggcctgcggatgctgttcgccaaaaccgtggccgtgaacttcctgctgaccgccaagctgttcttcctcctcaccgcccgcgccaagagaagcggatctggcgtgaagcagaccctgaatttcgacctgctgaagctggctggcgacgtggaatccaacccaggccctactagtatggactggatttggcgcatccttttccttgtcggcgctgctaccggcgcgcattccgggccccagctccagctgcaagagtctggacctggcctggtcaagcctagcgagacactgagcctgacctgtaccgtgtccggcgatagcatcagcagcggcgattactactggggctggatcagacagcctcctggcaaaggactggaatggatcggccacatctactacagcggcgtgacctactacaaccccagcctgaagtccagagtgaccatcagcgtggacaccagccggaaccagttctccctgaagctgtctagcgtgacagccgccgataccgccgtgtactactgcaccagagaggacagcagcaactggcggagtagaggccagggaacactggtcacagttagctctggatccggcggaggcggaagtggaggcggaggatctggcggcggaggctctttcgaagaagtgcagctggttgaatcaggcggaggactggttcagcctggcggatctctgagactgtcttgtgccgccagcggctacaccttcaccaactactggatgaactgggtccgacaggcccctggcaaaggactggaatgggtcggaatgatcgaccccagcgacagcgagacacactacaaccacatcttcaaggaccgcttcaccatcagcgccgacaccagcaagaataccgcctacctccagatgaactccctgagagccgaggacaccgccgtgtactactgcgccagaaacctgtatctgtggggccagggaaccctggtcacagtgtcatctacgcgtgaggacctgaagaacgtgttcccacctgaggtggccgtgttcgagcctagcgaggccgagatcagccacacccagaaagccaccctcgtgtgcctggctaccggcttctaccccgaccatgtggaactgtcttggtgggtcaacggcaaagaggtgcacagcggcgtgtgtaccgacccccagccactgaaagaacagcccgccctgaacgacagccggtactgcctgagcagcagactgagagtgtccgccaccttctggcagaacccccggaaccacttcagatgccaggtgcagttctacggcctgagcgagaacgacgagtggacccaggacagagccaagcccgtgacccagatcgtgtctgccgaagcctggggcagagccgatgatgtgattaagatccactggcaggaaaagaagtccaacaccatcctgggcagccaggaaggcaacaccatgaagaccaacgacacctacatgaagttcagctggctgaccgtgcccgagaagtccctggacaaagaacacagatgcatcgtgcggcacgaaaacaacaagaacggcgtggaccaggaaatcatcttcccacccatcaagaccgatgtgattacaatggaccccaaggacaactgctccaaggacgccaacgataccctgctgctccagctgaccaacaccagcgcctactacatgtacttgttgctgctgctgaagtccgtggtgtacttcgccatcatcacatgctgcctgctgatggctatggtcaagcggaaggacagccgggga

SEQ ID NO: 37254 - DNA, 2163 bp, synthetic construct
  source 1..2163: mol_type = other DNA
atggccttaccagtgaccgccttgctcctgccgctggccttgctgctccacgccgccaggccggacatccagatgacacagagccctagcagcctgtctgccagcgtgggagacagagtgaccatcacatgcaagagcagccagagcctgctggactccgatggcaagacctacctgaactggtatcagcagaagcccggcaaggcccctaagctgctgatctacctggtgtccaagctggatagcggcgtgcccagcagattttctggcagcggcagcggaaccgacttcaccctgacaatatccagcctccagcctgaggacttcgccacctactactgcttccaaggcacccactttccatacaccttcggccagggcaccaaggtggaaatcaaaagactcgaggacctgaagaacgtgttcccacctgaggtggccgtgttcgagcctagcgaggccgagatcagccacacccagaaagccaccctcgtgtgcctggctaccggcttctaccccgaccatgtggaactgtcttggtgggtcaacggcaaagaggtgcacagcggcgtgtgtaccgacccccagccactgaaagaacagcccgccctgaacgacagccggtactgcctgagcagcagactgagagtgtccgccaccttctggcagaacccccggaaccacttcagatgccaggtgcagttctacggcctgagcgagaacgacgagtggacccaggacagagccaagcccgtgacccagatcgtgtctgccgaagcctggggcagagccgatgatgtgattaagatccactggcaggaaaagaagtccaacaccatcctgggcagccaggaaggcaacaccatgaagaccaacgacacctacatgaagttcagctggctgaccgtgcccgagaagtccctggacaaagaacacagatgcatcgtgcggcacgaaaacaacaagaacggcgtggaccaggaaatcatcttcccacccatcaagaccgatgtgattacaatggaccccaaggacaactgctccaaggacgccaacgataccctgctgctccagctgaccaacaccagcgcctactacatgtacttgttgctgctgctgaagtccgtggtgtacttcgccatcatcacatgctgcctgctgcggagaaccgccttctgctgcaacggcgagaagtctagggccaagcgatctggatctggagcaacaaacttctcactactcaaacaagcaggtgacgtggaggagaatcccgggcctactagtatggactggatttggcgcatccttttccttgtcggcgctgctaccggcgcgcattccttcgaagaagtgcagctggttgaatcaggcggaggactggttcagcctggcggatctctgagactgtcttgtgccgccagcggctacaccttcaccaactactggatgaactgggtccgacaggcccctggcaaaggactggaatgggtcggaatgatcgaccccagcgacagcgagacacactacaaccacatcttcaaggaccgcttcaccatcagcgccgacaccagcaagaataccgcctacctccagatgaactccctgagagccgaggacaccgccgtgtactactgcgccagaaacctgtatctgtggggccagggaaccctggtcacagtgtcatctacgcgtatccagaaccctgatcctgccgtgtaccagctgcgggatagcaagagcagcgacaagagcgtgtgtctgttcaccgacttcgacagccagaccaacgtgtcccagagcaaggactccgacgtgtacatcaccgataagtgcgtgctggacatgcggagcatggacttcaagagcaactccgccgtggcctggtccaacaagtccgatttcgcctgcgccaacgccttcaacaacagcattatccccgaggacacattcttcccaagccccgagagcagcgactccaccgaccacgtgaagcccaaagagacagagaacaccaagcagcccagcaagagctgccacaagcccaaggccatcgtgcacaccgagaaagtgaacatgatgagcctgaccgtgctgggcctgcggatgctgttcgccaaaaccgtggccgtgaacttcctgctgaccgccaagctgttcttcctc

SEQ ID NO: 37255 - DNA, 2175 bp, synthetic construct
  source 1..2175: mol_type = other DNA
atggccttaccagtgaccgccttgctcctgccgctggccttgctgctccacgccgccaggccggacatccagatgacacagagccctagcagcctgtctgccagcgtgggagacagagtgaccatcacatgcaagagcagccagagcctgctggactccgatggcaagacctacctgaactggtatcagcagaagcccggcaaggcccctaagctgctgatctacctggtgtccaagctggatagcggcgtgcccagcagattttctggcagcggcagcggaaccgacttcaccctgacaatatccagcctccagcctgaggacttcgccacctactactgcttccaaggcacccactttccatacaccttcggccagggcaccaaggtggaaatcaaaagactcgagatccagaaccctgatcctgccgtgtaccagctgcgggatagcaagagcagcgacaagagcgtgtgtctgttcaccgacttcgacagccagaccaacgtgtcccagagcaaggactccgacgtgtacatcaccgataagtgcgtgctggacatgcggagcatggacttcaagagcaactccgccgtggcctggtccaacaagtccgatttcgcctgcgccaacgccttcaacaacagcattatccccgaggacacattcttcccaagccccgagagcagcgactccaccgaccacgtgaagcccaaagagacagagaacaccaagcagcccagcaagagctgccacaagcccaaggccatcgtgcacaccgagaaagtgaacatgatgagcctgaccgtgctgggcctgcggatgctgttcgccaaaaccgtggccgtgaacttcctgctgaccgccaagctgttcttcctccgcgccaagagaagcggatctggcgtgaagcagaccctgaatttcgacctgctgaagctggctggcgacgtggaatccaacccaggccctactagtatggactggatttggcgcatccttttccttgtcggcgctgctaccggcgcgcattccttcgaagaagtgcagctggttgaatcaggcggaggactggttcagcctggcggatctctgagactgtcttgtgccgccagcggctacaccttcaccaactactggatgaactgggtccgacaggcccctggcaaaggactggaatgggtcggaatgatcgaccccagcgacagcgagacacactacaaccacatcttcaaggaccgcttcaccatcagcgccgacaccagcaagaataccgcctacctccagatgaactccctgagagccgaggacaccgccgtgtactactgcgccagaaacctgtatctgtggggccagggaaccctggtcacagtgtcatctacgcgtgaggacctgaagaacgtgttcccacctgaggtggccgtgttcgagcctagcgaggccgagatcagccacacccagaaagccaccctcgtgtgcctggctaccggcttctaccccgaccatgtggaactgtcttggtgggtcaacggcaaagaggtgcacagcggcgtgtgtaccgacccccagccactgaaagaacagcccgccctgaacgacagccggtactgcctgagcagcagactgagagtgtccgccaccttctggcagaacccccggaaccacttcagatgccaggtgcagttctacggcctgagcgagaacgacgagtggacccaggacagagccaagcccgtgacccagatcgtgtctgccgaagcctggggcagagccgatgatgtgattaagatccactggcaggaaaagaagtccaacaccatcctgggcagccaggaaggcaacaccatgaagaccaacgacacctacatgaagttcagctggctgaccgtgcccgagaagtccctggacaaagaacacagatgcatcgtgcggcacgaaaacaacaagaacggcgtggaccaggaaatcatcttcccacccatcaagaccgatgtgattacaatggaccccaaggacaactgctccaaggacgccaacgataccctgctgctccagctgaccaacaccagcgcctactacatgtacttgttgctgctgctgaagtccgtggtgtacttcgccatcatcacatgctgcctgctgcggagaaccgccttctgctgcaacggcgagaagtct

SEQ ID NO: 37256 - DNA, 2568 bp, synthetic construct
  source 1..2568: mol_type = other DNA
atggccttaccagtgaccgccttgctcctgccgctggccttgctgctccacgccgccaggccggaagtgcagctggttgaatctggcggaggactggttcagcctggcggatctctgagactgtcttgtgccgccagcggcttcagcttcagcgacttttggatgagctgggtccgacaggcccctggcaaaggacttgaatgggtcgccacaatcagccaggccggcagcgagaaggactacgtggactctgtgaagggcagattcaccatcagccgggacaacgccaagaagtccctgtacctccagatgaacagcctgagagccgaggacaccgccgtgtactattgtgcctctggcgtgtacagcttcgactacagaggccagggcaccctggtcacagtctcttctggtaccggcggaggcggatctggcggcggaggtagcggtggcggaggatctgaattcgacatccagatgacacagagccctagcagcctgtctgccagcgtgggagacagagtgaccatcacatgcaagagcagccagagcctgctggactccgatggcaagacctacctgaactggtatcagcagaagcccggcaaggcccctaagctgctgatctacctggtgtccaagctggatagcggcgtgcccagcagattttctggcagcggcagcggaaccgacttcaccctgacaatatccagcctccagcctgaggacttcgccacctactactgcttccaaggcacccactttccatacaccttcggccagggcaccaaggtggaaatcaaaagactcgaggacctgaagaacgtgttcccacctgaggtggccgtgttcgagcctagcgaggccgagatcagccacacccagaaagccaccctcgtgtgcctggctaccggcttctaccccgaccatgtggaactgtcttggtgggtcaacggcaaagaggtgcacagcggcgtgtgtaccgacccccagccactgaaagaacagcccgccctgaacgacagccggtactgcctgagcagcagactgagagtgtccgccaccttctggcagaacccccggaaccacttcagatgccaggtgcagttctacggcctgagcgagaacgacgagtggacccaggacagagccaagcccgtgacccagatcgtgtctgccgaagcctggggcagagccgatgatgtgattaagatccactggcaggaaaagaagtccaacaccatcctgggcagccaggaaggcaacaccatgaagaccaacgacacctacatgaagttcagctggctgaccgtgcccgagaagtccctggacaaagaacacagatgcatcgtgcggcacgaaaacaacaagaacggcgtggaccaggaaatcatcttcccacccatcaagaccgatgtgattacaatggaccccaaggacaactgctccaaggacgccaacgataccctgctgctccagctgaccaacaccagcgcctactacatgtacttgttgctgctgctgaagtccgtggtgtacttcgccatcatcacatgctgcctgctgcggagaaccgccttctgctgcaacggcgagaagtctagggccaagcgatctggatctggagcaacaaacttctcactactcaaacaagcaggtgacgtggaggagaatcccgggcctactagtatggactggatttggcgcatccttttccttgtcggcgctgctaccggcgcgcattccttcgaagaagtgcagctggttgaatcaggcggaggactggttcagcctggcggatctctgagactgtcttgtgccgccagcggctacaccttcaccaactactggatgaactgggtccgacaggcccctggcaaaggactggaatgggtcggaatgatcgaccccagcgacagcgagacacactacaaccacatcttcaaggaccgcttcaccatcagcgccgacaccagcaagaataccgcctacctccagatgaactccctgagagccgaggacaccgccgtgtactactgcgccagaaacctgtatctgtggggccagggaaccctggtcacagtgtcatctacgcgtatccagaaccctgatcctgccgtgtaccagctgcgggatagcaagagcagcgacaagagcgtgtgtctgttcaccgacttcgacagccagaccaacgtgtcccagagcaaggactccgacgtgtacatcaccgataagtgcgtgctggacatgcggagcatggacttcaagagcaactccgccgtggcctggtccaacaagtccgatttcgcctgcgccaacgccttcaacaacagcattatccccgaggacacattcttcccaagccccgagagcagcgactccaccgaccacgtgaagcccaaagagacagagaacaccaagcagcccagcaagagctgccacaagcccaaggccatcgtgcacaccgagaaagtgaacatgatgagcctgaccgtgctgggcctgcggatgctgttcgccaaaaccgtggccgtgaacttcctgctgaccgccaagctgttcttcctc

SEQ ID NO: 37257 - DNA, 2979 bp, synthetic construct
  source 1..2979: mol_type = other DNA
atggccttaccagtgaccgccttgctcctgccgctggccttgctgctccacgccgccaggccggaagtgcagctggttgaatctggcggaggactggttcagcctggcggatctctgagactgtcttgtgccgccagcggcttcagcttcagcgacttttggatgagctgggtccgacaggcccctggcaaaggacttgaatgggtcgccacaatcagccaggccggcagcgagaaggactacgtggactctgtgaagggcagattcaccatcagccgggacaacgccaagaagtccctgtacctccagatgaacagcctgagagccgaggacaccgccgtgtactattgtgcctctggcgtgtacagcttcgactacagaggccagggcaccctggtcacagtctcttctggtaccggcggaggcggatctggcggcggaggtagcggtggcggaggatctgaattcgacatccagatgacacagagccctagcagcctgtctgccagcgtgggagacagagtgaccatcacatgcaagagcagccagagcctgctggactccgatggcaagacctacctgaactggtatcagcagaagcccggcaaggcccctaagctgctgatctacctggtgtccaagctggatagcggcgtgcccagcagattttctggcagcggcagcggaaccgacttcaccctgacaatatccagcctccagcctgaggacttcgccacctactactgcttccaaggcacccactttccatacaccttcggccagggcaccaaggtggaaatcaaaagactcgaggacctgaagaacgtgttcccacctgaggtggccgtgttcgagcctagcgaggccgagatcagccacacccagaaagccaccctcgtgtgcctggctaccggcttctaccccgaccatgtggaactgtcttggtgggtcaacggcaaagaggtgcacagcggcgtgtgtaccgacccccagccactgaaagaacagcccgccctgaacgacagccggtactgcctgagcagcagactgagagtgtccgccaccttctggcagaacccccggaaccacttcagatgccaggtgcagttctacggcctgagcgagaacgacgagtggacccaggacagagccaagcccgtgacccagatcgtgtctgccgaagcctggggcagagccgatgatgtgattaagatccactggcaggaaaagaagtccaacaccatcctgggcagccaggaaggcaacaccatgaagaccaacgacacctacatgaagttcagctggctgaccgtgcccgagaagtccctggacaaagaacacagatgcatcgtgcggcacgaaaacaacaagaacggcgtggaccaggaaatcatcttcccacccatcaagaccgatgtgattacaatggaccccaaggacaactgctccaaggacgccaacgataccctgctgctccagctgaccaacaccagcgcctactacatgtacttgttgctgctgctgaagtccgtggtgtacttcgccatcatcacatgctgcctgctgcggagaaccgccttctgctgcaacggcgagaagtctagggccaagcgatctggatctggagcaacaaacttctcactactcaaacaagcaggtgacgtggaggagaatcccgggcctactagtatggactggatttggcgcatccttttccttgtcggcgctgctaccggcgcgcattccgggccccagctccagctgcaagagtctggacctggcctggtcaagcctagcgagacactgagcctgacctgtaccgtgtccggcgatagcatcagcagcggcgattactactggggctggatcagacagcctcctggcaaaggactggaatggatcggccacatctactacagcggcgtgacctactacaaccccagcctgaagtccagagtgaccatcagcgtggacaccagccggaaccagttctccctgaagctgtctagcgtgacagccgccgataccgccgtgtactactgcaccagagaggacagcagcaactggcggagtagaggccagggaacactggtcacagttagctctggatccggcggaggcggaagtggaggcggaggatctggcggcggaggctctttcgaagaagtgcagctggttgaatcaggcggaggactggttcagcctggcggatctctgagactgtcttgtgccgccagcggctacaccttcaccaactactggatgaactgggtccgacaggcccctggcaaaggactggaatgggtcggaatgatcgaccccagcgacagcgagacacactacaaccacatcttcaaggaccgcttcaccatcagcgccgacaccagcaagaataccgcctacctccagatgaactccctgagagccgaggacaccgccgtgtactactgcgccagaaacctgtatctgtggggccagggaaccctggtcacagtgtcatctacgcgtatccagaaccctgatcctgccgtgtaccagctgcgggatagcaagagcagcgacaagagcgtgtgtctgttcaccgacttcgacagccagaccaacgtgtcccagagcaaggactccgacgtgtacatcaccgataagtgcgtgctggacatgcggagcatggacttcaagagcaactccgccgtggcctggtccaacaagtccgatttcgcctgcgccaacgccttcaacaacagcattatccccgaggacacattcttcccaagccccgagagcagcgactccaccgaccacgtgaagcccaaagagacagagaacaccaagcagcccagcaagagctgccacaagcccaaggccatcgtgcacaccgagaaagtgaacatgatgagcctgaccgtgctgggcctgcggatgctgttcgccaaaaccgtggccgtgaacttcctgctgaccgccaagctgttcttcctc

SEQ ID NO: 37258 - DNA, 1857 bp, synthetic construct
  source 1..1857: mol_type = other DNA
atggccttaccagtgaccgccttgctcctgccgctggccttgctgctccacgccgccaggccggacatccagatgacacagagccctagcagcctgtctgccagcgtgggagacagagtgaccatcacatgcaagagcagccagagcctgctggactccgatggcaagacctacctgaactggtatcagcagaagcccggcaaggcccctaagctgctgatctacctggtgtccaagctggatagcggcgtgcccagcagattttctggcagcggcagcggaaccgacttcaccctgacaatatccagcctccagcctgaggacttcgccacctactactgcttccaaggcacccactttccatacaccttcggccagggcaccaaggtggaaatcaaaagactcgaggacctgaagaacgtgttcccacctgaggtggccgtgttcgagcctagcgaggccgagatcagccacacccagaaagccaccctcgtgtgcctggctaccggcttctaccccgaccatgtggaactgtcttggtgggtcaacggcaaagaggtgcacagcggcgtgtctaccgacccccagccactgaaagaacagcccgccctgaacgacagccggtactgcctgagcagcagactgagagtgtccgccaccttctggcagaacccccggaaccacttcagatgccaggtgcagttctacggcctgagcgagaacgacgagtggacccaggacagagccaagcccgtgacccagatcgtgtctgccgaagcctggggcagagccgattgcgacgtgaagctggtggaaaagagcttcgagacagacaccaacctgaacttccagaacctgagcgtgatcggcttcagaatcctgctgctgaaagtggccggctttaacctgctgatgaccctgcggctgtggtccagcagggccaagcgatctggatctggagcaacaaacttctcactactcaaacaagcaggtgacgtggaggagaatcccgggcctactagtatggactggatttggcgcatccttttccttgtcggcgctgctaccggcgcgcattccttcgaagaagtgcagctggttgaatcaggcggaggactggttcagcctggcggatctctgagactgtcttgtgccgccagcggctacaccttcaccaactactggatgaactgggtccgacaggcccctggcaaaggactggaatgggtcggaatgatcgaccccagcgacagcgagacacactacaaccacatcttcaaggaccgcttcaccatcagcgccgacaccagcaagaataccgcctacctccagatgaactccctgagagccgaggacaccgccgtgtactactgcgccagaaacctgtatctgtggggccagggaaccctggtcacagtgtcatctacgcgtatccagaaccctgatcctgccgtgtaccagctgcgggatagcaagagcagcgacaagagcgtgtgtctgttcaccgacttcgacagccagaccaacgtgtcccagagcaaggactccgacgtgtacatcaccgataagaccgtgctggacatgcggagcatggacttcaagagcaactccgccgtggcctggtccaacaagtccgatttcgcctgcgccaacgccttcaacaacagcattatccccgaggacacattcttcccaagccccgagagcagctgcggctttaccagcgagagctaccagcagggcgtgctgagcgccaccatcctgtacgagatcctgctgggcaaggccaccctgtacgccgtgctggtgtctgccctggtgctgatggctatggtcaagcggaaggacagccgggga

SEQ ID NO: 37259 - DNA, 1857 bp, synthetic construct
  source 1..1857: mol_type = other DNA
atggccttaccagtgaccgccttgctcctgccgctggccttgctgctccacgccgccaggccggacatccagatgacacagagccctagcagcctgtctgccagcgtgggagacagagtgaccatcacatgcaagagcagccagagcctgctggactccgatggcaagacctacctgaactggtatcagcagaagcccggcaaggcccctaagctgctgatctacctggtgtccaagctggatagcggcgtgcccagcagattttctggcagcggcagcggaaccgacttcaccctgacaatatccagcctccagcctgaggacttcgccacctactactgcttccaaggcacccactttccatacaccttcggccagggcaccaaggtggaaatcaaaagactcgaggacctgaagaacgtgttcccacctgaggtggccgtgttcgagcctagcgaggccgagatcagccacacccagaaagccaccctcgtgtgcctggctaccggcttctaccccgaccatgtggaactgtcttggtgggtcaacggcaaagaggtgcacagcggcgtgtctaccgacccccagccactgaaagaacagcccgccctgaacgacagccggtactgcctgagcagcagactgagagtgtccgccaccttctggcagaacccccggaaccacttcagatgccaggtgcagttctacggcctgagcgagaacgacgagtggacccaggacagagccaagcccgtgacccagatcgtgtctgccgaagcctggggcagagccgattgcggctttaccagcgagagctaccagcagggcgtgctgagcgccaccaacctgagcgtgatcggcttcagaatcctgctgctgaaagtggccggctttaacctgctgatgaccctgcggctgtggtccagcagggccaagcgatctggatctggagcaacaaacttctcactactcaaacaagcaggtgacgtggaggagaatcccgggcctactagtatggactggatttggcgcatccttttccttgtcggcgctgctaccggcgcgcattccttcgaagaagtgcagctggttgaatcaggcggaggactggttcagcctggcggatctctgagactgtcttgtgccgccagcggctacaccttcaccaactactggatgaactgggtccgacaggcccctggcaaaggactggaatgggtcggaatgatcgaccccagcgacagcgagacacactacaaccacatcttcaaggaccgcttcaccatcagcgccgacaccagcaagaataccgcctacctccagatgaactccctgagagccgaggacaccgccgtgtactactgcgccagaaacctgtatctgtggggccagggaaccctggtcacagtgtcatctacgcgtatccagaaccctgatcctgccgtgtaccagctgcgggatagcaagagcagcgacaagagcgtgtgtctgttcaccgacttcgacagccagaccaacgtgtcccagagcaaggactccgacgtgtacatcaccgataagaccgtgctggacatgcggagcatggacttcaagagcaactccgccgtggcctggtccaacaagtccgatttcgcctgcgccaacgccttcaacaacagcattatccccgaggacacattcttcccaagccccgagagcagctgcgacgtgaagctggtggaaaagagcttcgagacagacaccaacctgaacttccagatcctgtacgagatcctgctgggcaaggccaccctgtacgccgtgctggtgtctgccctggtgctgatggctatggtcaagcggaaggacagccgggga

SEQ ID NO: 37260 - DNA, 2169 bp, synthetic construct
  source 1..2169: mol_type = other DNA
atggccttaccagtgaccgccttgctcctgccgctggccttgctgctccacgccgccaggccggacatccagatgacacagagccctagcagcctgtctgccagcgtgggagacagagtgaccatcacatgcaagagcagccagagcctgctggactccgatggcaagacctacctgaactggtatcagcagaagcccggcaaggcccctaagctgctgatctacctggtgtccaagctggatagcggcgtgcccagcagattttctggcagcggcagcggaaccgacttcaccctgacaatatccagcctccagcctgaggacttcgccacctactactgcttccaaggcacccactttccatacaccttcggccagggcaccaaggtggaaatcaaaagactcgaggacctgaagaacgtgttcccacctgaggtggccgtgttcgagcctagcgaggccgagatcagccacacccagaaagccaccctcgtgtgcctggctaccggcttctaccccgaccatgtggaactgtcttggtgggtcaacggcaaagaggtgcacagcggcgtgtctaccgacccccagccactgaaagaacagcccgccctgaacgacagccggtactgcctgagcagcagactgagagtgtccgccaccttctggcagaacccccggaaccacttcagatgccaggtgcagttctacggcctgagcgagaacgacgagtggacccaggacagagccaagcccgtgacccagatcgtgtctgccgaagcctggggcagagccgatgatgtgattaagatccactggcaggaaaagaagtccaacaccatcctgggcagccaggaaggcaacaccatgaagaccaacgacacctacatgaagttcagctggctgaccgtgcccgagaagtccctggacaaagaacacagatgcatcgtgcggcacgaaaacaacaagaacggcgtggaccaggaaatcatcttcccacccatcaagaccgatgtgattacaatggaccccaaggacaactgctccaaggacgccaacgataccctgctgctccagctgaccaacaccagcgcctactacatgtacttgttgctgctgctgaagtccgtggtgtacttcgccatcatcacatgctgcctgctgatggctatggtcaagcggaaggacagccggggaagggccaagcgatctggatctggagcaacaaacttctcactactcaaacaagcaggtgacgtggaggagaatcccgggcctactagtatggactggatttggcgcatccttttccttgtcggcgctgctaccggcgcgcattccttcgaagaagtgcagctggttgaatcaggcggaggactggttcagcctggcggatctctgagactgtcttgtgccgccagcggctacaccttcaccaactactggatgaactgggtccgacaggcccctggcaaaggactggaatgggtcggaatgatcgaccccagcgacagcgagacacactacaaccacatcttcaaggaccgcttcaccatcagcgccgacaccagcaagaataccgcctacctccagatgaactccctgagagccgaggacaccgccgtgtactactgcgccagaaacctgtatctgtggggccagggaaccctggtcacagtgtcatctacgcgtatccagaaccctgatcctgccgtgtaccagctgcgggatagcaagagcagcgacaagagcgtgtgtctgttcaccgacttcgacagccagaccaacgtgtcccagagcaaggactccgacgtgtacatcaccgataagaccgtgctggacatgcggagcatggacttcaagagcaactccgccgtggcctggtccaacaagtccgatttcgcctgcgccaacgccttcaacaacagcattatccccgaggacacattcttcccaagccccgagagcagcgactccaccgaccacgtgaagcccaaagagacagagaacaccaagcagcccagcaagagctgccacaagcccaaggccatcgtgcacaccgagaaagtgaacatgatgagcctgaccgtgctgggcctgcggatgctgttcgccaaaaccgtggccgtgaacttcctgctgaccgccaagctgttcttcctcctcaccgcc

SEQ ID NO: 37261 - DNA, 2163 bp, synthetic construct
  source 1..2163: mol_type = other DNA
atggccttaccagtgaccgccttgctcctgccgctggccttgctgctccacgccgccaggccggacatccagatgacacagagccctagcagcctgtctgccagcgtgggagacagagtgaccatcacatgcaagagcagccagagcctgctggactccgatggcaagacctacctgaactggtatcagcagaagcccggcaaggcccctaagctgctgatctacctggtgtccaagctggatagcggcgtgcccagcagattttctggcagcggcagcggaaccgacttcaccctgacaatatccagcctccagcctgaggacttcgccacctactactgcttccaaggcacccactttccatacaccttcggccagggcaccaaggtggaaatcaaaagactcgaggacctgaagaacgtgttcccacctgaggtggccgtgttcgagcctagcgaggccgagatcagccacacccagaaagccaccctcgtgtgcctggctaccggcttctaccccgaccatgtggaactgtcttggtgggtcaacggcaaagaggtgcacagcggcgtgtctaccgacccccagccactgaaagaacagcccgccctgaacgacagccggtactgcctgagcagcagactgagagtgtccgccaccttctggcagaacccccggaaccacttcagatgccaggtgcagttctacggcctgagcgagaacgacgagtggacccaggacagagccaagcccgtgacccagatcgtgtctgccgaagcctggggcagagccgatgatgtgattaagatccactggcaggaaaagaagtccaacaccatcctgggcagccaggaaggcaacaccatgaagaccaacgacacctacatgaagttcagctggctgaccgtgcccgagaagtccctggacaaagaacacagatgcatcgtgcggcacgaaaacaacaagaacggcgtggaccaggaaatcatcttcccacccatcaagaccgatgtgattacaatggaccccaaggacaactgctccaaggacgccaacgataccctgctgctccagctgaccaacaccagcgcctactacatgtacttgttgctgctgctgaagtccgtggtgtacttcgccatcatcacatgctgcctgctgcggagaaccgccttctgctgcaacggcgagaagtctagggccaagcgatctggatctggagcaacaaacttctcactactcaaacaagcaggtgacgtggaggagaatcccgggcctactagtatggactggatttggcgcatccttttccttgtcggcgctgctaccggcgcgcattccttcgaagaagtgcagctggttgaatcaggcggaggactggttcagcctggcggatctctgagactgtcttgtgccgccagcggctacaccttcaccaactactggatgaactgggtccgacaggcccctggcaaaggactggaatgggtcggaatgatcgaccccagcgacagcgagacacactacaaccacatcttcaaggaccgcttcaccatcagcgccgacaccagcaagaataccgcctacctccagatgaactccctgagagccgaggacaccgccgtgtactactgcgccagaaacctgtatctgtggggccagggaaccctggtcacagtgtcatctacgcgtatccagaaccctgatcctgccgtgtaccagctgcgggatagcaagagcagcgacaagagcgtgtgtctgttcaccgacttcgacagccagaccaacgtgtcccagagcaaggactccgacgtgtacatcaccgataagaccgtgctggacatgcggagcatggacttcaagagcaactccgccgtggcctggtccaacaagtccgatttcgcctgcgccaacgccttcaacaacagcattatccccgaggacacattcttcccaagccccgagagcagcgactccaccgaccacgtgaagcccaaagagacagagaacaccaagcagcccagcaagagctgccacaagcccaaggccatcgtgcacaccgagaaagtgaacatgatgagcctgaccgtgctgggcctgcggatgctgttcgccaaaaccgtggccgtgaacttcctgctgaccgccaagctgttcttcctc

SEQ ID NO: 37262 - DNA, 2595 bp, synthetic construct
  source 1..2595: mol_type = other DNA
atggccttaccagtgaccgccttgctcctgccgctggccttgctgctccacgccgccaggccgctcgaggaggacctgaagaacgtgttcccacctgaggtggccgtgttcgagcctagcgaggccgagatcagccacacccagaaagccaccctcgtgtgcctggctaccggcttctaccccgaccatgtggaactgtcttggtgggtcaacggcaaagaggtgcacagcggcgtgtgtaccgacccccagccactgaaagaacagcccgccctgaacgacagccggtactgcctgagcagcagactgagagtgtccgccaccttctggcagaacccccggaaccacttcagatgccaggtgcagttctacggcctgagcgagaacgacgagtggacccaggacagagccaagcccgtgacccagatcgtgtctgccgaagcctggggcagagccgattgcggctttaccagcgagagctaccagcagggcgtgctgagcgccaccaacctgagcgtgatcggcttcagaatcctgctgctgaaagtggccggctttaacctgctgatgaccctgcggctgtggtccagcagggccaagcgatctggatctggagcaacaaacttctcactactcaaacaagcaggtgacgtggaggagaatcccgggcctactagcatggccttaccagtgaccgccttgctcctgccgctggccttgctgctccacgccgccaggccggacatccagatgacacagagccctagcagcctgtctgccagcgtgggagacagagtgaccatcacatgcaagagcagccagagcctgctggactccgatggcaagacctacctgaactggtatcagcagaagcccggcaaggcccctaagctgctgatctacctggtgtccaagctggatagcggcgtgcccagcagattttctggcagcggcagcggaaccgacttcaccctgacaatatccagcctccagcctgaggacttcgccacctactactgcttccaaggcacccactttccatacaccttcggccagggcaccaaggtggaaatcaaaagaggcggaggcggaagtggaggcggaggatctggcggcggaggctctgaagtgcagctggttgaatcaggcggaggactggttcagcctggcggatctctgagactgtcttgtgccgccagcggctacaccttcaccaactactggatgaactgggtccgacaggcccctggcaaaggactggaatgggtcggaatgatcgaccccagcgacagcgagacacactacaaccacatcttcaaggaccgcttcaccatcagcgccgacaccagcaagaataccgcctacctccagatgaactccctgagagccgaggacaccgccgtgtactactgcgccagaaacctgtatctgtggggccagggaaccctggtcacagtgtcatctacgcgtatccagaaccctgatcctgccgtgtaccagctgcgggatagcaagagcagcgacaagagcgtgtgtctgttcaccgacttcgacagccagaccaacgtgtcccagagcaaggactccgacgtgtacatcaccgataagtgcgtgctggacatgcggagcatggacttcaagagcaactccgccgtggcctggtccaacaagtccgatttcgcctgcgccaacgccttcaacaacagcattatccccgaggacacattcttcccaagccccgagagcagctgcgacgtgaagctggtggaaaagagcttcgagacagacaccaacctgaacttccagatcctgtacgaggtgatcggcttcagaatcctgctgctgaaagtggccggctttaacctgctgatgaccctgcggctgtggtccagccgcgccaagagaagcggatctggcgtgaagcagaccctgaatttcgacctgctgaagctggctggcgacgtggaatccaacccaggcccttctagaggccatatgaccgagtacaagcccacggtgcgcctcgccacccgcgacgacgtccccagggccgtacgcaccctcgccgccgcgttcgccgactaccccgccacgcgccacaccgtcgatccggaccgccacatcgagcgggtcaccgagctgcaagaactcttcctcacgcgcgtcgggctcgacatcggcaaggtgtgggtcgcggacgacggcgccgcggtggcggtctggaccacgccggagagcgtcgaagcgggggcggtgttcgccgagatcggcccgcgcatggccgagttgagcggttcccggctggccgcgcagcaacagatggaaggcctcctggcgccgcaccggcccaaggagcccgcgtggttcctggccaccgtcggcgtctcgcccgaccaccagggcaagggtctgggcagcgccgtcgtgctccccggagtggaggcggccgagcgcgccggggtgcccgccttcctggagacctccgcgccccgcaacctccccttctacgagcggctcggcttcaccgtcaccgccgacgtcgaggtgcccgaaggaccgcgcacctggtgcatgacccgcaagcccggtgcctga

SEQ ID NO: 37263 - DNA, 2595 bp, synthetic construct
  source 1..2595: mol_type = other DNA
atggccttaccagtgaccgccttgctcctgccgctggccttgctgctccacgccgccaggccgctcgagatccagaaccctgatcctgccgtgtaccagctgcgggatagcaagagcagcgacaagagcgtgtgtctgttcaccgacttcgacagccagaccaacgtgtcccagagcaaggactccgacgtgtacatcaccgataagtgcgtgctggacatgcggagcatggacttcaagagcaactccgccgtggcctggtccaacaagtccgatttcgcctgcgccaacgccttcaacaacagcattatccccgaggacacattcttcccaagccccgagagcagctgcgacgtgaagctggtggaaaagagcttcgagacagacaccaacctgaacttccagatcctgtacgaggtgatcggcttcagaatcctgctgctgaaagtggccggctttaacctgctgatgaccctgcggctgtggtccagcagggccaagcgatctggatctggagcaacaaacttctcactactcaaacaagcaggtgacgtggaggagaatcccgggcctactagcatggccttaccagtgaccgccttgctcctgccgctggccttgctgctccacgccgccaggccggacatccagatgacacagagccctagcagcctgtctgccagcgtgggagacagagtgaccatcacatgcaagagcagccagagcctgctggactccgatggcaagacctacctgaactggtatcagcagaagcccggcaaggcccctaagctgctgatctacctggtgtccaagctggatagcggcgtgcccagcagattttctggcagcggcagcggaaccgacttcaccctgacaatatccagcctccagcctgaggacttcgccacctactactgcttccaaggcacccactttccatacaccttcggccagggcaccaaggtggaaatcaaaagaggcggaggcggaagtggaggcggaggatctggcggcggaggctctgaagtgcagctggttgaatcaggcggaggactggttcagcctggcggatctctgagactgtcttgtgccgccagcggctacaccttcaccaactactggatgaactgggtccgacaggcccctggcaaaggactggaatgggtcggaatgatcgaccccagcgacagcgagacacactacaaccacatcttcaaggaccgcttcaccatcagcgccgacaccagcaagaataccgcctacctccagatgaactccctgagagccgaggacaccgccgtgtactactgcgccagaaacctgtatctgtggggccagggaaccctggtcacagtgtcatctacgcgtgaggacctgaagaacgtgttcccacctgaggtggccgtgttcgagcctagcgaggccgagatcagccacacccagaaagccaccctcgtgtgcctggctaccggcttctaccccgaccatgtggaactgtcttggtgggtcaacggcaaagaggtgcacagcggcgtgtgtaccgacccccagccactgaaagaacagcccgccctgaacgacagccggtactgcctgagcagcagactgagagtgtccgccaccttctggcagaacccccggaaccacttcagatgccaggtgcagttctacggcctgagcgagaacgacgagtggacccaggacagagccaagcccgtgacccagatcgtgtctgccgaagcctggggcagagccgattgcggctttaccagcgagagctaccagcagggcgtgctgagcgccaccaacctgagcgtgatcggcttcagaatcctgctgctgaaagtggccggctttaacctgctgatgaccctgcggctgtggtccagccgcgccaagagaagcggatctggcgtgaagcagaccctgaatttcgacctgctgaagctggctggcgacgtggaatccaacccaggcccttctagaggccatatgaccgagtacaagcccacggtgcgcctcgccacccgcgacgacgtccccagggccgtacgcaccctcgccgccgcgttcgccgactaccccgccacgcgccacaccgtcgatccggaccgccacatcgagcgggtcaccgagctgcaagaactcttcctcacgcgcgtcgggctcgacatcggcaaggtgtgggtcgcggacgacggcgccgcggtggcggtctggaccacgccggagagcgtcgaagcgggggcggtgttcgccgagatcggcccgcgcatggccgagttgagcggttcccggctggccgcgcagcaacagatggaaggcctcctggcgccgcaccggcccaaggagcccgcgtggttcctggccaccgtcggcgtctcgcccgaccaccagggcaagggtctgggcagcgccgtcgtgctccccggagtggaggcggccgagcgcgccggggtgcccgccttcctggagacctccgcgccccgcaacctccccttctacgagcggctcggcttcaccgtcaccgccgacgtcgaggtgcccgaaggaccgcgcacctggtgcatgacccgcaagcccggtgcctga

SEQ ID NO: 37264 - DNA, 2595 bp, synthetic construct; identical to SEQ ID NO: 37262
  source 1..2595: mol_type = other DNA

SEQ ID NO: 37265 - DNA, 2919 bp, synthetic construct
  source 1..2919: mol_type = other DNA
atggccttaccagtgaccgccttgctcctgccgctggccttgctgctccacgccgccaggccgctcgaggaggacctgaagaacgtgttcccacctgaggtggccgtgttcgagcctagcgaggccgagatcagccacacccagaaagccaccctcgtgtgcctggctaccggcttctaccccgaccatgtggaactgtcttggtgggtcaacggcaaagaggtgcacagcggcgtgtctaccgacccccagccactgaaagaacagcccgccctgaacgacagccggtactgcctgagcagcagactgagagtgtccgccaccttctggcagaacccccggaaccacttcagatgccaggtgcagttctacggcctgagcgagaacgacgagtggacccaggacagagccaagcccgtgacccagatcgtgtctgccgaagcctggggcagagccgatgatgtgattaagatccactggcaggaaaagaagtccaacaccatcctgggcagccaggaaggcaacaccatgaagaccaacgacacctacatgaagttcagctggctgaccgtgcccgagaagtccctggacaaagaacacagatgcatcgtgcggcacgaaaacaacaagaacggcgtggaccaggaaatcatcttcccacccatcaagaccgatgtgattacaatggaccccaaggacaactgctccaaggacgccaacgataccctgctgctccagctgaccaacaccagcgcctactacatgtacttgttgctgctgctgaagtccgtggtgtacttcgccatcatcacatgctgcctgctgatggctatggtcaagcggaaggacagccggggaagggccaagcgatctggatctggagcaacaaacttctcactactcaaacaagcaggtgacgtggaggagaatcccgggcctactagcatggccttaccagtgaccgccttgctcctgccgctggccttgctgctccacgccgccaggccggacatccagatgacacagagccctagcagcctgtctgccagcgtgggagacagagtgaccatcacatgcaagagcagccagagcctgctggactccgatggcaagacctacctgaactggtatcagcagaagcccggcaaggcccctaagctgctgatctacctggtgtccaagctggatagcggcgtgcccagcagattttctggcagcggcagcggaaccgacttcaccctgacaatatccagcctccagcctgaggacttcgccacctactactgcttccaaggcacccactttccatacaccttcggccagggcaccaaggtggaaatcaaaagaggcggaggcggaagtggaggcggaggatctggcggcggaggctctgaagtgcagctggttgaatcaggcggaggactggttcagcctggcggatctctgagactgtcttgtgccgccagcggctacaccttcaccaactactggatgaactgggtccgacaggcccctggcaaaggactggaatgggtcggaatgatcgaccccagcgacagcgagacacactacaaccacatcttcaaggaccgcttcaccatcagcgccgacaccagcaagaataccgcctacctccagatgaactccctgagagccgaggacaccgccgtgtactactgcgccagaaacctgtatctgtggggccagggaaccctggtcacagtgtcatctacgcgtatccagaaccctgatcctgccgtgtaccagctgcgggatagcaagagcagcgacaagagcgtgtgtctgttcaccgacttcgacagccagaccaacgtgtcccagagcaaggactccgacgtgtacatcaccgataagaccgtgctggacatgcggagcatggacttcaagagcaactccgccgtggcctggtccaacaagtccgatttcgcctgcgccaacgccttcaacaacagcattatccccgaggacacattcttcccaagccccgagagcagcgactccaccgaccacgtgaagcccaaagagacagagaacaccaagcagcccagcaagagctgccacaagcccaaggccatcgtgcacaccgagaaagtgaacatgatgagcctgaccgtgctgggcctgcggatgctgttcgccaaaaccgtggccgtgaacttcctgctgaccgccaagctgttcttcctcctcaccgcccgcgccaagagaagcggatctggcgtgaagcagaccctgaatttcgacctgctgaagctggctggcgacgtggaatccaacccaggcccttctagaggccatatgaccgagtacaagcccacggtgcgcctcgccacccgcgacgacgtccccagggccgtacgcaccctcgccgccgcgttcgccgactaccccgccacgcgccacaccgtcgatccggaccgccacatcgagcgggtcaccgagctgcaagaactcttcctcacgcgcgtcgggctcgacatcggcaaggtgtgggtcgcggacgacggcgccgcggtggcggtctggaccacgccggagagcgtcgaagcgggggcggtgttcgccgagatcggcccgcgcatggccgagttgagcggttcccggctggccgcgcagcaacagatggaaggcctcctggcgccgcaccggcccaaggagcccgcgtggttcctggccaccgtcggcgtctcgcccgaccaccagggcaagggtctgggcagcgccgtcgtgctccccggagtggaggcggccgagcgcgccggggtgcccgccttcctggagacctccgcgccccgcaacctccccttctacgagcggctcggcttcaccgtcaccgccgacgtcgaggtgcccgaaggaccgcgcacctggtgcatgacccgcaagcccggtgcctga

SEQ ID NO: 37266 - DNA, 2919 bp, synthetic construct
  source 1..2919: mol_type = other DNA
atggccttaccagtgaccgccttgctcctgccgctggccttgctgctccacgccgccaggccgctcgagatccagaaccctgatcctgccgtgtaccagctgcgggatagcaagagcagcgacaagagcgtgtgtctgttcaccgacttcgacagccagaccaacgtgtcccagagcaaggactccgacgtgtacatcaccgataagaccgtgctggacatgcggagcatggacttcaagagcaactccgccgtggcctggtccaacaagtccgatttcgcctgcgccaacgccttcaacaacagcattatccccgaggacacattcttcccaagccccgagagcagcgactccaccgaccacgtgaagcccaaagagacagagaacaccaagcagcccagcaagagctgccacaagcccaaggccatcgtgcacaccgagaaagtgaacatgatgagcctgaccgtgctgggcctgcggatgctgttcgccaaaaccgtggccgtgaacttcctgctgaccgccaagctgttcttcctcctcaccgccagggccaagcgatctggatctggagcaacaaacttctcactactcaaacaagcaggtgacgtggaggagaatcccgggcctactagcatggccttaccagtgaccgccttgctcctgccgctggccttgctgctccacgccgccaggccggacatccagatgacacagagccctagcagcctgtctgccagcgtgggagacagagtgaccatcacatgcaagagcagccagagcctgctggactccgatggcaagacctacctgaactggtatcagcagaagcccggcaaggcccctaagctgctgatctacctggtgtccaagctggatagcggcgtgcccagcagattttctggcagcggcagcggaaccgacttcaccctgacaatatccagcctccagcctgaggacttcgccacctactactgcttccaaggcacccactttccatacaccttcggccagggcaccaaggtggaaatcaaaagaggcggaggcggaagtggaggcggaggatctggcggcggaggctctgaagtgcagctggttgaatcaggcggaggactggttcagcctggcggatctctgagactgtcttgtgccgccagcggctacaccttcaccaactactggatgaactgggtccgacaggcccctggcaaaggactggaatgggtcggaatgatcgaccccagcgacagcgagacacactacaaccacatcttcaaggaccgcttcaccatcagcgccgacaccagcaagaataccgcctacctccagatgaactccctgagagccgaggacaccgccgtgtactactgcgccagaaacctgtatctgtggggccagggaaccctggtcacagtgtcatctacgcgtgaggacctgaagaacgtgttcccacctgaggtggccgtgttcgagcctagcgaggccgagatcagccacacccagaaagccaccctcgtgtgcctggctaccggcttctaccccgaccatgtggaactgtcttggtgggtcaacggcaaagaggtgcacagcggcgtgtctaccgacccccagccactgaaagaacagcccgccctgaacgacagccggtactgcctgagcagcagactgagagtgtccgccaccttctggcagaacccccggaaccacttcagatgccaggtgcagttctacggcctgagcgagaacgacgagtggacccaggacagagccaagcccgtgacccagatcgtgtctgccgaagcctggggcagagccgatgatgtgattaagatccactggcaggaaaagaagtccaacaccatcctgggcagccaggaaggcaacaccatgaagaccaacgacacctacatgaagttcagctggctgaccgtgcccgagaagtccctggacaaagaacacagatgcatcgtgcggcacgaaaacaacaagaacggcgtggaccaggaaatcatcttcccacccatcaagaccgatgtgattacaatggaccccaaggacaactgctccaaggacgccaacgataccctgctgctccagctgaccaacaccagcgcctactacatgtacttgttgctgctgctgaagtccgtggtgtacttcgccatcatcacatgctgcctgctgatggctatggtcaagcggaaggacagccggggacgcgccaagagaagcggatctggcgtgaagcagaccctgaatttcgacctgctgaagctggctggcgacgtggaatccaacccaggcccttctagaggccatatgaccgagtacaagcccacggtgcgcctcgccacccgcgacgacgtccccagggccgtacgcaccctcgccgccgcgttcgccgactaccccgccacgcgccacaccgtcgatccggaccgccacatcgagcgggtcaccgagctgcaagaactcttcctcacgcgcgtcgggctcgacatcggcaaggtgtgggtcgcggacgacggcgccgcggtggcggtctggaccacgccggagagcgtcgaagcgggggcggtgttcgccgagatcggcccgcgcatggccgagttgagcggttcccggctggccgcgcagcaacagatggaaggcctcctggcgccgcaccggcccaaggagcccgcgtggttcctggccaccgtcggcgtctcgcccgaccaccagggcaagggtctgggcagcgccgtcgtgctccccggagtggaggcggccgagcgcgccggggtgcccgccttcctggagacctccgcgccccgcaacctccccttctacgagcggctcggcttcaccgtcaccgccgacgtcgaggtgcccgaaggaccgcgcacctggtgcatgacccgcaagcccggtgcctga

SEQ ID NO: 37267 - DNA, 2913 bp, synthetic construct
  source 1..2913: mol_type = other DNA
atggccttaccagtgaccgccttgctcctgccgctggccttgctgctccacgccgccaggccgctcgaggaggacctgaagaacgtgttcccacctgaggtggccgtgttcgagcctagcgaggccgagatcagccacacccagaaagccaccctcgtgtgcctggctaccggcttctaccccgaccatgtggaactgtcttggtgggtcaacggcaaagaggtgcacagcggcgtgtgtaccgacccccagccactgaaagaacagcccgccctgaacgacagccggtactgcctgagcagcagactgagagtgtccgccaccttctggcagaacccccggaaccacttcagatgccaggtgcagttctacggcctgagcgagaacgacgagtggacccaggacagagccaagcccgtgacccagatcgtgtctgccgaagcctggggcagagccgatgatgtgattaagatccactggcaggaaaagaagtccaacaccatcctgggcagccaggaaggcaacaccatgaagaccaacgacacctacatgaagttcagctggctgaccgtgcccgagaagtccctggacaaagaacacagatgcatcgtgcggcacgaaaacaacaagaacggcgtggaccaggaaatcatcttcccacccatcaagaccgatgtgattacaatggaccccaaggacaactgctccaaggacgccaacgataccctgctgctccagctgaccaacaccagcgcctactacatgtacttgttgctgctgctgaagtccgtggtgtacttcgccatcatcacatgctgcctgctgcggagaaccgccttctgctgcaacggcgagaagtctagggccaagcgatctggatctggagcaacaaacttctcactactcaaacaagcaggtgacgtggaggagaatcccgggcctactagcatggccttaccagtgaccgccttgctcctgccgctggccttgctgctccacgccgccaggccggacatccagatgacacagagccctagcagcctgtctgccagcgtgggagacagagtgaccatcacatgcaagagcagccagagcctgctggactccgatggcaagacctacctgaactggtatcagcagaagcccggcaaggcccctaagctgctgatctacctggtgtccaagctggatagcggcgtgcccagcagattttctggcagcggcagcggaaccgacttcaccctgacaatatccagcctccagcctgaggacttcgccacctactactgcttccaaggcacccactttccatacaccttcggccagggcaccaaggtggaaatcaaaagaggcggaggcggaagtggaggcggaggatctggcggcggaggctctgaagtgcagctggttgaatcaggcggaggactggttcagcctggcggatctctgagactgtcttgtgccgccagcggctacaccttcaccaactactggatgaactgggtccgacaggcccctggcaaaggactggaatgggtcggaatgatcgaccccagcgacagcgagacacactacaaccacatcttcaaggaccgcttcaccatcagcgccgacaccagcaagaataccgcctacctccagatgaactccctgagagccgaggacaccgccgtgtactactgcgccagaaacctgtatctgtggggccagggaaccctggtcacagtgtcatctacgcgtatccagaaccctgatcctgccgtgtaccagctgcgggatagcaagagcagcgacaagagcgtgtgtctgttcaccgacttcgacagccagaccaacgtgtcccagagcaaggactccgacgtgtacatcaccgataagtgcgtgctggacatgcggagcatggacttcaagagcaactccgccgtggcctggtccaacaagtccgatttcgcctgcgccaacgccttcaacaacagcattatccccgaggacacattcttcccaagccccgagagcagcgactccaccgaccacgtgaagcccaaagagacagagaacaccaagcagcccagcaagagctgccacaagcccaaggccatcgtgcacaccgagaaagtgaacatgatgagcctgaccgtgctgggcctgcggatgctgttcgccaaaaccgtggccgtgaacttcctgctgaccgccaagctgttcttcctccgcgccaagagaagcggatctggcgtgaagcagaccctgaatttcgacctgctgaagctggctggcgacgtggaatccaacccaggcccttctagaggccatatgaccgagtacaagcccacggtgcgcctcgccacccgcgacgacgtccccagggccgtacgcaccctcgccgccgcgttcgccgactaccccgccacgcgccacaccgtcgatccggaccgccacatcgagcgggtcaccgagctgcaagaactcttcctcacgcgcgtcgggctcgacatcggcaaggtgtgggtcgcggacgacggcgccgcggtggcggtctggaccacgccggagagcgtcgaagcgggggcggtgttcgccgagatcggcccgcgcatggccgagttgagcggttcccggctggccgcgcagcaacagatggaaggcctcctggcgccgcaccggcccaaggagcccgcgtggttcctggccaccgtcggcgtctcgcccgaccaccagggcaagggtctgggcagcgccgtcgtgctccccggagtggaggcggccgagcgcgccggggtgcccgccttcctggagacctccgcgccccgcaacctccccttctacgagcggctcggcttcaccgtcaccgccgacgtcgaggtgcccgaaggaccgcgcacctggtgcatgacccgcaagcccggtgcctga

SEQ ID NO: 37268 - DNA, 2913 bp, synthetic construct
  source 1..2913: mol_type = other DNA
atggccttaccagtgaccgccttgctcctgccgctggccttgctgctccacgccgccaggccgctcgagatccagaaccctgatcctgccgtgtaccagctgcgggatagcaagagcagcgacaagagcgtgtgtctgttcaccgacttcgacagccagaccaacgtgtcccagagcaaggactccgacgtgtacatcaccgataagtgcgtgctggacatgcggagcatggacttcaagagcaactccgccgtggcctggtccaacaagtccgatttcgcctgcgccaacgccttcaacaacagcattatccccgaggacacattcttcccaagccccgagagcagcgactccaccgaccacgtgaagcccaaagagacagagaacaccaagcagcccagcaagagctgccacaagcccaaggccatcgtgcacaccgagaaagtgaacatgatgagcctgaccgtgctgggcctgcggatgctgttcgccaaaaccgtggccgtgaacttcctgctgaccgccaagctgttcttcctcagggccaagcgatctggatctggagcaacaaacttctcactactcaaacaagcaggtgacgtggaggagaatcccgggcctactagcatggccttaccagtgaccgccttgctcctgccgctggccttgctgctccacgccgccaggccggacatccagatgacacagagccctagcagcctgtctgccagcgtgggagacagagtgaccatcacatgcaagagcagccagagcctgctggactccgatggcaagacctacctgaactggtatcagcagaagcccggcaaggcccctaagctgctgatctacctggtgtccaagctggatagcggcgtgcccagcagattttctggcagcggcagcggaaccgacttcaccctgacaatatccagcctccagcctgaggacttcgccacctactactgcttccaaggcacccactttccatacaccttcggccagggcaccaaggtggaaatcaaaagaggcggaggcggaagtggaggcggaggatctggcggcggaggctctgaagtgcagctggttgaatcaggcggaggactggttcagcctggcggatctctgagactgtcttgtgccgccagcggctacaccttcaccaactactggatgaactgggtccgacaggcccctggcaaaggactggaatgggtcggaatgatcgaccccagcgacagcgagacacactacaaccacatcttcaaggaccgcttcaccatcagcgccgacaccagcaagaataccgcctacctccagatgaactccctgagagccgaggacaccgccgtgtactactgcgccagaaacctgtatctgtggggccagggaaccctggtcacagtgtcatctacgcgtgaggacctgaagaacgtgttcccacctgaggtggccgtgttcgagcctagcgaggccgagatcagccacacccagaaagccaccctcgtgtgcctggctaccggcttctaccccgaccatgtggaactgtcttggtgggtcaacggcaaagaggtgcacagcggcgtgtgtaccgacccccagccactgaaagaacagcccgccctgaacgacagccggtactgcctgagcagcagactgagagtgtccgccaccttctggcagaacccccggaaccacttcagatgccaggtgcagttctacggcctgagcgagaacgacgagtggacccaggacagagccaagcccgtgacccagatcgtgtctgccgaagcctggggcagagccgatgatgtgattaagatccactggcaggaaaagaagtccaacaccatcctgggcagccaggaaggcaacaccatgaagaccaacgacacctacatgaagttcagctggctgaccgtgcccgagaagtccctggacaaagaacacagatgcatcgtgcggcacgaaaacaacaagaacggcgtggaccaggaaatcatcttcccacccatcaagaccgatgtgattacaatggaccccaaggacaactgctccaaggacgccaacgataccctgctgctccagctgaccaacaccagcgcctactacatgtacttgttgctgctgctgaagtccgtggtgtacttcgccatcatcacatgctgcctgctgcggagaaccgccttctgctgcaacggcgagaagtctcgcgccaagagaagcggatctggcgtgaagcagaccctgaatttcgacctgctgaagctggctggcgacgtggaatccaacccaggcccttctagaggccatatgaccgagtacaagcccacggtgcgcctcgccacccgcgacgacgtccccagggccgtacgcaccctcgccgccgcgttcgccgactaccccgccacgcgccacaccgtcgatccggaccgccacatcgagcgggtcaccgagctgcaagaactcttcctcacgcgcgtcgggctcgacatcggcaaggtgtgggtcgcggacgacggcgccgcggtggcggtctggaccacgccggagagcgtcgaagcgggggcggtgttcgccgagatcggcccgcgcatggccgagttgagcggttcccggctggccgcgcagcaacagatggaaggcctcctggcgccgcaccggcccaaggagcccgcgtggttcctggccaccgtcggcgtctcgcccgaccaccagggcaagggtctgggcagcgccgtcgtgctccccggagtggaggcggccgagcgcgccggggtgcccgccttcctggagacctccgcgccccgcaacctccccttctacgagcggctcggcttcaccgtcaccgccgacgtcgaggtgcccgaaggaccgcgcacctggtgcatgacccgcaagcccggtgcctga

SEQ ID NO: 37269 - DNA, 2913 bp, synthetic construct
  source 1..2913: mol_type = other DNA
atggccttaccagtgaccgccttgctcctgccgctggccttgctgctccacgccgccaggccgctcgaggaggacctgaagaacgtgttcccacctgaggtggccgtgttcgagcctagcgaggccgagatcagccacacccagaaagccaccctcgtgtgcctggctaccggcttctaccccgaccatgtggaactgtcttggtgggtcaacggcaaagaggtgcacagcggcgtgtctaccgacccccagccactgaaagaacagcccgccctgaacgacagccggtactgcctgagcagcagactgagagtgtccgccaccttctggcagaacccccggaaccacttcagatgccaggtgcagttctacggcctgagcgagaacgacgagtggacccaggacagagccaagcccgtgacccagatcgtgtctgccgaagcctggggcagagccgatgatgtgattaagatccactggcaggaaaagaagtccaacaccatcctgggcagccaggaaggcaacaccatgaagaccaacgacacctacatgaagttcagctggctgaccgtgcccgagaagtccctggacaaagaacacagatgcatcgtgcggcacgaaaacaacaagaacggcgtggaccaggaaatcatcttcccacccatcaagaccgatgtgattacaatggaccccaaggacaactgctccaaggacgccaacgataccctgctgctccagctgaccaacaccagcgcctactacatgtacttgttgctgctgctgaagtccgtggtgtacttcgccatcatcacatgctgcctgctgcggagaaccgccttctgctgcaacggcgagaagtctagggccaagcgatctggatctggagcaacaaacttctcactactcaaacaagcaggtgacgtggaggagaatcccgggcctactagcatggccttaccagtgaccgccttgctcctgccgctggccttgctgctccacgccgccaggccggacatccagatgacacagagccctagcagcctgtctgccagcgtgggagacagagtgaccatcacatgcaagagcagccagagcctgctggactccgatggcaagacctacctgaactggtatcagcagaagcccggcaaggcccctaagctgctgatctacctggtgtccaagctggatagcggcgtgcccagcagattttctggcagcggcagcggaaccgacttcaccctgacaatatccagcctccagcctgaggacttcgccacctactactgcttccaaggcacccactttccatacaccttcggccagggcaccaaggtggaaatcaaaagaggcggaggcggaagtggaggcggaggatctggcggcggaggctctgaagtgcagctggttgaatcaggcggaggactggttcagcctggcggatctctgagactgtcttgtgccgccagcggctacaccttcaccaactactggatgaactgggtccgacaggcccctggcaaaggactggaatgggtcggaatgatcgaccccagcgacagcgagacacactacaaccacatcttcaaggaccgcttcaccatcagcgccgacaccagcaagaataccgcctacctccagatgaactccctgagagccgaggacaccgccgtgtactactgcgccagaaacctgtatctgtggggccagggaaccctggtcacagtgtcatctacgcgtatccagaaccctgatcctgccgtgtaccagctgcgggatagcaagagcagcgacaagagcgtgtgtctgttcaccgacttcgacagccagaccaacgtgtcccagagcaaggactccgacgtgtacatcaccgataagaccgtgctggacatgcggagcatggacttcaagagcaactccgccgtggcctggtccaacaagtccgatttcgcctgcgccaacgccttcaacaacagcattatccccgaggacacattcttcccaagccccgagagcagcgactccaccgaccacgtgaagcccaaagagacagagaacaccaagcagcccagcaagagctgccacaagcccaaggccatcgtgcacaccgagaaagtgaacatgatgagcctgaccgtgctgggcctgcggatgctgttcgccaaaaccgtggccgtgaacttcctgctgaccgccaagctgttcttcctccgcgccaagagaagcggatctggcgtgaagcagaccctgaatttcgacctgctgaagctggctggcgacgtggaatccaacccaggcccttctagaggccatatgaccgagtacaagcccacggtgcgcctcgccacccgcgacgacgtccccagggccgtacgcaccctcgccgccgcgttcgccgactaccccgccacgcgccacaccgtcgatccggaccgccacatcgagcgggtcaccgagctgcaagaactcttcctcacgcgcgtcgggctcgacatcggcaaggtgtgggtcgcggacgacggcgccgcggtggcggtctggaccacgccggagagcgtcgaagcgggggcggtgttcgccgagatcggcccgcgcatggccgagttgagcggttcccggctggccgcgcagcaacagatggaaggcctcctggcgccgcaccggcccaaggagcccgcgtggttcctggccaccgtcggcgtctcgcccgaccaccagggcaagggtctgggcagcgccgtcgtgctccccggagtggaggcggccgagcgcgccggggtgcccgccttcctggagacctccgcgccccgcaacctccccttctacgagcggctcggcttcaccgtcaccgccgacgtcgaggtgcccgaaggaccgcgcacctggtgcatgacccgcaagcccggtgcctga

SEQ ID NO: 37270 - DNA, 2913 bp, synthetic construct
  source 1..2913: mol_type = other DNA
atggccttaccagtgaccgccttgctcctgccgctggccttgctgctccacgccgccaggccgctcgagatccagaaccctgatcctgccgtgtaccagctgcgggatagcaagagcagcgacaagagcgtgtgtctgttcaccgacttcgacagccagaccaacgtgtcccagagcaaggactccgacgtgtacatcaccgataagaccgtgctggacatgcggagcatggacttcaagagcaactccgccgtggcctggtccaacaagtccgatttcgcctgcgccaacgccttcaacaacagcattatccccgaggacacattcttcccaagccccgagagcagcgactccaccgaccacgtgaagcccaaagagacagagaacaccaagcagcccagcaagagctgccacaagcccaaggccatcgtgcacaccgagaaagtgaacatgatgagcctgaccgtgctgggcctgcggatgctgttcgccaaaaccgtggccgtgaacttcctgctgaccgccaagctgttcttcctcagggccaagcgatctggatctggagcaacaaacttctcactactcaaacaagcaggtgacgtggaggagaatcccgggcctactagcatggccttaccagtgaccgccttgctcctgccgctggccttgctgctccacgccgccaggccggacatccagatgacacagagccctagcagcctgtctgccagcgtgggagacagagtgaccatcacatgcaagagcagccagagcctgctggactccgatggcaagacctacctgaactggtatcagcagaagcccggcaaggcccctaagctgctgatctacctggtgtccaagctggatagcggcgtgcccagcagattttctggcagcggcagcggaaccgacttcaccctgacaatatccagcctccagcctgaggacttcgccacctactactgcttccaaggcacccactttccatacaccttcggccagggcaccaaggtggaaatcaaaagaggcggaggcggaagtggaggcggaggatctggcggcggaggctctgaagtgcagctggttgaatcaggcggaggactggttcagcctggcggatctctgagactgtcttgtgccgccagcggctacaccttcaccaactactggatgaactgggtccgacaggcccctggcaaaggactggaatgggtcggaatgatcgaccccagcgacagcgagacacactacaaccacatcttcaaggaccgcttcaccatcagcgccgacaccagcaagaataccgcctacctccagatgaactccctgagagccgaggacaccgccgtgtactactgcgccagaaacctgtatctgtggggccagggaaccctggtcacagtgtcatctacgcgtgaggacctgaagaacgtgttcccacctgaggtggccgtgttcgagcctagcgaggccgagatcagccacacccagaaagccaccctcgtgtgcctggctaccggcttctaccccgaccatgtggaactgtcttggtgggtcaacggcaaagaggtgcacagcggcgtgtctaccgacccccagccactgaaagaacagcccgccctgaacgacagccggtactgcctgagcagcagactgagagtgtccgccaccttctggcagaacccccggaaccacttcagatgccaggtgcagttctacggcctgagcgagaacgacgagtggacccaggacagagccaagcccgtgacccagatcgtgtctgccgaagcctggggcagagccgatgatgtgattaagatccactggcaggaaaagaagtccaacaccatcctgggcagccaggaaggcaacaccatgaagaccaacgacacctacatgaagttcagctggctgaccgtgcccgagaagtccctggacaaagaacacagatgcatcgtgcggcacgaaaacaacaagaacggcgtggaccaggaaatcatcttcccacccatcaagaccgatgtgattacaatggaccccaaggacaactgctccaaggacgccaacgataccctgctgctccagctgaccaacaccagcgcctactacatgtacttgttgctgctgctgaagtccgtggtgtacttcgccatcatcacatgctgcctgctgcggagaaccgccttctgctgcaacggcgagaagtctcgcgccaagagaagcggatctggcgtgaagcagaccctgaatttcgacctgctgaagctggctggcgacgtggaatccaacccaggcccttctagaggccatatgaccgagtacaagcccacggtgcgcctcgccacccgcgacgacgtccccagggccgtacgcaccctcgccgccgcgttcgccgactaccccgccacgcgccacaccgtcgatccggaccgccacatcgagcgggtcaccgagctgcaagaactcttcctcacgcgcgtcgggctcgacatcggcaaggtgtgggtcgcggacgacggcgccgcggtggcggtctggaccacgccggagagcgtcgaagcgggggcggtgttcgccgagatcggcccgcgcatggccgagttgagcggttcccggctggccgcgcagcaacagatggaaggcctcctggcgccgcaccggcccaaggagcccgcgtggttcctggccaccgtcggcgtctcgcccgaccaccagggcaagggtctgggcagcgccgtcgtgctccccggagtggaggcggccgagcgcgccggggtgcccgccttcctggagacctccgcgccccgcaacctccccttctacgagcggctcggcttcaccgtcaccgccgacgtcgaggtgcccgaaggaccgcgcacctggtgcatgacccgcaagcccggtgcctga

SEQ ID NO: 37271 - DNA, 2607 bp, synthetic construct
  source 1..2607: mol_type = other DNA
atggccttaccagtgaccgccttgctcctgccgctggccttgctgctccacgccgccaggccgctcgaggaggacctgaagaacgtgttcccacctgaggtggccgtgttcgagcctagcaaggccgagatcgcccacacccagaaagccaccctcgtgtgcctggctaccggcttctaccccgaccatgtggaactgtcttggtgggtcaacggcaaagaggtgcacagcggcgtgtgtaccgacccccagccactgaaagaacagcccgccctgaacgacagccggtactgcctgagcagcagactgagagtgtccgccaccttctggcagaacccccggaaccacttcagatgccaggtgcagttctacggcctgagcgagaacgacgagtggacccaggacagagccaagcccgtgacccagatcgtgtctgccgaagcctggggcagagccgattgcggcatcaccagcgccagctaccaccagggcgtgctgagcgccaccatcctgtacgagatcctgctgggcaaggccaccctgtacgccgtgctggtgtctgccctggtgctgatggctatggtcaagcggaaggacagccggggaagggccaagcgatctggatctggagcaacaaacttctcactactcaaacaagcaggtgacgtggaggagaatcccgggcctactagcatggccttaccagtgaccgccttgctcctgccgctggccttgctgctccacgccgccaggccggacatccagatgacacagagccctagcagcctgtctgccagcgtgggagacagagtgaccatcacatgcaagagcagccagagcctgctggactccgatggcaagacctacctgaactggtatcagcagaagcccggcaaggcccctaagctgctgatctacctggtgtccaagctggatagcggcgtgcccagcagattttctggcagcggcagcggaaccgacttcaccctgacaatatccagcctccagcctgaggacttcgccacctactactgcttccaaggcacccactttccatacaccttcggccagggcaccaaggtggaaatcaaaagaggcggaggcggaagtggaggcggaggatctggcggcggaggctctgaagtgcagctggttgaatcaggcggaggactggttcagcctggcggatctctgagactgtcttgtgccgccagcggctacaccttcaccaactactggatgaactgggtccgacaggcccctggcaaaggactggaatgggtcggaatgatcgaccccagcgacagcgagacacactacaaccacatcttcaaggaccgcttcaccatcagcgccgacaccagcaagaataccgcctacctccagatgaactccctgagagccgaggacaccgccgtgtactactgcgccagaaacctgtatctgtggggccagggaaccctggtcacagtgtcatctacgcgtatccagaaccctgatcctgccgtgtaccagctgcgggatagcaagagcagcgacaagagcgtgtgtctgttcaccgacttcgacagccagaccaacgtgtcccagagcaaggactccgacgtgtacatcaccgataagtgcgtgctggacatgcggagcatggacttcaagagcaactccgccgtggcctggtccaacaagtccgatttcgcctgcgccaacgccttcaacaacagcattatccccgaggacacattcttcccaagcagcgacgtgccctgcgacgtgaagctggtggaaaagagcttcgagacagacaccaacctgaacttccagaacctgagcgtgatcggcttcagaatcctgctgctgaaagtggccggctttaacctgctgatgaccctgcggctgtggtccagccgcgccaagagaagcggatctggcgtgaagcagaccctgaatttcgacctgctgaagctggctggcgacgtggaatccaacccaggcccttctagaggccatatgaccgagtacaagcccacggtgcgcctcgccacccgcgacgacgtccccagggccgtacgcaccctcgccgccgcgttcgccgactaccccgccacgcgccacaccgtcgatccggaccgccacatcgagcgggtcaccgagctgcaagaactcttcctcacgcgcgtcgggctcgacatcggcaaggtgtgggtcgcggacgacggcgccgcggtggcggtctggaccacgccggagagcgtcgaagcgggggcggtgttcgccgagatcggcccgcgcatggccgagttgagcggttcccggctggccgcgcagcaacagatggaaggcctcctggcgccgcaccggcccaaggagcccgcgtggttcctggccaccgtcggcgtctcgcccgaccaccagggcaagggtctgggcagcgccgtcgtgctccccggagtggaggcggccgagcgcgccggggtgcccgccttcctggagacctccgcgccccgcaacctccccttctacgagcggctcggcttcaccgtcaccgccgacgtcgaggtgcccgaaggaccgcgcacctggtgcatgacccgcaagcccggtgcctga

SEQ ID NO: 37272 - DNA, 2607 bp, synthetic construct
  source 1..2607: mol_type = other DNA
atggccttaccagtgaccgccttgctcctgccgctggccttgctgctccacgccgccaggccgctcgagatccagaaccctgatcctgccgtgtaccagctgcgggatagcaagagcagcgacaagagcgtgtgtctgttcaccgacttcgacagccagaccaacgtgtcccagagcaaggactccgacgtgtacatcaccgataagtgcgtgctggacatgcggagcatggacttcaagagcaactccgccgtggcctggtccaacaagtccgatttcgcctgcgccaacgccttcaacaacagcattatccccgaggacacattcttcccaagcagcgacgtgccctgcgacgtgaagctggtggaaaagagcttcgagacagacaccaacctgaacttccagaacctgagcgtgatcggcttcagaatcctgctgctgaaagtggccggctttaacctgctgatgaccctgcggctgtggtccagcagggccaagcgatctggatctggagcaacaaacttctcactactcaaacaagcaggtgacgtggaggagaatcccgggcctactagcatggccttaccagtgaccgccttgctcctgccgctggccttgctgctccacgccgccaggccggacatccagatgacacagagccctagcagcctgtctgccagcgtgggagacagagtgaccatcacatgcaagagcagccagagcctgctggactccgatggcaagacctacctgaactggtatcagcagaagcccggcaaggcccctaagctgctgatctacctggtgtccaagctggatagcggcgtgcccagcagattttctggcagcggcagcggaaccgacttcaccctgacaatatccagcctccagcctgaggacttcgccacctactactgcttccaaggcacccactttccatacaccttcggccagggcaccaaggtggaaatcaaaagaggcggaggcggaagtggaggcggaggatctggcggcggaggctctgaagtgcagctggttgaatcaggcggaggactggttcagcctggcggatctctgagactgtcttgtgccgccagcggctacaccttcaccaactactggatgaactgggtccgacaggcccctggcaaaggactggaatgggtcggaatgatcgaccccagcgacagcgagacacactacaaccacatcttcaaggaccgcttcaccatcagcgccgacaccagcaagaataccgcctacctccagatgaactccctgagagccgaggacaccgccgtgtactactgcgccagaaacctgtatctgtggggccagggaaccctggtcacagtgtcatctacgcgtgaggacctgaagaacgtgttcccacctgaggtggccgtgttcgagcctagcaaggccgagatcgcccacacccagaaagccaccctcgtgtgcctggctaccggcttctaccccgaccatgtggaactgtcttggtgggtcaacggcaaagaggtgcacagcggcgtgtgtaccgacccccagccactgaaagaacagcccgccctgaacgacagccggtactgcctgagcagcagactgagagtgtccgccaccttctggcagaacccccggaaccacttcagatgccaggtgcagttctacggcctgagcgagaacgacgagtggacccaggacagagccaagcccgtgacccagatcgtgtctgccgaagcctggggcagagccgattgcggcatcaccagcgccagctaccaccagggcgtgctgagcgccaccatcctgtacgagatcctgctgggcaaggccaccctgtacgccgtgctggtgtctgccctggtgctgatggctatggtcaagcggaaggacagccggggacgcgccaagagaagcggatctggcgtgaagcagaccctgaatttcgacctgctgaagctggctggcgacgtggaatccaacccaggcccttctagaggccatatgaccgagtacaagcccacggtgcgcctcgccacccgcgacgacgtccccagggccgtacgcaccctcgccgccgcgttcgccgactaccccgccacgcgccacaccgtcgatccggaccgccacatcgagcgggtcaccgagctgcaagaactcttcctcacgcgcgtcgggctcgacatcggcaaggtgtgggtcgcggacgacggcgccgcggtggcggtctggaccacgccggagagcgtcgaagcgggggcggtgttcgccgagatcggcccgcgcatggccgagttgagcggttcccggctggccgcgcagcaacagatggaaggcctcctggcgccgcaccggcccaaggagcccgcgtggttcctggccaccgtcggcgtctcgcccgaccaccagggcaagggtctgggcagcgccgtcgtgctccccggagtggaggcggccgagcgcgccggggtgcccgccttcctggagacctccgcgccccgcaacctccccttctacgagcggctcggcttcaccgtcaccgccgacgtcgaggtgcccgaaggaccgcgcacctggtgcatgacccgcaagcccggtgcctga

SEQ ID NO: 37273 - DNA, 2286 bp, synthetic construct
  source 1..2286: mol_type = other DNA
atggccttaccagtgaccgccttgctcctgccgctggccttgctgctccacgccgccaggccgctcgagcagagttttgggttgttggaccctaaattgtgctatctgttggacggaatcctgttcatttacggagtgatcctgaccgcattgttcctgcgggttaagttttccagatccgcagacgcacccgcttaccaacaagggcagaaccaactctacaatgaacttaatttggggcggagggaagagtacgacgttctggacaaaaggaggggacgagatcccgagatgggcggaaagcctcagcgaaggaagaatccgcaagaggggctttataacgaactccagaaagataaaatggcagaagcctatagtgagattgggatgaagggagaaaggaggaggggtaaaggtcacgatgggttgtaccaaggattgagcacagccactaaagatacctatgatgcgctccacatgcaggccctgccgccaagaagggccaagcgatctggatctggagcaacaaacttctcactactcaaacaagcaggtgacgtggaggagaatcccgggcctactagcatggccttaccagtgaccgccttgctcctgccgctggccttgctgctccacgccgccaggccggacatccagatgacacagagccctagcagcctgtctgccagcgtgggagacagagtgaccatcacatgcaagagcagccagagcctgctggactccgatggcaagacctacctgaactggtatcagcagaagcccggcaaggcccctaagctgctgatctacctggtgtccaagctggatagcggcgtgcccagcagattttctggcagcggcagcggaaccgacttcaccctgacaatatccagcctccagcctgaggacttcgccacctactactgcttccaaggcacccactttccatacaccttcggccagggcaccaaggtggaaatcaaaagaggcggaggcggaagtggaggcggaggatctggcggcggaggctctgaagtgcagctggttgaatcaggcggaggactggttcagcctggcggatctctgagactgtcttgtgccgccagcggctacaccttcaccaactactggatgaactgggtccgacaggcccctggcaaaggactggaatgggtcggaatgatcgaccccagcgacagcgagacacactacaaccacatcttcaaggaccgcttcaccatcagcgccgacaccagcaagaataccgcctacctccagatgaactccctgagagccgaggacaccgccgtgtactactgcgccagaaacctgtatctgtggggccagggaaccctggtcacagtgtcatctacgcgtgagctgggagagcctcagctgtgctatatcctggacgccatcctgtttctgtacggcatcgtgctgaccctgctgtactgccggctgaagatccaagtgcggaaggccgccatcaccagctacgagaaatccgacggcgtgtacaccggcctgagcaccagaaatcaagagacatacgagacactgaagcacgaaaagcctccacaacgcgccaagagaagcggatctggcgtgaagcagaccctgaatttcgacctgctgaagctggctggcgacgtggaatccaacccaggcccttctagaggccatatgaccgagtacaagcccacggtgcgcctcgccacccgcgacgacgtccccagggccgtacgcaccctcgccgccgcgttcgccgactaccccgccacgcgccacaccgtcgatccggaccgccacatcgagcgggtcaccgagctgcaagaactcttcctcacgcgcgtcgggctcgacatcggcaaggtgtgggtcgcggacgacggcgccgcggtggcggtctggaccacgccggagagcgtcgaagcgggggcggtgttcgccgagatcggcccgcgcatggccgagttgagcggttcccggctggccgcgcagcaacagatggaaggcctcctggcgccgcaccggcccaaggagcccgcgtggttcctggccaccgtcggcgtctcgcccgaccaccagggcaagggtctgggcagcgccgtcgtgctccccggagtggaggcggccgagcgcgccggggtgcccgccttcctggagacctccgcgccccgcaacctccccttctacgagcggctcggcttcaccgtcaccgccgacgtcgaggtgcccgaaggaccgcgcacctggtgcatgacccgcaagcccggtgcctga

SEQ ID NO: 37274 - DNA, 2919 bp, synthetic construct; identical to SEQ ID NO: 37265
  source 1..2919: mol_type = other DNA

SEQ ID NO: 37275 - DNA, 2919 bp, synthetic construct; identical to SEQ ID NO: 37266
  source 1..2919: mol_type = other DNA

SEQ ID NO: 37276 - DNA, 2916 bp, synthetic construct
  source 1..2916: mol_type = other DNA
atggccttaccagtgaccgccttgctcctgccgctggccttgctgctccacgccgccaggccgctcgaggaggaggacctgaagaacgtgttcccacctgaggtggccgtgttcgagcctagcgaggccgagatcagccacacccagaaagccaccctcgtgtgcctggctaccggcttctaccccgaccatgtggaactgtcttggtgggtcaacggcaaagaggtgcacagcggcgtgtgtaccgacccccagccactgaaagaacagcccgccctgaacgacagccggtactgcctgagcagcagactgagagtgtccgccaccttctggcagaacccccggaaccacttcagatgccaggtgcagttctacggcctgagcgagaacgacgagtggacccaggacagagccaagcccgtgacccagatcgtgtctgccgaagcctggggcagagccgatgatgtgattaagatccactggcaggaaaagaagtccaacaccatcctgggcagccaggaaggcaacaccatgaagaccaacgacacctacatgaagttcagctggctgaccgtgcccgagaagtccctggacaaagaacacagatgcatcgtgcggcacgaaaacaacaagaacggcgtggaccaggaaatcatcttcccacccatcaagaccgatgtgattacaatggaccccaaggacaactgctccaaggacgccaacgataccctgctgctccagctgaccaacaccagcgcctactacatgtacttgttgctgctgctgaagtccgtggtgtacttcgccatcatcacatgctgcctgctgcggagaaccgccttctgctgcaacggcgagaagtctagggccaagcgatctggatctggagcaacaaacttctcactactcaaacaagcaggtgacgtggaggagaatcccgggcctactagcatggccttaccagtgaccgccttgctcctgccgctggccttgctgctccacgccgccaggccggacatccagatgacacagagccctagcagcctgtctgccagcgtgggagacagagtgaccatcacatgcaagagcagccagagcctgctggactccgatggcaagacctacctgaactggtatcagcagaagcccggcaaggcccctaagctgctgatctacctggtgtccaagctggatagcggcgtgcccagcagattttctggcagcggcagcggaaccgacttcaccctgacaatatccagcctccagcctgaggacttcgccacctactactgcttccaaggcacccactttccatacaccttcggccagggcaccaaggtggaaatcaaaagaggcggaggcggaagtggaggcggaggatctggcggcggaggctctgaagtgcagctggttgaatcaggcggaggactggttcagcctggcggatctctgagactgtcttgtgccgccagcggctacaccttcaccaactactggatgaactgggtccgacaggcccctggcaaaggactggaatgggtcggaatgatcgaccccagcgacagcgagacacactacaaccacatcttcaaggaccgcttcaccatcagcgccgacaccagcaagaataccgcctacctccagatgaactccctgagagccgaggacaccgccgtgtactactgcgccagaaacctgtatctgtggggccagggaaccctggtcacagtgtcatctacgcgtatccagaaccctgatcctgccgtgtaccagctgcgggatagcaagagcagcgacaagagcgtgtgtctgttcaccgacttcgacagccagaccaacgtgtcccagagcaaggactccgacgtgtacatcaccgataagtgcgtgctggacatgcggagcatggacttcaagagcaactccgccgtggcctggtccaacaagtccgatttcgcctgcgccaacgccttcaacaacagcattatccccgaggacacattcttcccaagccccgagagcagcgactccaccgaccacgtgaagcccaaagagacagagaacaccaagcagcccagcaagagctgccacaagcccaaggccatcgtgcacaccgagaaagtgaacatgatgagcctgaccgtgctgggcctgcggatgctgttcgccaaaaccgtggccgtgaacttcctgctgaccgccaagctgttcttcctccgcgccaagagaagcggatctggcgtgaagcagaccctgaatttcgacctgctgaagctggctggcgacgtggaatccaacccaggcccttctagaggccatatgaccgagtacaagcccacggtgcgcctcgccacccgcgacgacgtccccagggccgtacgcaccctcgccgccgcgttcgccgactaccccgccacgcgccacaccgtcgatccggaccgccacatcgagcgggtcaccgagctgcaagaactcttcctcacgcgcgtcgggctcgacatcggcaaggtgtgggtcgcggacgacggcgccgcggtggcggtctggaccacgccggagagcgtcgaagcgggggcggtgttcgccgagatcggcccgcgcatggccgagttgagcggttcccggctggccgcgcagcaacagatggaaggcctcctggcgccgcaccggcccaaggagcccgcgtggttcctggccaccgtcggcgtctcgcccgaccaccagggcaagggtctgggcagcgccgtcgtgctccccggagtggaggcggccgagcgcgccggggtgcccgccttcctggagacctccgcgccccgcaacctccccttctacgagcggctcggcttcaccgtcaccgccgacgtcgaggtgcccgaaggaccgcgcacctggtgcatgacccgcaagcccggtgcctga

SEQ ID NO: 37277 - DNA, 2916 bp, synthetic construct
  source 1..2916: mol_type = other DNA
atggccttaccagtgaccgccttgctcctgccgctggccttgctgctccacgccgccaggccgctcgagatccagaaccctgatcctgccgtgtaccagctgcgggatagcaagagcagcgacaagagcgtgtgtctgttcaccgacttcgacagccagaccaacgtgtcccagagcaaggactccgacgtgtacatcaccgataagtgcgtgctggacatgcggagcatggacttcaagagcaactccgccgtggcctggtccaacaagtccgatttcgcctgcgccaacgccttcaacaacagcattatccccgaggacacattcttcccaagccccgagagcagcgactccaccgaccacgtgaagcccaaagagacagagaacaccaagcagcccagcaagagctgccacaagcccaaggccatcgtgcacaccgagaaagtgaacatgatgagcctgaccgtgctgggcctgcggatgctgttcgccaaaaccgtggccgtgaacttcctgctgaccgccaagctgttcttcctcagggccaagcgatctggatctggagcaacaaacttctcactactcaaacaagcaggtgacgtggaggagaatcccgggcctactagcatggccttaccagtgaccgccttgctcctgccgctggccttgctgctccacgccgccaggccggacatccagatgacacagagccctagcagcctgtctgccagcgtgggagacagagtgaccatcacatgcaagagcagccagagcctgctggactccgatggcaagacctacctgaactggtatcagcagaagcccggcaaggcccctaagctgctgatctacctggtgtccaagctggatagcggcgtgcccagcagattttctggcagcggcagcggaaccgacttcaccctgacaatatccagcctccagcctgaggacttcgccacctactactgcttccaaggcacccactttccatacaccttcggccagggcaccaaggtggaaatcaaaagaggcggaggcggaagtggaggcggaggatctggcggcggaggctctgaagtgcagctggttgaatcaggcggaggactggttcagcctggcggatctctgagactgtcttgtgccgccagcggctacaccttcaccaactactggatgaactgggtccgacaggcccctggcaaaggactggaatgggtcggaatgatcgaccccagcgacagcgagacacactacaaccacatcttcaaggaccgcttcaccatcagcgccgacaccagcaagaataccgcctacctccagatgaactccctgagagccgaggacaccgccgtgtactactgcgccagaaacctgtatctgtggggccagggaaccctggtcacagtgtcatctacgcgtgaggaggacctgaagaacgtgttcccacctgaggtggccgtgttcgagcctagcgaggccgagatcagccacacccagaaagccaccctcgtgtgcctggctaccggcttctaccccgaccatgtggaactgtcttggtgggtcaacggcaaagaggtgcacagcggcgtgtgtaccgacccccagccactgaaagaacagcccgccctgaacgacagccggtactgcctgagcagcagactgagagtgtccgccaccttctggcagaacccccggaaccacttcagatgccaggtgcagttctacggcctgagcgagaacgacgagtggacccaggacagagccaagcccgtgacccagatcgtgtctgccgaagcctggggcagagccgatgatgtgattaagatccactggcaggaaaagaagtccaacaccatcctgggcagccaggaaggcaacaccatgaagaccaacgacacctacatgaagttcagctggctgaccgtgcccgagaagtccctggacaaagaacacagatgcatcgtgcggcacgaaaacaacaagaacggcgtggaccaggaaatcatcttcccacccatcaagaccgatgtgattacaatggaccccaaggacaactgctccaaggacgccaacgataccctgctgctccagctgaccaacaccagcgcctactacatgtacttgttgctgctgctgaagtccgtggtgtacttcgccatcatcacatgctgcctgctgcggagaaccgccttctgctgcaacggcgagaagtctcgcgccaagagaagcggatctggcgtgaagcagaccctgaatttcgacctgctgaagctggctggcgacgtggaatccaacccaggcccttctagaggccatatgaccgagtacaagcccacggtgcgcctcgccacccgcgacgacgtccccagggccgtacgcaccctcgccgccgcgttcgccgactaccccgccacgcgccacaccgtcgatccggaccgccacatcgagcgggtcaccgagctgcaagaactcttcctcacgcgcgtcgggctcgacatcggcaaggtgtgggtcgcggacgacggcgccgcggtggcggtctggaccacgccggagagcgtcgaagcgggggcggtgttcgccgagatcggcccgcgcatggccgagttgagcggttcccggctggccgcgcagcaacagatggaaggcctcctggcgccgcaccggcccaaggagcccgcgtggttcctggccaccgtcggcgtctcgcccgaccaccagggcaagggtctgggcagcgccgtcgtgctccccggagtggaggcggccgagcgcgccggggtgcccgccttcctggagacctccgcgccccgcaacctccccttctacgagcggctcggcttcaccgtcaccgccgacgtcgaggtgcccgaaggaccgcgcacctggtgcatgacccgcaagcccggtgcctga

SEQ ID NO: 37278 - DNA, 2607 bp, synthetic construct
  source 1..2607: mol_type = other DNA
atggccttaccagtgaccgccttgctcctgccgctggccttgctgctccacgccgccaggccgctcgaggaggacctgaagaacgtgttcccacctgaggtggccgtgttcgagcctagcgaggccgagatcagccacacccagaaagccaccctcgtgtgcctggctaccggcttctaccccgaccatgtggaactgtcttggtgggtcaacggcaaagaggtgcacagcggcgtgtctaccgacccccagccactgaaagaacagcccgccctgaacgacagccggtactgcctgagcagcagactgagagtgtccgccaccttctggcagaacccccggaaccacttcagatgccaggtgcagttctacggcctgagcgagaacgacgagtggacccaggacagagccaagcccgtgacccagatcgtgtctgccgaagcctggggcagagccgattgcggctttaccagcgagagctaccagcagggcgtgctgagcgccaccaacctgagcgtgatcggcttcagaatcctgctgctgaaagtggccggctttaacctgctgatgaccctgcggctgtggtccagcagggccaagcgatctggatctggagcaacaaacttctcactactcaaacaagcaggtgacgtggaggagaatcccgggcctactagcatggccttaccagtgaccgccttgctcctgccgctggccttgctgctccacgccgccaggccggacatccagatgacacagagccctagcagcctgtctgccagcgtgggagacagagtgaccatcacatgcaagagcagccagagcctgctggactccgatggcaagacctacctgaactggtatcagcagaagcccggcaaggcccctaagctgctgatctacctggtgtccaagctggatagcggcgtgcccagcagattttctggcagcggcagcggaaccgacttcaccctgacaatatccagcctccagcctgaggacttcgccacctactactgcttccaaggcacccactttccatacaccttcggccagggcaccaaggtggaaatcaaaagaggcggaggcggaagtggaggcggaggatctggcggcggaggctctgaagtgcagctggttgaatcaggcggaggactggttcagcctggcggatctctgagactgtcttgtgccgccagcggctacaccttcaccaactactggatgaactgggtccgacaggcccctggcaaaggactggaatgggtcggaatgatcgaccccagcgacagcgagacacactacaaccacatcttcaaggaccgcttcaccatcagcgccgacaccagcaagaataccgcctacctccagatgaactccctgagagccgaggacaccgccgtgtactactgcgccagaaacctgtatctgtggggccagggaaccctggtcacagtgtcatctacgcgtatccagaaccctgatcctgccgtgtaccagctgcgggatagcaagagcagcgacaagagcgtgtgtctgttcaccgacttcgacagccagaccaacgtgtcccagagcaaggactccgacgtgtacatcaccgataagaccgtgctggacatgcggagcatggacttcaagagcaactccgccgtggcctggtccaacaagtccgatttcgcctgcgccaacgccttcaacaacagcattatccccgaggacacattcttcccaagccccgagagcagctgcgacgtgaagctggtggaaaagagcttcgagacagacaccaacctgaacttccagatcctgtacgagatcctgctgggcaaggccaccctgtacgccgtgctggtgtctgccctggtgctgatggctatggtcaagcggaaggacagccggggacgcgccaagagaagcggatctggcgtgaagcagaccctgaatttcgacctgctgaagctggctggcgacgtggaatccaacccaggcccttctagaggccatatgaccgagtacaagcccacggtgcgcctcgccacccgcgacgacgtccccagggccgtacgcaccctcgccgccgcgttcgccgactaccccgccacgcgccacaccgtcgatccggaccgccacatcgagcgggtcaccgagctgcaagaactcttcctcacgcgcgtcgggctcgacatcggcaaggtgtgggtcgcggacgacggcgccgcggtggcggtctggaccacgccggagagcgtcgaagcgggggcggtgttcgccgagatcggcccgcgcatggccgagttgagcggttcccggctggccgcgcagcaacagatggaaggcctcctggcgccgcaccggcccaaggagcccgcgtggttcctggccaccgtcggcgtctcgcccgaccaccagggcaagggtctgggcagcgccgtcgtgctccccggagtggaggcggccgagcgcgccggggtgcccgccttcctggagacctccgcgccccgcaacctccccttctacgagcggctcggcttcaccgtcaccgccgacgtcgaggtgcccgaaggaccgcgcacctggtgcatgacccgcaagcccggtgcctga

SEQ ID NO: 37279 - DNA, 2607 bp, synthetic construct
  source 1..2607: mol_type = other DNA
atggccttaccagtgaccgccttgctcctgccgctggccttgctgctccacgccgccaggccgctcgagatccagaaccctgatcctgccgtgtaccagctgcgggatagcaagagcagcgacaagagcgtgtgtctgttcaccgacttcgacagccagaccaacgtgtcccagagcaaggactccgacgtgtacatcaccgataagaccgtgctggacatgcggagcatggacttcaagagcaactccgccgtggcctggtccaacaagtccgatttcgcctgcgccaacgccttcaacaacagcattatccccgaggacacattcttcccaagccccgagagcagctgcgacgtgaagctggtggaaaagagcttcgagacagacaccaacctgaacttccagatcctgtacgagatcctgctgggcaaggccaccctgtacgccgtgctggtgtctgccctggtgctgatggctatggtcaagcggaaggacagccggggaagggccaagcgatctggatctggagcaacaaacttctcactactcaaacaagcaggtgacgtggaggagaatcccgggcctactagcatggccttaccagtgaccgccttgctcctgccgctggccttgctgctccacgccgccaggccggacatccagatgacacagagccctagcagcctgtctgccagcgtgggagacagagtgaccatcacatgcaagagcagccagagcctgctggactccgatggcaagacctacctgaactggtatcagcagaagcccggcaaggcccctaagctgctgatctacctggtgtccaagctggatagcggcgtgcccagcagattttctggcagcggcagcggaaccgacttcaccctgacaatatccagcctccagcctgaggacttcgccacctactactgcttccaaggcacccactttccatacaccttcggccagggcaccaaggtggaaatcaaaagaggcggaggcggaagtggaggcggaggatctggcggcggaggctctgaagtgcagctggttgaatcaggcggaggactggttcagcctggcggatctctgagactgtcttgtgccgccagcggctacaccttcaccaactactggatgaactgggtccgacaggcccctggcaaaggactggaatgggtcggaatgatcgaccccagcgacagcgagacacactacaaccacatcttcaaggaccgcttcaccatcagcgccgacaccagcaagaataccgcctacctccagatgaactccctgagagccgaggacaccgccgtgtactactgcgccagaaacctgtatctgtggggccagggaaccctggtcacagtgtcatctacgcgtgaggacctgaagaacgtgttcccacctgaggtggccgtgttcgagcctagcgaggccgagatcagccacacccagaaagccaccctcgtgtgcctggctaccggcttctaccccgaccatgtggaactgtcttggtgggtcaacggcaaagaggtgcacagcggcgtgtctaccgacccccagccactgaaagaacagcccgccctgaacgacagccggtactgcctgagcagcagactgagagtgtccgccaccttctggcagaacccccggaaccacttcagatgccaggtgcagttctacggcctgagcgagaacgacgagtggacccaggacagagccaagcccgtgacccagatcgtgtctgccgaagcctggggcagagccgattgcggctttaccagcgagagctaccagcagggcgtgctgagcgccaccaacctgagcgtgatcggcttcagaatcctgctgctgaaagtggccggctttaacctgctgatgaccctgcggctgtggtccagccgcgccaagagaagcggatctggcgtgaagcagaccctgaatttcgacctgctgaagctggctggcgacgtggaatccaacccaggcccttctagaggccatatgaccgagtacaagcccacggtgcgcctcgccacccgcgacgacgtccccagggccgtacgcaccctcgccgccgcgttcgccgactaccccgccacgcgccacaccgtcgatccggaccgccacatcgagcgggtcaccgagctgcaagaactcttcctcacgcgcgtcgggctcgacatcggcaaggtgtgggtcgcggacgacggcgccgcggtggcggtctggaccacgccggagagcgtcgaagcgggggcggtgttcgccgagatcggcccgcgcatggccgagttgagcggttcccggctggccgcgcagcaacagatggaaggcctcctggcgccgcaccggcccaaggagcccgcgtggttcctggccaccgtcggcgtctcgcccgaccaccagggcaagggtctgggcagcgccgtcgtgctccccggagtggaggcggccgagcgcgccggggtgcccgccttcctggagacctccgcgccccgcaacctccccttctacgagcggctcggcttcaccgtcaccgccgacgtcgaggtgcccgaaggaccgcgcacctggtgcatgacccgcaagcccggtgcctga

SEQ ID NO: 37280 - DNA, 2607 bp, synthetic construct
  source 1..2607: mol_type = other DNA
atggccttaccagtgaccgccttgctcctgccgctggccttgctgctccacgccgccaggccgctcgaggaggacctgaagaacgtgttcccacctgaggtggccgtgttcgagcctagcgaggccgagatcagccacacccagaaagccaccctcgtgtgcctggctaccggcttctaccccgaccatgtggaactgtcttggtgggtcaacggcaaagaggtgcacagcggcgtgtgtaccgacccccagccactgaaagaacagcccgccctgaacgacagccggtactgcctgagcagcagactgagagtgtccgccaccttctggcagaacccccggaaccacttcagatgccaggtgcagttctacggcctgagcgagaacgacgagtggacccaggacagagccaagcccgtgacccagatcgtgtctgccgaagcctggggcagagccgattgcgacgtgaagctggtggaaaagagcttcgagacagacaccaacctgaacttccagaacctgagcgtgatcggcttcagaatcctgctgctgaaagtggccggctttaacctgctgatgaccctgcggctgtggtccagcagggccaagcgatctggatctggagcaacaaacttctcactactcaaacaagcaggtgacgtggaggagaatcccgggcctactagcatggccttaccagtgaccgccttgctcctgccgctggccttgctgctccacgccgccaggccggacatccagatgacacagagccctagcagcctgtctgccagcgtgggagacagagtgaccatcacatgcaagagcagccagagcctgctggactccgatggcaagacctacctgaactggtatcagcagaagcccggcaaggcccctaagctgctgatctacctggtgtccaagctggatagcggcgtgcccagcagattttctggcagcggcagcggaaccgacttcaccctgacaatatccagcctccagcctgaggacttcgccacctactactgcttccaaggcacccactttccatacaccttcggccagggcaccaaggtggaaatcaaaagaggcggaggcggaagtggaggcggaggatctggcggcggaggctctgaagtgcagctggttgaatcaggcggaggactggttcagcctggcggatctctgagactgtcttgtgccgccagcggctacaccttcaccaactactggatgaactgggtccgacaggcccctggcaaaggactggaatgggtcggaatgatcgaccccagcgacagcgagacacactacaaccacatcttcaaggaccgcttcaccatcagcgccgacaccagcaagaataccgcctacctccagatgaactccctgagagccgaggacaccgccgtgtactactgcgccagaaacctgtatctgtggggccagggaaccctggtcacagtgtcatctacgcgtatccagaaccctgatcctgccgtgtaccagctgcgggatagcaagagcagcgacaagagcgtgtgtctgttcaccgacttcgacagccagaccaacgtgtcccagagcaaggactccgacgtgtacatcaccgataagtgcgtgctggacatgcggagcatggacttcaagagcaactccgccgtggcctggtccaacaagtccgatttcgcctgcgccaacgccttcaacaacagcattatccccgaggacacattcttcccaagccccgagagcagctgcggctttaccagcgagagctaccagcagggcgtgctgagcgccaccatcctgtacgagatcctgctgggcaaggccaccctgtacgccgtgctggtgtctgccctggtgctgatggctatggtcaagcggaaggacagccggggacgcgccaagagaagcggatctggcgtgaagcagaccctgaatttcgacctgctgaagctggctggcgacgtggaatccaacccaggcccttctagaggccatatgaccgagtacaagcccacggtgcgcctcgccacccgcgacgacgtccccagggccgtacgcaccctcgccgccgcgttcgccgactaccccgccacgcgccacaccgtcgatccggaccgccacatcgagcgggtcaccgagctgcaagaactcttcctcacgcgcgtcgggctcgacatcggcaaggtgtgggtcgcggacgacggcgccgcggtggcggtctggaccacgccggagagcgtcgaagcgggggcggtgttcgccgagatcggcccgcgcatggccgagttgagcggttcccggctggccgcgcagcaacagatggaaggcctcctggcgccgcaccggcccaaggagcccgcgtggttcctggccaccgtcggcgtctcgcccgaccaccagggcaagggtctgggcagcgccgtcgtgctccccggagtggaggcggccgagcgcgccggggtgcccgccttcctggagacctccgcgccccgcaacctccccttctacgagcggctcggcttcaccgtcaccgccgacgtcgaggtgcccgaaggaccgcgcacctggtgcatgacccgcaagcccggtgcctga

SEQ ID NO: 37281 - DNA, 2607 bp, synthetic construct
  source 1..2607: mol_type = other DNA
atggccttaccagtgaccgccttgctcctgccgctggccttgctgctccacgccgccaggccgctcgaggaggacctgaagaacgtgttcccacctgaggtggccgtgttcgagcctagcgaggccgagatcagccacacccagaaagccaccctcgtgtgcctggctaccggcttctaccccgaccatgtggaactgtcttggtgggtcaacggcaaagaggtgcacagcggcgtgtctaccgacccccagccactgaaagaacagcccgccctgaacgacagccggtactgcctgagcagcagactgagagtgtccgccaccttctggcagaacccccggaaccacttcagatgccaggtgcagttctacggcctgagcgagaacgacgagtggacccaggacagagccaagcccgtgacccagatcgtgtctgccgaagcctggggcagagccgattgcgacgtgaagctggtggaaaagagcttcgagacagacaccaacctgaacttccagaacctgagcgtgatcggcttcagaatcctgctgctgaaagtggccggctttaacctgctgatgaccctgcggctgtggtccagcagggccaagcgatctggatctggagcaacaaacttctcactactcaaacaagcaggtgacgtggaggagaatcccgggcctactagcatggccttaccagtgaccgccttgctcctgccgctggccttgctgctccacgccgccaggccggacatccagatgacacagagccctagcagcctgtctgccagcgtgggagacagagtgaccatcacatgcaagagcagccagagcctgctggactccgatggcaagacctacctgaactggtatcagcagaagcccggcaaggcccctaagctgctgatctacctggtgtccaagctggatagcggcgtgcccagcagattttctggcagcggcagcggaaccgacttcaccctgacaatatccagcctccagcctgaggacttcgccacctactactgcttccaaggcacccactttccatacaccttcggccagggcaccaaggtggaaatcaaaagaggcggaggcggaagtggaggcggaggatctggcggcggaggctctgaagtgcagctggttgaatcaggcggaggactggttcagcctggcggatctctgagactgtcttgtgccgccagcggctacaccttcaccaactactggatgaactgggtccgacaggcccctggcaaaggactggaatgggtcggaatgatcgaccccagcgacagcgagacacactacaaccacatcttcaaggaccgcttcaccatcagcgccgacaccagcaagaataccgcctacctccagatgaactccctgagagccgaggacaccgccgtgtactactgcgccagaaacctgtatctgtggggccagggaaccctggtcacagtgtcatctacgcgtatccagaaccctgatcctgccgtgtaccagctgcgggatagcaagagcagcgacaagagcgtgtgtctgttcaccgacttcgacagccagaccaacgtgtcccagagcaaggactccgacgtgtacatcaccgataagaccgtgctggacatgcggagcatggacttcaagagcaactccgccgtggcctggtccaacaagtccgatttcgcctgcgccaacgccttcaacaacagcattatccccgaggacacattcttcccaagccccgagagcagctgcggctttaccagcgagagctaccagcagggcgtgctgagcgccaccatcctgtacgagatcctgctgggcaaggccaccctgtacgccgtgctggtgtctgccctggtgctgatggctatggtcaagcggaaggacagccggggacgcgccaagagaagcggatctggcgtgaagcagaccctgaatttcgacctgctgaagctggctggcgacgtggaatccaacccaggcccttctagaggccatatgaccgagtacaagcccacggtgcgcctcgccacccgcgacgacgtccccagggccgtacgcaccctcgccgccgcgttcgccgactaccccgccacgcgccacaccgtcgatccggaccgccacatcgagcgggtcaccgagctgcaagaactcttcctcacgcgcgtcgggctcgacatcggcaaggtgtgggtcgcggacgacggcgccgcggtggcggtctggaccacgccggagagcgtcgaagcgggggcggtgttcgccgagatcggcccgcgcatggccgagttgagcggttcccggctggccgcgcagcaacagatggaaggcctcctggcgccgcaccggcccaaggagcccgcgtggttcctggccaccgtcggcgtctcgcccgaccaccagggcaagggtctgggcagcgccgtcgtgctccccggagtggaggcggccgagcgcgccggggtgcccgccttcctggagacctccgcgccccgcaacctccccttctacgagcggctcggcttcaccgtcaccgccgacgtcgaggtgcccgaaggaccgcgcacctggtgcatgacccgcaagcccggtgcctga

SEQ ID NO: 37282 - DNA, 2916 bp, synthetic construct
  source 1..2916: mol_type = other DNA
atggccttaccagtgaccgccttgctcctgccgctggccttgctgctccacgccgccaggccgctcgaggaggaggacctgaagaacgtgttcccacctgaggtggccgtgttcgagcctagcgaggccgagatcagccacacccagaaagccaccctcgtgtgcctggctaccggcttctaccccgaccatgtggaactgtcttggtgggtcaacggcaaagaggtgcacagcggcgtgtctaccgacccccagccactgaaagaacagcccgccctgaacgacagccggtactgcctgagcagcagactgagagtgtccgccaccttctggcagaacccccggaaccacttcagatgccaggtgcagttctacggcctgagcgagaacgacgagtggacccaggacagagccaagcccgtgacccagatcgtgtctgccgaagcctggggcagagccgatgatgtgattaagatccactggcaggaaaagaagtccaacaccatcctgggcagccaggaaggcaacaccatgaagaccaacgacacctacatgaagttcagctggctgaccgtgcccgagaagtccctggacaaagaacacagatgcatcgtgcggcacgaaaacaacaagaacggcgtggaccaggaaatcatcttcccacccatcaagaccgatgtgattacaatggaccccaaggacaactgctccaaggacgccaacgataccctgctgctccagctgaccaacaccagcgcctactacatgtacttgttgctgctgctgaagtccgtggtgtacttcgccatcatcacatgctgcctgctgcggagaaccgccttctgctgcaacggcgagaagtctagggccaagcgatctggatctggagcaacaaacttctcactactcaaacaagcaggtgacgtggaggagaatcccgggcctactagcatggccttaccagtgaccgccttgctcctgccgctggccttgctgctccacgccgccaggccggacatccagatgacacagagccctagcagcctgtctgccagcgtgggagacagagtgaccatcacatgcaagagcagccagagcctgctggactccgatggcaagacctacctgaactggtatcagcagaagcccggcaaggcccctaagctgctgatctacctggtgtccaagctggatagcggcgtgcccagcagattttctggcagcggcagcggaaccgacttcaccctgacaatatccagcctccagcctgaggacttcgccacctactactgcttccaaggcacccactttccatacaccttcggccagggcaccaaggtggaaatcaaaagaggcggaggcggaagtggaggcggaggatctggcggcggaggctctgaagtgcagctggttgaatcaggcggaggactggttcagcctggcggatctctgagactgtcttgtgccgccagcggctacaccttcaccaactactggatgaactgggtccgacaggcccctggcaaaggactggaatgggtcggaatgatcgaccccagcgacagcgagacacactacaaccacatcttcaaggaccgcttcaccatcagcgccgacaccagcaagaataccgcctacctccagatgaactccctgagagccgaggacaccgccgtgtactactgcgccagaaacctgtatctgtggggccagggaaccctggtcacagtgtcatctacgcgtatccagaaccctgatcctgccgtgtaccagctgcgggatagcaagagcagcgacaagagcgtgtgtctgttcaccgacttcgacagccagaccaacgtgtcccagagcaaggactccgacgtgtacatcaccgataagaccgtgctggacatgcggagcatggacttcaagagcaactccgccgtggcctggtccaacaagtccgatttcgcctgcgccaacgccttcaacaacagcattatccccgaggacacattcttcccaagccccgagagcagcgactccaccgaccacgtgaagcccaaagagacagagaacaccaagcagcccagcaagagctgccacaagcccaaggccatcgtgcacaccgagaaagtgaacatgatgagcctgaccgtgctgggcctgcggatgctgttcgccaaaaccgtggccgtgaacttcctgctgaccgccaagctgttcttcctccgcgccaagagaagcggatctggcgtgaagcagaccctgaatttcgacctgctgaagctggctggcgacgtggaatccaacccaggcccttctagaggccatatgaccgagtacaagcccacggtgcgcctcgccacccgcgacgacgtccccagggccgtacgcaccctcgccgccgcgttcgccgactaccccgccacgcgccacaccgtcgatccggaccgccacatcgagcgggtcaccgagctgcaagaactcttcctcacgcgcgtcgggctcgacatcggcaaggtgtgggtcgcggacgacggcgccgcggtggcggtctggaccacgccggagagcgtcgaagcgggggcggtgttcgccgagatcggcccgcgcatggccgagttgagcggttcccggctggccgcgcagcaacagatggaaggcctcctggcgccgcaccggcccaaggagcccgcgtggttcctggccaccgtcggcgtctcgcccgaccaccagggcaagggtctgggcagcgccgtcgtgctccccggagtggaggcggccgagcgcgccggggtgcccgccttcctggagacctccgcgccccgcaacctccccttctacgagcggctcggcttcaccgtcaccgccgacgtcgaggtgcccgaaggaccgcgcacctggtgcatgacccgcaagcccggtgcctga

SEQ ID NO: 37283 - DNA, 2607 bp, synthetic construct
  source 1..2607: mol_type = other DNA
atggccttaccagtgaccgccttgctcctgccgctggccttgctgctccacgccgccaggccgctcgaggaggacctgaagaacgtgttcccacctgaggtggccgtgttcgagcctagcgaggccgagatcagccacacccagaaagccaccctcgtgtgcctggctaccggcttctaccccgaccatgtggaactgtcttggtgggtcaacggcaaagaggtgcacagcggcgtgtgtaccgacccccagccactgaaagaacagcccgccctgaacgacagccggtactgcctgagcagcagactgagagtgtccgccaccttctggcagaacccccggaaccacttcagatgccaggtgcagttctacggcctgagcgagaacgacgagtggacccaggacagagccaagcccgtgacccagatcgtgtctgccgaagcctggggcagagccgattgcggctttaccagcgagagctaccagcagggcgtgctgagcgccaccaacctgagcgtgatcggcttcagaatcctgctgctgaaagtggccggctttaacctgctgatgaccctgcggctgtggtccagcagggccaagcgatctggatctggagcaacaaacttctcactactcaaacaagcaggtgacgtggaggagaatcccgggcctactagcatggccttaccagtgaccgccttgctcctgccgctggccttgctgctccacgccgccaggccggacatccagatgacacagagccctagcagcctgtctgccagcgtgggagacagagtgaccatcacatgcaagagcagccagagcctgctggactccgatggcaagacctacctgaactggtatcagcagaagcccggcaaggcccctaagctgctgatctacctggtgtccaagctggatagcggcgtgcccagcagattttctggcagcggcagcggaaccgacttcaccctgacaatatccagcctccagcctgaggacttcgccacctactactgcttccaaggcacccactttccatacaccttcggccagggcaccaaggtggaaatcaaaagaggcggaggcggaagtggaggcggaggatctggcggcggaggctctgaagtgcagctggttgaatcaggcggaggactggttcagcctggcggatctctgagactgtcttgtgccgccagcggctacaccttcaccaactactggatgaactgggtccgacaggcccctggcaaaggactggaatgggtcggaatgatcgaccccagcgacagcgagacacactacaaccacatcttcaaggaccgcttcaccatcagcgccgacaccagcaagaataccgcctacctccagatgaactccctgagagccgaggacaccgccgtgtactactgcgccagaaacctgtatctgtggggccagggaaccctggtcacagtgtcatctacgcgtatccagaaccctgatcctgccgtgtaccagctgcgggatagcaagagcagcgacaagagcgtgtgtctgttcaccgacttcgacagccagaccaacgtgtcccagagcaaggactccgacgtgtacatcaccgataagtgcgtgctggacatgcggagcatggacttcaagagcaactccgccgtggcctggtccaacaagtccgatttcgcctgcgccaacgccttcaacaacagcattatccccgaggacacattcttcccaagccccgagagcagctgcgacgtgaagctggtggaaaagagcttcgagacagacaccaacctgaacttccagatcctgtacgagatcctgctgggcaaggccaccctgtacgccgtgctggtgtctgccctggtgctgatggctatggtcaagcggaaggacagccggggacgcgccaagagaagcggatctggcgtgaagcagaccctgaatttcgacctgctgaagctggctggcgacgtggaatccaacccaggcccttctagaggccatatgaccgagtacaagcccacggtgcgcctcgccacccgcgacgacgtccccagggccgtacgcaccctcgccgccgcgttcgccgactaccccgccacgcgccacaccgtcgatccggaccgccacatcgagcgggtcaccgagctgcaagaactcttcctcacgcgcgtcgggctcgacatcggcaaggtgtgggtcgcggacgacggcgccgcggtggcggtctggaccacgccggagagcgtcgaagcgggggcggtgttcgccgagatcggcccgcgcatggccgagttgagcggttcccggctggccgcgcagcaacagatggaaggcctcctggcgccgcaccggcccaaggagcccgcgtggttcctggccaccgtcggcgtctcgcccgaccaccagggcaagggtctgggcagcgccgtcgtgctccccggagtggaggcggccgagcgcgccggggtgcccgccttcctggagacctccgcgccccgcaacctccccttctacgagcggctcggcttcaccgtcaccgccgacgtcgaggtgcccgaaggaccgcgcacctggtgcatgacccgcaagcccggtgcctga

SEQ ID NO: 37284 - DNA, 2694 bp, synthetic construct
  source 1..2694: mol_type = other DNA
atggccttaccagtgaccgccttgctcctgccgctggccttgctgctccacgccgccaggccgctcgaggaggaggacctgaagaacgtgttcccacctgaggtggccgtgttcgagcctagcgaggccgagatcagccacacccagaaagccaccctcgtgtgcctggctaccggcttctaccccgaccatgtggaactgtcttggtgggtcaacggcaaagaggtgcacagcggcgtgtgtaccgacccccagccactgaaagaacagcccgccctgaacgacagccggtactgcctgagcagcagactgagagtgtccgccaccttctggcagaacccccggaaccacttcagatgccaggtgcagttctacggcctgagcgagaacgacgagtggacccaggacagagccaagcccgtgacccagatcgtgtctgccgaagcctggggcagagccgattgcggctttaccagcgagagctaccagcagggcgtgctgagcgccaccaacctgagcgtgatcggcttcagaatcctgctgctgaaagtggccggctttaacctgctgatgaccctgcggctgtggtccagcagggccaagcgatctggatctggagcaacaaacttctcactactcaaacaagcaggtgacgtggaggagaatcccgggcctactagcatggccttaccagtgaccgccttgctcctgccgctggccttgctgctccacgccgccaggccggacatccagatgacacagagccctagcagcctgtctgccagcgtgggagacagagtgaccatcacatgcaagagcagccagagcctgctggactccgatggcaagacctacctgaactggtatcagcagaagcccggcaaggcccctaagctgctgatctacctggtgtccaagctggatagcggcgtgcccagcagattttctggcagcggcagcggaaccgacttcaccctgacaatatccagcctccagcctgaggacttcgccacctactactgcttccaaggcacccactttccatacaccttcggccagggcaccaaggtggaaatcaaaagaggcggaggcggaagtggaggcggaggatctggcggcggaggctctgaagtgcagctggttgaatcaggcggaggactggttcagcctggcggatctctgagactgtcttgtgccgccagcggctacaccttcaccaactactggatgaactgggtccgacaggcccctggcaaaggactggaatgggtcggaatgatcgaccccagcgacagcgagacacactacaaccacatcttcaaggaccgcttcaccatcagcgccgacaccagcaagaataccgcctacctccagatgaactccctgagagccgaggacaccgccgtgtactactgcgccagaaacctgtatctgtggggccagggaaccctggtcacagtgtcatctacgcgtggacagcctaaggccaatcctaccgtgacactgttccctccaagcagcgaagaactccaggccaacaaggccacacttgtgtgcctgatctccgacttctaccctggggctgtgacagtggcttggaaggccgatggatctcctgtgaaagccggcgtggaaaccaccaagccatccaagcagagcaacaacaaatacgccgccagctcctacctgagcctgacacctgagcagtggaagtcccacagatcctacagctgccaagtgacccacgaaggcagcaccgtggaaaagacagtggcccctacagagtgcagccccatcaagaccgatgtgattacaatggaccccaaggacaactgctccaaggacgccaacgataccctgctgctccagctgaccaacaccagcgcctactacatgtacttgttgctgctgctgaagtccgtggtgtacttcgccatcatcacatgctgcctgctgcggagaaccgccttctgctgcaacggcgagaagtctcgcgccaagagaagcggatctggcgtgaagcagaccctgaatttcgacctgctgaagctggctggcgacgtggaatccaacccaggcccttctagaggccatatgaccgagtacaagcccacggtgcgcctcgccacccgcgacgacgtccccagggccgtacgcaccctcgccgccgcgttcgccgactaccccgccacgcgccacaccgtcgatccggaccgccacatcgagcgggtcaccgagctgcaagaactcttcctcacgcgcgtcgggctcgacatcggcaaggtgtgggtcgcggacgacggcgccgcggtggcggtctggaccacgccggagagcgtcgaagcgggggcggtgttcgccgagatcggcccgcgcatggccgagttgagcggttcccggctggccgcgcagcaacagatggaaggcctcctggcgccgcaccggcccaaggagcccgcgtggttcctggccaccgtcggcgtctcgcccgaccaccagggcaagggtctgggcagcgccgtcgtgctccccggagtggaggcggccgagcgcgccggggtgcccgccttcctggagacctccgcgccccgcaacctccccttctacgagcggctcggcttcaccgtcaccgccgacgtcgaggtgcccgaaggaccgcgcacctggtgcatgacccgcaagcccggtgcctga

SEQ ID NO: 37285 - DNA, 2694 bp, synthetic construct
  source 1..2694: mol_type = other DNA
atggccttaccagtgaccgccttgctcctgccgctggccttgctgctccacgccgccaggccgctcgagggacagcctaaggccaatcctaccgtgacactgttccctccaagcagcgaagaactccaggccaacaaggccacacttgtgtgcctgatctccgacttctaccctggggctgtgacagtggcttggaaggccgatggatctcctgtgaaagccggcgtggaaaccaccaagccatccaagcagagcaacaacaaatacgccgccagctcctacctgagcctgacacctgagcagtggaagtcccacagatcctacagctgccaagtgacccacgaaggcagcaccgtggaaaagacagtggcccctacagagtgcagccccatcaagaccgatgtgattacaatggaccccaaggacaactgctccaaggacgccaacgataccctgctgctccagctgaccaacaccagcgcctactacatgtacttgttgctgctgctgaagtccgtggtgtacttcgccatcatcacatgctgcctgctgcggagaaccgccttctgctgcaacggcgagaagtctagggccaagcgatctggatctggagcaacaaacttctcactactcaaacaagcaggtgacgtggaggagaatcccgggcctactagcatggccttaccagtgaccgccttgctcctgccgctggccttgctgctccacgccgccaggccggacatccagatgacacagagccctagcagcctgtctgccagcgtgggagacagagtgaccatcacatgcaagagcagccagagcctgctggactccgatggcaagacctacctgaactggtatcagcagaagcccggcaaggcccctaagctgctgatctacctggtgtccaagctggatagcggcgtgcccagcagattttctggcagcggcagcggaaccgacttcaccctgacaatatccagcctccagcctgaggacttcgccacctactactgcttccaaggcacccactttccatacaccttcggccagggcaccaaggtggaaatcaaaagaggcggaggcggaagtggaggcggaggatctggcggcggaggctctgaagtgcagctggttgaatcaggcggaggactggttcagcctggcggatctctgagactgtcttgtgccgccagcggctacaccttcaccaactactggatgaactgggtccgacaggcccctggcaaaggactggaatgggtcggaatgatcgaccccagcgacagcgagacacactacaaccacatcttcaaggaccgcttcaccatcagcgccgacaccagcaagaataccgcctacctccagatgaactccctgagagccgaggacaccgccgtgtactactgcgccagaaacctgtatctgtggggccagggaaccctggtcacagtgtcatctacgcgtgaggaggacctgaagaacgtgttcccacctgaggtggccgtgttcgagcctagcgaggccgagatcagccacacccagaaagccaccctcgtgtgcctggctaccggcttctaccccgaccatgtggaactgtcttggtgggtcaacggcaaagaggtgcacagcggcgtgtgtaccgacccccagccactgaaagaacagcccgccctgaacgacagccggtactgcctgagcagcagactgagagtgtccgccaccttctggcagaacccccggaaccacttcagatgccaggtgcagttctacggcctgagcgagaacgacgagtggacccaggacagagccaagcccgtgacccagatcgtgtctgccgaagcctggggcagagccgattgcggctttaccagcgagagctaccagcagggcgtgctgagcgccaccaacctgagcgtgatcggcttcagaatcctgctgctgaaagtggccggctttaacctgctgatgaccctgcggctgtggtccagccgcgccaagagaagcggatctggcgtgaagcagaccctgaatttcgacctgctgaagctggctggcgacgtggaatccaacccaggcccttctagaggccatatgaccgagtacaagcccacggtgcgcctcgccacccgcgacgacgtccccagggccgtacgcaccctcgccgccgcgttcgccgactaccccgccacgcgccacaccgtcgatccggaccgccacatcgagcgggtcaccgagctgcaagaactcttcctcacgcgcgtcgggctcgacatcggcaaggtgtgggtcgcggacgacggcgccgcggtggcggtctggaccacgccggagagcgtcgaagcgggggcggtgttcgccgagatcggcccgcgcatggccgagttgagcggttcccggctggccgcgcagcaacagatggaaggcctcctggcgccgcaccggcccaaggagcccgcgtggttcctggccaccgtcggcgtctcgcccgaccaccagggcaagggtctgggcagcgccgtcgtgctccccggagtggaggcggccgagcgcgccggggtgcccgccttcctggagacctccgcgccccgcaacctccccttctacgagcggctcggcttcaccgtcaccgccgacgtcgaggtgcccgaaggaccgcgcacctggtgcatgacccgcaagcccggtgcctga

SEQ ID NO: 37286 - DNA, 2685 bp, synthetic construct
  source 1..2685: mol_type = other DNA
atggccttaccagtgaccgccttgctcctgccgctggccttgctgctccacgccgccaggccgctcgaggaggcctctacaaagggaccctccgtgtttcctctggctcccagcagcaagtctacaagcggaggaacagccgctctgggctgcctggtcaaggattactttcccgagcctgtgaccgtgtcctggaatagcggagcactgacaagcggcgtgcacacctttccagccgtgctgcaaagcagcggcctgtactctctgagcagcgtggtcacagtgcctagctctagcctgggcacccagacctacatctgcaatgtgaaccacaagcctagcaacaccaaggtggacaagagagtggaacccaagagctgtcccatcaagaccgatgtgattacaatggaccccaaggacaactgctccaaggacgccaacgataccctgctgctccagctgaccaacaccagcgcctactacatgtacttgttgctgctgctgaagtccgtggtgtacttcgccatcatcacatgctgcctgctgcggagaaccgccttctgctgcaacggcgagaagtctagggccaagcgatctggatctggagcaacaaacttctcactactcaaacaagcaggtgacgtggaggagaatcccgggcctactagcatggccttaccagtgaccgccttgctcctgccgctggccttgctgctccacgccgccaggccggacatccagatgacacagagccctagcagcctgtctgccagcgtgggagacagagtgaccatcacatgcaagagcagccagagcctgctggactccgatggcaagacctacctgaactggtatcagcagaagcccggcaaggcccctaagctgctgatctacctggtgtccaagctggatagcggcgtgcccagcagattttctggcagcggcagcggaaccgacttcaccctgacaatatccagcctccagcctgaggacttcgccacctactactgcttccaaggcacccactttccatacaccttcggccagggcaccaaggtggaaatcaaaagaggcggaggcggaagtggaggcggaggatctggcggcggaggctctgaagtgcagctggttgaatcaggcggaggactggttcagcctggcggatctctgagactgtcttgtgccgccagcggctacaccttcaccaactactggatgaactgggtccgacaggcccctggcaaaggactggaatgggtcggaatgatcgaccccagcgacagcgagacacactacaaccacatcttcaaggaccgcttcaccatcagcgccgacaccagcaagaataccgcctacctccagatgaactccctgagagccgaggacaccgccgtgtactactgcgccagaaacctgtatctgtggggccagggaaccctggtcacagtgtcatctacgcgtggacagcctaaggccaatcctaccgtgacactgttccctccaagcagcgaagaactccaggccaacaaggccacacttgtgtgcctgatctccgacttctaccctggggctgtgacagtggcttggaaggccgatggatctcctgtgaaagccggcgtggaaaccaccaagccatccaagcagagcaacaacaaatacgccgccagctcctacctgagcctgacacctgagcagtggaagtcccacagatcctacagctgccaagtgacccacgaaggcagcaccgtggaaaagacagtggcccctacagagtgcagcgaagtgaaaaccgactccaccgaccacgtgaagcccaaagagacagagaacaccaagcagcccagcaagagctgccacaagcccaaggccatcgtgcacaccgagaaagtgaacatgatgagcctgaccgtgctgggcctgcggatgctgttcgccaaaaccgtggccgtgaacttcctgctgaccgccaagctgttcttcctccgcgccaagagaagcggatctggcgtgaagcagaccctgaatttcgacctgctgaagctggctggcgacgtggaatccaacccaggcccttctagaggccatatgaccgagtacaagcccacggtgcgcctcgccacccgcgacgacgtccccagggccgtacgcaccctcgccgccgcgttcgccgactaccccgccacgcgccacaccgtcgatccggaccgccacatcgagcgggtcaccgagctgcaagaactcttcctcacgcgcgtcgggctcgacatcggcaaggtgtgggtcgcggacgacggcgccgcggtggcggtctggaccacgccggagagcgtcgaagcgggggcggtgttcgccgagatcggcccgcgcatggccgagttgagcggttcccggctggccgcgcagcaacagatggaaggcctcctggcgccgcaccggcccaaggagcccgcgtggttcctggccaccgtcggcgtctcgcccgaccaccagggcaagggtctgggcagcgccgtcgtgctccccggagtggaggcggccgagcgcgccggggtgcccgccttcctggagacctccgcgccccgcaacctccccttctacgagcggctcggcttcaccgtcaccgccgacgtcgaggtgcccgaaggaccgcgcacctggtgcatgacccgcaagcccggtgcctga

SEQ ID NO: 37287 - DNA, 2619 bp, synthetic construct
  source 1..2619: mol_type = other DNA
atggccttaccagtgaccgccttgctcctgccgctggccttgctgctccacgccgccaggccgctcgaggaggcctctacaaagggaccctccgtgtttcctctggctcccagcagcaagtctacaagcggaggaacagccgctctgggctgcctggtcaaggattactttcccgagcctgtgaccgtgtcctggaatagcggagcactgacaagcggcgtgcacacctttccagccgtgctgcaaagcagcggcctgtactctctgagcagcgtggtcacagtgcctagctctagcctgggcacccagacctacatctgcaatgtgaaccacaagcctagcaacaccaaggtggacaagagagtggaacccaagagctgtggcagagccgattgcggctttaccagcgagagctaccagcagggcgtgctgagcgccaccatcctgtacgagatcctgctgggcaaggccaccctgtacgccgtgctggtgtctgccctggtgctgatggctatggtcaagcggaaggacagccggggaagggccaagcgatctggatctggagcaacaaacttctcactactcaaacaagcaggtgacgtggaggagaatcccgggcctactagcatggccttaccagtgaccgccttgctcctgccgctggccttgctgctccacgccgccaggccggacatccagatgacacagagccctagcagcctgtctgccagcgtgggagacagagtgaccatcacatgcaagagcagccagagcctgctggactccgatggcaagacctacctgaactggtatcagcagaagcccggcaaggcccctaagctgctgatctacctggtgtccaagctggatagcggcgtgcccagcagattttctggcagcggcagcggaaccgacttcaccctgacaatatccagcctccagcctgaggacttcgccacctactactgcttccaaggcacccactttccatacaccttcggccagggcaccaaggtggaaatcaaaagaggcggaggcggaagtggaggcggaggatctggcggcggaggctctgaagtgcagctggttgaatcaggcggaggactggttcagcctggcggatctctgagactgtcttgtgccgccagcggctacaccttcaccaactactggatgaactgggtccgacaggcccctggcaaaggactggaatgggtcggaatgatcgaccccagcgacagcgagacacactacaaccacatcttcaaggaccgcttcaccatcagcgccgacaccagcaagaataccgcctacctccagatgaactccctgagagccgaggacaccgccgtgtactactgcgccagaaacctgtatctgtggggccagggaaccctggtcacagtgtcatctacgcgtggacagcctaaggccaatcctaccgtgacactgttccctccaagcagcgaagaactccaggccaacaaggccacacttgtgtgcctgatctccgacttctaccctggggctgtgacagtggcttggaaggccgatggatctcctgtgaaagccggcgtggaaaccaccaagccatccaagcagagcaacaacaaatacgccgccagctcctacctgagcctgacacctgagcagtggaagtcccacagatcctacagctgccaagtgacccacgaaggcagcaccgtggaaaagacagtggcccctacagagtgcagcatccccgaggacacattcttcccaagccccgagagcagctgcgacgtgaagctggtggaaaagagcttcgagacagacaccaacctgaacttccagaacctgagcgtgatcggcttcagaatcctgctgctgaaagtggccggctttaacctgctgatgaccctgcggctgtggtccagccgcgccaagagaagcggatctggcgtgaagcagaccctgaatttcgacctgctgaagctggctggcgacgtggaatccaacccaggcccttctagaggccatatgaccgagtacaagcccacggtgcgcctcgccacccgcgacgacgtccccagggccgtacgcaccctcgccgccgcgttcgccgactaccccgccacgcgccacaccgtcgatccggaccgccacatcgagcgggtcaccgagctgcaagaactcttcctcacgcgcgtcgggctcgacatcggcaaggtgtgggtcgcggacgacggcgccgcggtggcggtctggaccacgccggagagcgtcgaagcgggggcggtgttcgccgagatcggcccgcgcatggccgagttgagcggttcccggctggccgcgcagcaacagatggaaggcctcctggcgccgcaccggcccaaggagcccgcgtggttcctggccaccgtcggcgtctcgcccgaccaccagggcaagggtctgggcagcgccgtcgtgctccccggagtggaggcggccgagcgcgccggggtgcccgccttcctggagacctccgcgccccgcaacctccccttctacgagcggctcggcttcaccgtcaccgccgacgtcgaggtgcccgaaggaccgcgcacctggtgcatgacccgcaagcccggtgcctga

SEQ ID NO: 37288 - DNA, 2619 bp, synthetic construct
  source 1..2619: mol_type = other DNA
atggccttaccagtgaccgccttgctcctgccgctggccttgctgctccacgccgccaggccgctcgaggaggcctctacaaagggaccctccgtgtttcctctggctcccagcagcaagtctacaagcggaggaacagccgctctgggctgcctggtcaaggattactttcccgagcctgtgaccgtgtcctggaatagcggagcactgacaagcggcgtgcacacctttccagccgtgctgcaaagcagcggcctgtactctctgagcagcgtggtcacagtgcctagctctagcctgggcacccagacctacatctgcaatgtgaaccacaagcctagcaacaccaaggtggacaagagagtggaacccaagagctgtatccccgaggacacattcttcccaagccccgagagcagctgcgacgtgaagctggtggaaaagagcttcgagacagacaccaacctgaacttccagaacctgagcgtgatcggcttcagaatcctgctgctgaaagtggccggctttaacctgctgatgaccctgcggctgtggtccagcagggccaagcgatctggatctggagcaacaaacttctcactactcaaacaagcaggtgacgtggaggagaatcccgggcctactagcatggccttaccagtgaccgccttgctcctgccgctggccttgctgctccacgccgccaggccggacatccagatgacacagagccctagcagcctgtctgccagcgtgggagacagagtgaccatcacatgcaagagcagccagagcctgctggactccgatggcaagacctacctgaactggtatcagcagaagcccggcaaggcccctaagctgctgatctacctggtgtccaagctggatagcggcgtgcccagcagattttctggcagcggcagcggaaccgacttcaccctgacaatatccagcctccagcctgaggacttcgccacctactactgcttccaaggcacccactttccatacaccttcggccagggcaccaaggtggaaatcaaaagaggcggaggcggaagtggaggcggaggatctggcggcggaggctctgaagtgcagctggttgaatcaggcggaggactggttcagcctggcggatctctgagactgtcttgtgccgccagcggctacaccttcaccaactactggatgaactgggtccgacaggcccctggcaaaggactggaatgggtcggaatgatcgaccccagcgacagcgagacacactacaaccacatcttcaaggaccgcttcaccatcagcgccgacaccagcaagaataccgcctacctccagatgaactccctgagagccgaggacaccgccgtgtactactgcgccagaaacctgtatctgtggggccagggaaccctggtcacagtgtcatctacgcgtggacagcctaaggccaatcctaccgtgacactgttccctccaagcagcgaagaactccaggccaacaaggccacacttgtgtgcctgatctccgacttctaccctggggctgtgacagtggcttggaaggccgatggatctcctgtgaaagccggcgtggaaaccaccaagccatccaagcagagcaacaacaaatacgccgccagctcctacctgagcctgacacctgagcagtggaagtcccacagatcctacagctgccaagtgacccacgaaggcagcaccgtggaaaagacagtggcccctacagagtgcagcggcagagccgattgcggctttaccagcgagagctaccagcagggcgtgctgagcgccaccatcctgtacgagatcctgctgggcaaggccaccctgtacgccgtgctggtgtctgccctggtgctgatggctatggtcaagcggaaggacagccggggacgcgccaagagaagcggatctggcgtgaagcagaccctgaatttcgacctgctgaagctggctggcgacgtggaatccaacccaggcccttctagaggccatatgaccgagtacaagcccacggtgcgcctcgccacccgcgacgacgtccccagggccgtacgcaccctcgccgccgcgttcgccgactaccccgccacgcgccacaccgtcgatccggaccgccacatcgagcgggtcaccgagctgcaagaactcttcctcacgcgcgtcgggctcgacatcggcaaggtgtgggtcgcggacgacggcgccgcggtggcggtctggaccacgccggagagcgtcgaagcgggggcggtgttcgccgagatcggcccgcgcatggccgagttgagcggttcccggctggccgcgcagcaacagatggaaggcctcctggcgccgcaccggcccaaggagcccgcgtggttcctggccaccgtcggcgtctcgcccgaccaccagggcaagggtctgggcagcgccgtcgtgctccccggagtggaggcggccgagcgcgccggggtgcccgccttcctggagacctccgcgccccgcaacctccccttctacgagcggctcggcttcaccgtcaccgccgacgtcgaggtgcccgaaggaccgcgcacctggtgcatgacccgcaagcccggtgcctga

SEQ ID NO: 37289 - DNA, 1857 bp, synthetic construct
  source 1..1857: mol_type = other DNA
atggccttaccagtgaccgccttgctcctgccgctggccttgctgctccacgccgccaggccggacatccagatgacacagagccctagcagcctgtctgccagcgtgggagacagagtgaccatcacatgcaagagcagccagagcctgctggactccgatggcaagacctacctgaactggtatcagcagaagcccggcaaggcccctaagctgctgatctacctggtgtccaagctggatagcggcgtgcccagcagattttctggcagcggcagcggaaccgacttcaccctgacaatatccagcctccagcctgaggacttcgccacctactactgcttccaaggcacccactttccatacaccttcggccagggcaccaaggtggaaatcaaaagactcgaggacctgaagaacgtgttcccacctgaggtggccgtgttcgagcctagcgaggccgagatcagccacacccagaaagccaccctcgtgtgcctggctaccggcttctaccccgaccatgtggaactgtcttggtgggtcaacggcaaagaggtgcacagcggcgtgtgtaccgacccccagccactgaaagaacagcccgccctgaacgacagccggtactgcctgagcagcagactgagagtgtccgccaccttctggcagaacccccggaaccacttcagatgccaggtgcagttctacggcctgagcgagaacgacgagtggacccaggacagagccaagcccgtgacccagatcgtgtctgccgaagcctggggcagagccgatagcggctttaccagcgagagctaccagcagggcgtgctgagcgccaccatcctgtacgagatcctgctgggcaaggccaccctgtacgccgtgctggtgtctgccctggtgctgatggctatggtcaagcggaaggacagccggggaagggccaagcgatctggatctggagcaacaaacttctcactactcaaacaagcaggtgacgtggaggagaatcccgggcctactagtatggactggatttggcgcatccttttccttgtcggcgctgctaccggcgcgcattccttcgaagaagtgcagctggttgaatcaggcggaggactggttcagcctggcggatctctgagactgtcttgtgccgccagcggctacaccttcaccaactactggatgaactgggtccgacaggcccctggcaaaggactggaatgggtcggaatgatcgaccccagcgacagcgagacacactacaaccacatcttcaaggaccgcttcaccatcagcgccgacaccagcaagaataccgcctacctccagatgaactccctgagagccgaggacaccgccgtgtactactgcgccagaaacctgtatctgtggggccagggaaccctggtcacagtgtcatctacgcgtatccagaaccctgatcctgccgtgtaccagctgcgggatagcaagagcagcgacaagagcgtgtgtctgttcaccgacttcgacagccagaccaacgtgtcccagagcaaggactccgacgtgtacatcaccgataagtgcgtgctggacatgcggagcatggacttcaagagcaactccgccgtggcctggtccaacaagtccgatttcgcctgcgccaacgccttcaacaacagcattatccccgaggacacattcttcccaagccccgagagcagcagcgacgtgaagctggtggaaaagagcttcgagacagacaccaacctgaacttccagaacctgagcgtgatcggcttcagaatcctgctgctgaaagtggccggctttaacctgctgatgaccctgcggctgtggtccagc

SEQ ID NO: 37290 - DNA, 2697 bp, synthetic construct
  source 1..2697: mol_type = other DNA
atggccttaccagtgaccgccttgctcctgccgctggccttgctgctccacgccgccaggccggaggttcagctgcttgagtctggcggaggactggttcaacctggcggaagcctgagactgtcttgtgccgcctctggcagaaccttcagcatgggctggtatagacaggcccctggcaagggcctcgaatttgtgtctgccatcacatacagcggcggcagcccttactacgccgattctgtgaagggcagattcaccatcagccgggacaacagcaagaacaccgtgtacctccagatgaacagcctgagagccgaggacaccgccgtgtactactgtgccgccaatccaacctacggcagcgactggaatgccgagaattggggccagggcacactggtcacagtgtctagtggtaccggcggaggcggatctggcggcggaggtagcggtggcggaggatctgaattcgacatccagatgacacagagccctagcagcctgtctgccagcgtgggagacagagtgaccatcacatgcaagagcagccagagcctgctggactccgatggcaagacctacctgaactggtatcagcagaagcccggcaaggcccctaagctgctgatctacctggtgtccaagctggatagcggcgtgcccagcagattttctggcagcggcagcggaaccgacttcaccctgacaatatccagcctccagcctgaggacttcgccacctactactgcttccaaggcacccactttccatacaccttcggccagggcaccaaggtggaaatcaaaagactcgagatccagaaccctgatcctgccgtgtaccagctgcgggatagcaagagcagcgacaagagcgtgtgtctgttcaccgacttcgacagccagaccaacgtgtcccagagcaaggactccgacgtgtacatcaccgataagtgcgtgctggacatgcggagcatggacttcaagagcaactccgccgtggcctggtccaacaagtccgatttcgcctgcgccaacgccttcaacaacagcattatccccgaggacacattcttcccaagcagcgacgtgccctgcgacgtgaagctggtggaaaagagcttcgagacagacaccaacctgaacttccagaacctgagcgtgatcggcttcagaatcctgctgctgaaagtggccggctttaacctgctgatgaccctgcggctgtggtccagccgcgccaagagaagcggatctggcgtgaagcagaccctgaatttcgacctgctgaagctggctggcgacgtggaatccaacccaggccctactagtaccatggactggatttggcgcatccttttccttgtcggcgctgctaccggcacccattccgggcccgaagtgcaactggttgaatccggtggcggcctggtgcaacccggcggatctctcagacttagctgtgccgcctccggcagaaccttcacaatgggatggtacaggcaggctccagggaaagagagagagttcgtcgccgccatctctctgtctcccacactggcctactacgccgactctgtgaaaggccggttcaccatctccagagataatagcaagaacaccgtggtgctgcaaatgaactctctgagagccgaggatacagccctgtactattgtgccgctgaccggaagtccgtgatgagcatcagacccgattactggggacagggcacactggtcacagtgtctagtggatccggcggcggaggatctggcggaggcggatctgggggcggaggctctttcgaagaagtgcagctggttgaatcaggcggaggactggttcagcctggcggatctctgagactgtcttgtgccgccagcggctacaccttcaccaactactggatgaactgggtccgacaggcccctggcaaaggactggaatgggtcggaatgatcgaccccagcgacagcgagacacactacaaccacatcttcaaggaccgcttcaccatcagcgccgacaccagcaagaataccgcctacctccagatgaactccctgagagccgaggacaccgccgtgtactactgcgccagaaacctgtatctgtggggccagggaaccctggtcacagtgtcatctacgcgtgaggacctgaagaacgtgttcccacctgaggtggccgtgttcgagcctagcaaggccgagatcgcccacacccagaaagccaccctcgtgtgcctggctaccggcttctaccccgaccatgtggaactgtcttggtgggtcaacggcaaagaggtgcacagcggcgtgtgtaccgacccccagccactgaaagaacagcccgccctgaacgacagccggtactgcctgagcagcagactgagagtgtccgccaccttctggcagaacccccggaaccacttcagatgccaggtgcagttctacggcctgagcgagaacgacgagtggacccaggacagagccaagcccgtgacccagatcgtgtctgccgaagcctggggcagagccgattgcggcatcaccagcgccagctaccaccagggcgtgctgagcgccaccatcctgtacgagatcctgctgggcaaggccaccctgtacgccgtgctggtgtctgccctggtgctgatggctatggtcaagcggaaggacagccggggataa

SEQ ID NO: 37291 - DNA, 2697 bp, synthetic construct
  source 1..2697: mol_type = other DNA
atggccttaccagtgaccgccttgctcctgccgctggccttgctgctccacgccgccaggccggaagtgcagctggttgaatctggcggaggactggttcaggctggcggatctctgagactgtcttgtgccgccagcggcagaacctttagcatgggctggtttagacaggcccctggcaaagagagagagttcgtcgccgccatcacatactctggcggcagcccttactacgccgactctgtgaagggcagattcaccatcagccgggacaacgccaagaacaccgtgtacctccagatgaacagcctgaagcctgaggacaccgccgtgtactactgcgccgccaatccaacatacggcagcgactggaacgccgagaattggggccagggaacccaagtgacagtgtctagcggtaccggcggaggcggatctggcggcggaggtagcggtggcggaggatctgaattcgacatccagatgacacagagccctagcagcctgtctgccagcgtgggagacagagtgaccatcacatgcaagagcagccagagcctgctggactccgatggcaagacctacctgaactggtatcagcagaagcccggcaaggcccctaagctgctgatctacctggtgtccaagctggatagcggcgtgcccagcagattttctggcagcggcagcggaaccgacttcaccctgacaatatccagcctccagcctgaggacttcgccacctactactgcttccaaggcacccactttccatacaccttcggccagggcaccaaggtggaaatcaaaagactcgagatccagaaccctgatcctgccgtgtaccagctgcgggatagcaagagcagcgacaagagcgtgtgtctgttcaccgacttcgacagccagaccaacgtgtcccagagcaaggactccgacgtgtacatcaccgataagtgcgtgctggacatgcggagcatggacttcaagagcaactccgccgtggcctggtccaacaagtccgatttcgcctgcgccaacgccttcaacaacagcattatccccgaggacacattcttcccaagcagcgacgtgccctgcgacgtgaagctggtggaaaagagcttcgagacagacaccaacctgaacttccagaacctgagcgtgatcggcttcagaatcctgctgctgaaagtggccggctttaacctgctgatgaccctgcggctgtggtccagccgcgccaagagaagcggatctggcgtgaagcagaccctgaatttcgacctgctgaagctggctggcgacgtggaatccaacccaggccctactagtaccatggactggatttggcgcatccttttccttgtcggcgctgctaccggcgcccattccgggcccgaagtgcaactggttgaatccggtggcggcctggtgcaacccggcggatctctcagacttagctgtgccgcctccggcagaaccttcacaatgggatggtacaggcaggctccagggaaagagagagagttcgtcgccgccatctctctgtctcccacactggcctactacgccgactctgtgaaaggccggttcaccatctccagagataatagcaagaacaccgtggtgctgcaaatgaactctctgagagccgaggatacagccctgtactattgtgccgctgaccggaagtccgtgatgagcatcagacccgattactggggacagggcacactggtcacagtgtctagtggatccggcggcggaggatctggcggaggcggatctgggggcggaggctctttcgaagaagtgcagctggttgaatcaggcggaggactggttcagcctggcggatctctgagactgtcttgtgccgccagcggctacaccttcaccaactactggatgaactgggtccgacaggcccctggcaaaggactggaatgggtcggaatgatcgaccccagcgacagcgagacacactacaaccacatcttcaaggaccgcttcaccatcagcgccgacaccagcaagaataccgcctacctccagatgaactccctgagagccgaggacaccgccgtgtactactgcgccagaaacctgtatctgtggggccagggaaccctggtcacagtgtcatctacgcgtgaggacctgaagaacgtgttcccacctgaggtggccgtgttcgagcctagcaaggccgagatcgcccacacccagaaagccaccctcgtgtgcctggctaccggcttctaccccgaccatgtggaactgtcttggtgggtcaacggcaaagaggtgcacagcggcgtgtgtaccgacccccagccactgaaagaacagcccgccctgaacgacagccggtactgcctgagcagcagactgagagtgtccgccaccttctggcagaacccccggaaccacttcagatgccaggtgcagttctacggcctgagcgagaacgacgagtggacccaggacagagccaagcccgtgacccagatcgtgtctgccgaagcctggggcagagccgattgcggcatcaccagcgccagctaccaccagggcgtgctgagcgccaccatcctgtacgagatcctgctgggcaaggccaccctgtacgccgtgctggtgtctgccctggtgctgatggctatggtcaagcggaaggacagccggggataa

SEQ ID NO: 37292 - DNA, 2688 bp, synthetic construct
  source 1..2688: mol_type = other DNA
atggccttaccagtgaccgccttgctcctgccgctggccttgctgctccacgccgccaggccggaagtgcagctggttgaatctggcggaggactggttcaggctggcggatctctgagactgtcttgtgccgccagcggcagaacctttagcatgggctggtttagacaggcccctggcaaagagagagagttcgtcgccgccatcacatactctggcggcagcccttactacgccgactctgtgaagggcagattcaccatcagccgggacaacgccaagaacaccgtgtacctccagatgaacagcctgaagcctgaggacaccgccgtgtactactgcgccgccaatccaacatacggcagcgactggaacgccgagaattggggccagggaacccaagtgacagtgtctagcggtaccggcggaggcggatctggcggcggaggtagcggtggcggaggatctgaattcgacatccagatgacacagagccctagcagcctgtctgccagcgtgggagacagagtgaccatcacatgcaagagcagccagagcctgctggactccgatggcaagacctacctgaactggtatcagcagaagcccggcaaggcccctaagctgctgatctacctggtgtccaagctggatagcggcgtgcccagcagattttctggcagcggcagcggaaccgacttcaccctgacaatatccagcctccagcctgaggacttcgccacctactactgcttccaaggcacccactttccatacaccttcggccagggcaccaaggtggaaatcaaaagactcgaggacctgaagaacgtgttcccacctgaggtggccgtgttcgagcctagcgaggccgagatcagccacacccagaaagccaccctcgtgtgcctggctaccggcttctaccccgaccatgtggaactgtcttggtgggtcaacggcaaagaggtgcacagcggcgtgtgtaccgacccccagccactgaaagaacagcccgccctgaacgacagccggtactgcctgagcagcagactgagagtgtccgccaccttctggcagaacccccggaaccacttcagatgccaggtgcagttctacggcctgagcgagaacgacgagtggacccaggacagagccaagcccgtgacccagatcgtgtctgccgaagcctggggcagagccgattgcggctttaccagcgagagctaccagcagggcgtgctgagcgccaccatcctgtacgagatcctgctgggcaaggccaccctgtacgccgtgctggtgtctgccctggtgctgatggctatggtcaagcggaaggacagccggggaagggccaagcgatctggatctggagcaacaaacttctcactactcaaacaagcaggtgacgtggaggagaatcccgggcctactagtgccaccatggactggatttggcgcatccttttccttgtcggcgctgctaccggcgcccattccgggcccgaagtgcaactggttgaatccggtggcggcctggtgcaagcaggcggatctctcagacttagctgtgccgcctccggcagaaccttcacaatgggatggtttaggcaggctccagggaaagagagagagttcgtcgccgccatctctctgtctcccacactggcctactacgccgactctgtgaaaggccggttcaccatctccagagataatgccaagaacaccgtggtgctgcaaatgaactctctgaaacccgaggatacagccctgtactattgtgccgctgaccggaagtccgtgatgagcatcagacccgattactggggacagggcacacaagtcacagtgtcctctggatccggcggcggaggatctggcggaggcggatctgggggcggaggctctttcgaagaagtgcagctggttgaatcaggcggaggactggttcagcctggcggatctctgagactgtcttgtgccgccagcggctacaccttcaccaactactggatgaactgggtccgacaggcccctggcaaaggactggaatgggtcggaatgatcgaccccagcgacagcgagacacactacaaccacatcttcaaggaccgcttcaccatcagcgccgacaccagcaagaataccgcctacctccagatgaactccctgagagccgaggacaccgccgtgtactactgcgccagaaacctgtatctgtggggccagggaaccctggtcacagtgtcatctacgcgtatccagaaccctgatcctgccgtgtaccagctgcgggatagcaagagcagcgacaagagcgtgtgtctgttcaccgacttcgacagccagaccaacgtgtcccagagcaaggactccgacgtgtacatcaccgataagtgcgtgctggacatgcggagcatggacttcaagagcaactccgccgtggcctggtccaacaagtccgatttcgcctgcgccaacgccttcaacaacagcattatccccgaggacacattcttcccaagccccgagagcagctgcgacgtgaagctggtggaaaagagcttcgagacagacaccaacctgaacttccagaacctgagcgtgatcggcttcagaatcctgctgctgaaagtggccggctttaacctgctgatgaccctgcggctgtggtccagctaa

SEQ ID NO: 37293 - DNA, 2301 bp, synthetic construct
  source 1..2301: mol_type = other DNA
atggccttaccagtgaccgccttgctcctgccgctggccttgctgctccacgccgccaggccggaagtgcagctggttgaatctggcggaggactggttcagcctggcggatctctgagactgagctgtgaagccagcggcttcgccagcgacgattacatcatcggctggttcagacaggcccctggcaaagagagagagggcgtcagctgcatcagctctaagtacgccaacaccgtgtacaccgacagcgtgaagggcagattcagactgagcagaggcaccgccaagaataccgtgtacctccagatgagcgccctgaagcctgaggataccgccgtgtactactgcgctatggacagccgcagagtgacatgccctgagatcagcaccatgcaccggaacttcgattcttggggccagggcacactggtcacagtgtcatctggtaccggcggaggcggatctggcggcggaggtagcggtggcggaggatctgaattcgacatccagatgacacagagccctagcagcctgtctgccagcgtgggagacagagtgaccatcacatgcaagagcagccagagcctgctggactccgatggcaagacctacctgaactggtatcagcagaagcccggcaaggcccctaagctgctgatctacctggtgtccaagctggatagcggcgtgcccagcagattttctggcagcggcagcggaaccgacttcaccctgacaatatccagcctccagcctgaggacttcgccacctactactgcttccaaggcacccactttccatacaccttcggccagggcaccaaggtggaaatcaaaagactcgaggacctgaagaacgtgttcccacctgaggtggccgtgttcgagcctagcaaggccgagatcgcccacacccagaaagccaccctcgtgtgcctggctaccggcttctaccccgaccatgtggaactgtcttggtgggtcaacggcaaagaggtgcacagcggcgtgtgtaccgacccccagccactgaaagaacagcccgccctgaacgacagccggtactgcctgagcagcagactgagagtgtccgccaccttctggcagaacccccggaaccacttcagatgccaggtgcagttctacggcctgagcgagaacgacgagtggacccaggacagagccaagcccgtgacccagatcgtgtctgccgaagcctggggcagagccgattgcggcatcaccagcgccagctaccaccagggcgtgctgagcgccaccatcctgtacgagatcctgctgggcaaggccaccctgtacgccgtgctggtgtctgccctggtgctgatggctatggtcaagcggaaggacagccggggaagggccaagcgatctggatctggagcaacaaacttctcactactcaaacaagcaggtgacgtggaggagaatcccgggcctactagtatggactggatttggcgcatccttttccttgtcggcgctgctaccggcgcgcattccttcgaagaagtgcagctggttgaatcaggcggaggactggttcagcctggcggatctctgagactgtcttgtgccgccagcggctacaccttcaccaactactggatgaactgggtccgacaggcccctggcaaaggactggaatgggtcggaatgatcgaccccagcgacagcgagacacactacaaccacatcttcaaggaccgcttcaccatcagcgccgacaccagcaagaataccgcctacctccagatgaactccctgagagccgaggacaccgccgtgtactactgcgccagaaacctgtatctgtggggccagggaaccctggtcacagtgtcatctacgcgtatccagaaccctgatcctgccgtgtaccagctgcgggatagcaagagcagcgacaagagcgtgtgtctgttcaccgacttcgacagccagaccaacgtgtcccagagcaaggactccgacgtgtacatcaccgataagtgcgtgctggacatgcggagcatggacttcaagagcaactccgccgtggcctggtccaacaagtccgatttcgcctgcgccaacgccttcaacaacagcattatccccgaggacacattcttcccaagcagcgacgtgccctgcgacgtgaagctggtggaaaagagcttcgagacagacaccaacctgaacttccagaacctgagcgtgatcggcttcagaatcctgctgctgaaagtggccggctttaacctgctgatgaccctgcggctgtggtccagctaa

SEQ ID NO: 37294 - DNA, 2274 bp, synthetic construct
  source 1..2274: mol_type = other DNA
atggccttaccagtgaccgccttgctcctgccgctggccttgctgctccacgccgccaggccggacatccagatgacacagagccctagcagcctgtctgccagcgtgggagacagagtgaccatcacatgcaagagcagccagagcctgctggactccgatggcaagacctacctgaactggtatcagcagaagcccggcaaggcccctaagctgctgatctacctggtgtccaagctggatagcggcgtgcccagcagattttctggcagcggcagcggaaccgacttcaccctgacaatatccagcctccagcctgaggacttcgccacctactactgcttccaaggcacccactttccatacaccttcggccagggcaccaaggtggaaatcaaaagactcgaggacctgaagaacgtgttcccacctgaggtggccgtgttcgagcctagcgaggccgagatcagccacacccagaaagccaccctcgtgtgcctggctaccggcttctaccccgaccatgtggaactgtcttggtgggtcaacggcaaagaggtgcacagcggcgtgtgtaccgacccccagccactgaaagaacagcccgccctgaacgacagccggtactgcctgagcagcagactgagagtgtccgccaccttctggcagaacccccggaaccacttcagatgccaggtgcagttctacggcctgagcgagaacgacgagtggacccaggacagagccaagcccgtgacccagatcgtgtctgccgaagcctggggcagagccgattgcggctttaccagcgagagctaccagcagggcgtgctgagcgccaccatcctgtacgagatcctgctgggcaaggccaccctgtacgccgtgctggtgtctgccctggtgctgatggctatggtcaagcggaaggacagccggggaagggccaagcgatctggatctggagcaacaaacttctcactactcaaacaagcaggtgacgtggaggagaatcccgggcctactagtaccatggactggatttggcgcatccttttccttgtcggcgctgctaccggcgcccattccgggcccgaagtgcaactggttgaatccggtggcggcctggtgcaacccggcggatctctcagacttagctgtgccgcctccggcagaaccttcacaatgggatggtacaggcaggctccagggaaagagagagagttcgtcgccgccatctctctgtctcccacactggcctactacgccgactctgtgaaaggccggttcaccatctccagagataatagcaagaacaccgtggtgctgcaaatgaactctctgagagccgaggatacagccctgtactattgtgccgctgaccggaagtccgtgatgagcatcagacccgattactggggacagggcacactggtcacagtgtctagtggatccggcggcggaggatctggcggaggcggatctgggggcggaggctctttcgaagaagtgcagctggttgaatcaggcggaggactggttcagcctggcggatctctgagactgtcttgtgccgccagcggctacaccttcaccaactactggatgaactgggtccgacaggcccctggcaaaggactggaatgggtcggaatgatcgaccccagcgacagcgagacacactacaaccacatcttcaaggaccgcttcaccatcagcgccgacaccagcaagaataccgcctacctccagatgaactccctgagagccgaggacaccgccgtgtactactgcgccagaaacctgtatctgtggggccagggaaccctggtcacagtgtcatctacgcgtatccagaaccctgatcctgccgtgtaccagctgcgggatagcaagagcagcgacaagagcgtgtgtctgttcaccgacttcgacagccagaccaacgtgtcccagagcaaggactccgacgtgtacatcaccgataagtgcgtgctggacatgcggagcatggacttcaagagcaactccgccgtggcctggtccaacaagtccgatttcgcctgcgccaacgccttcaacaacagcattatccccgaggacacattcttcccaagccccgagagcagctgcgacgtgaagctggtggaaaagagcttcgagacagacaccaacctgaacttccagaacctgagcgtgatcggcttcagaatcctgctgctgaaagtggccggctttaacctgctgatgaccctgcggctgtggtccagctaa

SEQ ID NO: 37295 - DNA, 2292 bp, synthetic construct
  source 1..2292: mol_type = other DNA
atggccttaccagtgaccgccttgctcctgccgctggccttgctgctccacgccgccaggccggacatccagatgacacagagccctagcagcctgtctgccagcgtgggagacagagtgaccatcacatgcaagagcagccagagcctgctggactccgatggcaagacctacctgaactggtatcagcagaagcccggcaaggcccctaagctgctgatctacctggtgtccaagctggatagcggcgtgcccagcagattttctggcagcggcagcggaaccgacttcaccctgacaatatccagcctccagcctgaggacttcgccacctactactgcttccaaggcacccactttccatacaccttcggccagggcaccaaggtggaaatcaaaagactcgaggacctgaagaacgtgttcccacctgaggtggccgtgttcgagcctagcgaggccgagatcagccacacccagaaagccaccctcgtgtgcctggctaccggcttctaccccgaccatgtggaactgtcttggtgggtcaacggcaaagaggtgcacagcggcgtgtgtaccgacccccagccactgaaagaacagcccgccctgaacgacagccggtactgcctgagcagcagactgagagtgtccgccaccttctggcagaacccccggaaccacttcagatgccaggtgcagttctacggcctgagcgagaacgacgagtggacccaggacagagccaagcccgtgacccagatcgtgtctgccgaagcctggggcagagccgattgcggctttaccagcgagagctaccagcagggcgtgctgagcgccaccatcctgtacgagatcctgctgggcaaggccaccctgtacgccgtgctggtgtctgccctggtgctgatggctatggtcaagcggaaggacagccggggaagggccaagcgatctggatctggagcaacaaacttctcactactcaaacaagcaggtgacgtggaggagaatcccgggcctactagtaccatggactggatttggcgcatccttttccttgtcggcgctgctaccggcgcccattccgggccccaggtgcagctggttgaatctggcggaggactggttcagcctggcggatctctgagactgtcttgtgccgccagcggcaacatcaacagcagaaactgcatgggctggttcagacaggcccctggcaagggaagagaaggcgtggcagctatcggccaagtgaccggcagaacctactacgtggacagcgtgaagggcagattcaccatcagcctggacaacagcaagaacaccctgtacctccagatgaacagcctgagagccgaggacaccgccgtgtactattgtgctgctgcccctggctgtctgctgtctgcacttagaagcgccgactacagaaactggggccagggcacactggtcaccgtttcttctggatccggcggcggaggatctggcggaggcggatctgggggcggaggctctttcgaagaagtgcagctggttgaatcaggcggaggactggttcagcctggcggatctctgagactgtcttgtgccgccagcggctacaccttcaccaactactggatgaactgggtccgacaggcccctggcaaaggactggaatgggtcggaatgatcgaccccagcgacagcgagacacactacaaccacatcttcaaggaccgcttcaccatcagcgccgacaccagcaagaataccgcctacctccagatgaactccctgagagccgaggacaccgccgtgtactactgcgccagaaacctgtatctgtggggccagggaaccctggtcacagtgtcatctacgcgtatccagaaccctgatcctgccgtgtaccagctgcgggatagcaagagcagcgacaagagcgtgtgtctgttcaccgacttcgacagccagaccaacgtgtcccagagcaaggactccgacgtgtacatcaccgataagtgcgtgctggacatgcggagcatggacttcaagagcaactccgccgtggcctggtccaacaagtccgatttcgcctgcgccaacgccttcaacaacagcattatccccgaggacacattcttcccaagccccgagagcagctgcgacgtgaagctggtggaaaagagcttcgagacagacaccaacctgaacttccagaacctgagcgtgatcggcttcagaatcctgctgctgaaagtggccggctttaacctgctgatgaccctgcggctgtggtccagc

SEQ ID NO: 37296 - DNA, 2295 bp, synthetic construct
  source 1..2295: mol_type = other DNA
atggccttaccagtgaccgccttgctcctgccgctggccttgctgctccacgccgccaggccggacatccagatgacacagagccctagcagcctgtctgccagcgtgggagacagagtgaccatcacatgcaagagcagccagagcctgctggactccgatggcaagacctacctgaactggtatcagcagaagcccggcaaggcccctaagctgctgatctacctggtgtccaagctggatagcggcgtgcccagcagattttctggcagcggcagcggaaccgacttcaccctgacaatatccagcctccagcctgaggacttcgccacctactactgcttccaaggcacccactttccatacaccttcggccagggcaccaaggtggaaatcaaaagactcgaggacctgaagaacgtgttcccacctgaggtggccgtgttcgagcctagcgaggccgagatcagccacacccagaaagccaccctcgtgtgcctggctaccggcttctaccccgaccatgtggaactgtcttggtgggtcaacggcaaagaggtgcacagcggcgtgtgtaccgacccccagccactgaaagaacagcccgccctgaacgacagccggtactgcctgagcagcagactgagagtgtccgccaccttctggcagaacccccggaaccacttcagatgccaggtgcagttctacggcctgagcgagaacgacgagtggacccaggacagagccaagcccgtgacccagatcgtgtctgccgaagcctggggcagagccgattgcggctttaccagcgagagctaccagcagggcgtgctgagcgccaccatcctgtacgagatcctgctgggcaaggccaccctgtacgccgtgctggtgtctgccctggtgctgatggctatggtcaagcggaaggacagccggggaagggccaagcgatctggatctggagcaacaaacttctcactactcaaacaagcaggtgacgtggaggagaatcccgggcctactagtaccatggactggatttggcgcatccttttccttgtcggcgctgctaccggcgcccattccgggccccaggtgcagctggttgaatctggcggaggatctgttcaggctggcggctctctgagactgtcttgtggcgcttccggcaacatcagcagcagaaactgcatgggctggttcagacaggcccctggcaaagagagagaaggcgttgccgccatcggacaagtgaccggcagatcctactacgtggacagcgtgaagggcagattcaccatcagcctggacaacgccaagaacaccctgtacctccagatgaacacactgaagcccgaggacaccgccatgtactactgtgctgctgcccctggctgtctgctgtctgcacttagaagcgccgactacagaaactggggccagggaacccaagtgacagtgtctagtggatccggcggcggaggatctggcggaggcggatctgggggcggaggctctttcgaagaagtgcagctggttgaatcaggcggaggactggttcagcctggcggatctctgagactgtcttgtgccgccagcggctacaccttcaccaactactggatgaactgggtccgacaggcccctggcaaaggactggaatgggtcggaatgatcgaccccagcgacagcgagacacactacaaccacatcttcaaggaccgcttcaccatcagcgccgacaccagcaagaataccgcctacctccagatgaactccctgagagccgaggacaccgccgtgtactactgcgccagaaacctgtatctgtggggccagggaaccctggtcacagtgtcatctacgcgtatccagaaccctgatcctgccgtgtaccagctgcgggatagcaagagcagcgacaagagcgtgtgtctgttcaccgacttcgacagccagaccaacgtgtcccagagcaaggactccgacgtgtacatcaccgataagtgcgtgctggacatgcggagcatggacttcaagagcaactccgccgtggcctggtccaacaagtccgatttcgcctgcgccaacgccttcaacaacagcattatccccgaggacacattcttcccaagccccgagagcagctgcgacgtgaagctggtggaaaagagcttcgagacagacaccaacctgaacttccagaacctgagcgtgatcggcttcagaatcctgctgctgaaagtggccggctttaacctgctgatgaccctgcggctgtggtccagctaa

SEQ ID NO: 37297 - DNA, 2718 bp, synthetic construct
  source 1..2718: mol_type = other DNA
atggccttaccagtgaccgccttgctcctgccgctggccttgctgctccacgccgccaggccggaagtgcagctggttgaatctggcggaggactggttcaggctggcggatctctgagactgtcttgtgccgccagcggcagaacctttagcatgggctggtttagacaggcccctggcaaagagagagagttcgtcgccgccatcacatactctggcggcagcccttactacgccgactctgtgaagggcagattcaccatcagccgggacaacgccaagaacaccgtgtacctccagatgaacagcctgaagcctgaggacaccgccgtgtactactgcgccgccaatccaacatacggcagcgactggaacgccgagaattggggccagggaacccaagtgacagtgtctagcggtaccggcggaggcggatctggcggcggaggtagcggtggcggaggatctgaattcgacatccagatgacacagagccctagcagcctgtctgccagcgtgggagacagagtgaccatcacatgcaagagcagccagagcctgctggactccgatggcaagacctacctgaactggtatcagcagaagcccggcaaggcccctaagctgctgatctacctggtgtccaagctggatagcggcgtgcccagcagattttctggcagcggcagcggaaccgacttcaccctgacaatatccagcctccagcctgaggacttcgccacctactactgcttccaaggcacccactttccatacaccttcggccagggcaccaaggtggaaatcaaaagactcgagatccagaaccctgatcctgccgtgtaccagctgcgggatagcaagagcagcgacaagagcgtgtgtctgttcaccgacttcgacagccagaccaacgtgtcccagagcaaggactccgacgtgtacatcaccgataagtgcgtgctggacatgcggagcatggacttcaagagcaactccgccgtggcctggtccaacaagtccgatttcgcctgcgccaacgccttcaacaacagcattatccccgaggacacattcttcccaagcagcgacgtgccctgcgacgtgaagctggtggaaaagagcttcgagacagacaccaacctgaacttccagaacctgagcgtgatcggcttcagaatcctgctgctgaaagtggccggctttaacctgctgatgaccctgcggctgtggtccagccgcgccaagagaagcggatctggcgtgaagcagaccctgaatttcgacctgctgaagctggctggcgacgtggaatccaacccaggccctactagtaccatggactggatttggcgcatccttttccttgtcggcgctgctaccggcgcccattccgggccccaggtgcagctggttgaatctggcggaggatctgttcaggctggcggctctctgagactgtcttgtggcgcttccggcaacatcagcagcagaaactgcatgggctggttcagacaggcccctggcaaagagagagaaggcgttgccgccatcggacaagtgaccggcagatcctactacgtggacagcgtgaagggcagattcaccatcagcctggacaacgccaagaacaccctgtacctccagatgaacacactgaagcccgaggacaccgccatgtactactgtgctgctgcccctggctgtctgctgtctgcacttagaagcgccgactacagaaactggggccagggaacccaagtgacagtgtctagtggatccggcggcggaggatctggcggaggcggatctgggggcggaggctctttcgaagaagtgcagctggttgaatcaggcggaggactggttcagcctggcggatctctgagactgtcttgtgccgccagcggctacaccttcaccaactactggatgaactgggtccgacaggcccctggcaaaggactggaatgggtcggaatgatcgaccccagcgacagcgagacacactacaaccacatcttcaaggaccgcttcaccatcagcgccgacaccagcaagaataccgcctacctccagatgaactccctgagagccgaggacaccgccgtgtactactgcgccagaaacctgtatctgtggggccagggaaccctggtcacagtgtcatctacgcgtgaggacctgaagaacgtgttcccacctgaggtggccgtgttcgagcctagcaaggccgagatcgcccacacccagaaagccaccctcgtgtgcctggctaccggcttctaccccgaccatgtggaactgtcttggtgggtcaacggcaaagaggtgcacagcggcgtgtgtaccgacccccagccactgaaagaacagcccgccctgaacgacagccggtactgcctgagcagcagactgagagtgtccgccaccttctggcagaacccccggaaccacttcagatgccaggtgcagttctacggcctgagcgagaacgacgagtggacccaggacagagccaagcccgtgacccagatcgtgtctgccgaagcctggggcagagccgattgcggcatcaccagcgccagctaccaccagggcgtgctgagcgccaccatcctgtacgagatcctgctgggcaaggccaccctgtacgccgtgctggtgtctgccctggtgctgatggctatggtcaagcggaaggacagccggggataa

SEQ ID NO: 37298 - DNA, 2709 bp, synthetic construct
  source 1..2709: mol_type = other DNA
atggccttaccagtgaccgccttgctcctgccgctggccttgctgctccacgccgccaggccgcaggtgcagctggttgaatctggcggaggatctgttcaggctggcggctctctgagactgtcttgtggcgcttccggcaacatcagcagcagaaactgcatgggctggttcagacaggcccctggcaaagagagagaaggcgttgccgccatcggacaagtgaccggcagatcctactacgtggacagcgtgaagggcagattcaccatcagcctggacaacgccaagaacaccctgtacctccagatgaacacactgaagcccgaggacaccgccatgtactactgtgctgctgcccctggctgtctgctgtctgcacttagaagcgccgactacagaaactggggccagggaacccaagtgacagtgtctagtggtaccggcggaggcggatctggcggcggaggtagcggtggcggaggatctgaattcgacatccagatgacacagagccctagcagcctgtctgccagcgtgggagacagagtgaccatcacatgcaagagcagccagagcctgctggactccgatggcaagacctacctgaactggtatcagcagaagcccggcaaggcccctaagctgctgatctacctggtgtccaagctggatagcggcgtgcccagcagattttctggcagcggcagcggaaccgacttcaccctgacaatatccagcctccagcctgaggacttcgccacctactactgcttccaaggcacccactttccatacaccttcggccagggcaccaaggtggaaatcaaaagactcgaggacctgaagaacgtgttcccacctgaggtggccgtgttcgagcctagcgaggccgagatcagccacacccagaaagccaccctcgtgtgcctggctaccggcttctaccccgaccatgtggaactgtcttggtgggtcaacggcaaagaggtgcacagcggcgtgtgtaccgacccccagccactgaaagaacagcccgccctgaacgacagccggtactgcctgagcagcagactgagagtgtccgccaccttctggcagaacccccggaaccacttcagatgccaggtgcagttctacggcctgagcgagaacgacgagtggacccaggacagagccaagcccgtgacccagatcgtgtctgccgaagcctggggcagagccgattgcggctttaccagcgagagctaccagcagggcgtgctgagcgccaccatcctgtacgagatcctgctgggcaaggccaccctgtacgccgtgctggtgtctgccctggtgctgatggctatggtcaagcggaaggacagccggggaagggccaagcgatctggatctggagcaacaaacttctcactactcaaacaagcaggtgacgtggaggagaatcccgggcctactagtgccaccatggactggatttggcgcatccttttccttgtcggcgctgctaccggcgcccattccgggcccgaagtgcaactggttgaatccggtggcggcctggtgcaagcaggcggatctctcagacttagctgtgccgcctccggcagaaccttcacaatgggatggtttaggcaggctccagggaaagagagagagttcgtcgccgccatctctctgtctcccacactggcctactacgccgactctgtgaaaggccggttcaccatctccagagataatgccaagaacaccgtggtgctgcaaatgaactctctgaaacccgaggatacagccctgtactattgtgccgctgaccggaagtccgtgatgagcatcagacccgattactggggacagggcacacaagtcacagtgtcctctggatccggcggcggaggatctggcggaggcggatctgggggcggaggctctttcgaagaagtgcagctggttgaatcaggcggaggactggttcagcctggcggatctctgagactgtcttgtgccgccagcggctacaccttcaccaactactggatgaactgggtccgacaggcccctggcaaaggactggaatgggtcggaatgatcgaccccagcgacagcgagacacactacaaccacatcttcaaggaccgcttcaccatcagcgccgacaccagcaagaataccgcctacctccagatgaactccctgagagccgaggacaccgccgtgtactactgcgccagaaacctgtatctgtggggccagggaaccctggtcacagtgtcatctacgcgtatccagaaccctgatcctgccgtgtaccagctgcgggatagcaagagcagcgacaagagcgtgtgtctgttcaccgacttcgacagccagaccaacgtgtcccagagcaaggactccgacgtgtacatcaccgataagtgcgtgctggacatgcggagcatggacttcaagagcaactccgccgtggcctggtccaacaagtccgatttcgcctgcgccaacgccttcaacaacagcattatccccgaggacacattcttcccaagccccgagagcagctgcgacgtgaagctggtggaaaagagcttcgagacagacaccaacctgaacttccagaacctgagcgtgatcggcttcagaatcctgctgctgaaagtggccggctttaacctgctgatgaccctgcggctgtggtccagctaa

SEQ ID NO: 37299 - DNA, 2298 bp, synthetic construct
  source 1..2298: mol_type = other DNA
atggccttaccagtgaccgccttgctcctgccgctggccttgctgctccacgccgccaggccgcaggtgcagctggttgaatctggcggaggatctgttcaggctggcggctctctgagactgtcttgtggcgcttccggcaacatcagcagcagaaactgcatgggctggttcagacaggcccctggcaaagagagagaaggcgttgccgccatcggacaagtgaccggcagatcctactacgtggacagcgtgaagggcagattcaccatcagcctggacaacgccaagaacaccctgtacctccagatgaacacactgaagcccgaggacaccgccatgtactactgtgctgctgcccctggctgtctgctgtctgcacttagaagcgccgactacagaaactggggccagggaacccaagtgacagtgtctagtggtaccggcggaggcggatctggcggcggaggtagcggtggcggaggatctgaattcgacatccagatgacacagagccctagcagcctgtctgccagcgtgggagacagagtgaccatcacatgcaagagcagccagagcctgctggactccgatggcaagacctacctgaactggtatcagcagaagcccggcaaggcccctaagctgctgatctacctggtgtccaagctggatagcggcgtgcccagcagattttctggcagcggcagcggaaccgacttcaccctgacaatatccagcctccagcctgaggacttcgccacctactactgcttccaaggcacccactttccatacaccttcggccagggcaccaaggtggaaatcaaaagactcgaggacctgaagaacgtgttcccacctgaggtggccgtgttcgagcctagcgaggccgagatcagccacacccagaaagccaccctcgtgtgcctggctaccggcttctaccccgaccatgtggaactgtcttggtgggtcaacggcaaagaggtgcacagcggcgtgtgtaccgacccccagccactgaaagaacagcccgccctgaacgacagccggtactgcctgagcagcagactgagagtgtccgccaccttctggcagaacccccggaaccacttcagatgccaggtgcagttctacggcctgagcgagaacgacgagtggacccaggacagagccaagcccgtgacccagatcgtgtctgccgaagcctggggcagagccgattgcggctttaccagcgagagctaccagcagggcgtgctgagcgccaccatcctgtacgagatcctgctgggcaaggccaccctgtacgccgtgctggtgtctgccctggtgctgatggctatggtcaagcggaaggacagccggggaagggccaagcgatctggatctggagcaacaaacttctcactactcaaacaagcaggtgacgtggaggagaatcccgggcctactagtgccaccatggactggatttggcgcatccttttccttgtcggcgctgctaccggcgcccattccttcgaagaagtgcagctggttgaatcaggcggaggactggttcagcctggcggatctctgagactgtcttgtgccgccagcggctacaccttcaccaactactggatgaactgggtccgacaggcccctggcaaaggactggaatgggtcggaatgatcgaccccagcgacagcgagacacactacaaccacatcttcaaggaccgcttcaccatcagcgccgacaccagcaagaataccgcctacctccagatgaactccctgagagccgaggacaccgccgtgtactactgcgccagaaacctgtatctgtggggccagggaaccctggtcacagtgtcatctacgcgtatccagaaccctgatcctgccgtgtaccagctgcgggatagcaagagcagcgacaagagcgtgtgtctgttcaccgacttcgacagccagaccaacgtgtcccagagcaaggactccgacgtgtacatcaccgataagtgcgtgctggacatgcggagcatggacttcaagagcaactccgccgtggcctggtccaacaagtccgatttcgcctgcgccaacgccttcaacaacagcattatccccgaggacacattcttcccaagccccgagagcagctgcgacgtgaagctggtggaaaagagcttcgagacagacaccaacctgaacttccagaacctgagcgtgatcggcttcagaatcctgctgctgaaagtggccggctttaacctgctgatgaccctgcggctgtggtccagctaa

SEQ ID NO: 37300 - DNA, 2298 bp, synthetic construct
  source 1..2298: mol_type = other DNA
atggccttaccagtgaccgccttgctcctgccgctggccttgctgctccacgccgccaggccgcaagttcagctggtggaaagcggtggtggcgttgtgcaacctggtggaagtctgaggctgagctgtgccgcttctggcctgagctttagcacctacactgtggcctggttcaggcaggctcccggaaagggtcttgaaggcgtggccgccattccttacaccagccagcacatggtgtacacagacagcgtcagaggccggttcaccatcagcagagacaactccaagaatacgctctatctccagatgaactctctgcgcgccgaagatacagccgtgtattactgcgccaccgacagacggcctggcacctctatgctggctatcaacggctacaacagatggggacagggaaccaccgtgaccgtgtcatctggtaccggcggaggcggatctggcggcggaggtagcggtggcggaggatctgaattcgacatccagatgacacagagccctagcagcctgtctgccagcgtgggagacagagtgaccatcacatgcaagagcagccagagcctgctggactccgatggcaagacctacctgaactggtatcagcagaagcccggcaaggcccctaagctgctgatctacctggtgtccaagctggatagcggcgtgcccagcagattttctggcagcggcagcggaaccgacttcaccctgacaatatccagcctccagcctgaggacttcgccacctactactgcttccaaggcacccactttccatacaccttcggccagggcaccaaggtggaaatcaaaagactcgaggacctgaagaacgtgttcccacctgaggtggccgtgttcgagcctagcgaggccgagatcagccacacccagaaagccaccctcgtgtgcctggctaccggcttctaccccgaccatgtggaactgtcttggtgggtcaacggcaaagaggtgcacagcggcgtgtgtaccgacccccagccactgaaagaacagcccgccctgaacgacagccggtactgcctgagcagcagactgagagtgtccgccaccttctggcagaacccccggaaccacttcagatgccaggtgcagttctacggcctgagcgagaacgacgagtggacccaggacagagccaagcccgtgacccagatcgtgtctgccgaagcctggggcagagccgattgcggctttaccagcgagagctaccagcagggcgtgctgagcgccaccatcctgtacgagatcctgctgggcaaggccaccctgtacgccgtgctggtgtctgccctggtgctgatggctatggtcaagcggaaggacagccggggaagggccaagcgatctggatctggagcaacaaacttctcactactcaaacaagcaggtgacgtggaggagaatcccgggcctactagtgccaccatggactggatttggcgcatccttttccttgtcggcgctgctaccggcgcccattccttcgaagaagtgcagctggttgaatcaggcggaggactggttcagcctggcggatctctgagactgtcttgtgccgccagcggctacaccttcaccaactactggatgaactgggtccgacaggcccctggcaaaggactggaatgggtcggaatgatcgaccccagcgacagcgagacacactacaaccacatcttcaaggaccgcttcaccatcagcgccgacaccagcaagaataccgcctacctccagatgaactccctgagagccgaggacaccgccgtgtactactgcgccagaaacctgtatctgtggggccagggaaccctggtcacagtgtcatctacgcgtatccagaaccctgatcctgccgtgtaccagctgcgggatagcaagagcagcgacaagagcgtgtgtctgttcaccgacttcgacagccagaccaacgtgtcccagagcaaggactccgacgtgtacatcaccgataagtgcgtgctggacatgcggagcatggacttcaagagcaactccgccgtggcctggtccaacaagtccgatttcgcctgcgccaacgccttcaacaacagcattatccccgaggacacattcttcccaagccccgagagcagctgcgacgtgaagctggtggaaaagagcttcgagacagacaccaacctgaacttccagaacctgagcgtgatcggcttcagaatcctgctgctgaaagtggccggctttaacctgctgatgaccctgcggctgtggtccagctaa

SEQ ID NO: 37301 - DNA, 2295 bp, synthetic construct
  source 1..2295: mol_type = other DNA
atggccttaccagtgaccgccttgctcctgccgctggccttgctgctccacgccgccaggccggacatccagatgacacagagccctagcagcctgtctgccagcgtgggagacagagtgaccatcacatgcaagagcagccagagcctgctggactccgatggcaagacctacctgaactggtatcagcagaagcccggcaaggcccctaagctgctgatctacctggtgtccaagctggatagcggcgtgcccagcagattttctggcagcggcagcggaaccgacttcaccctgacaatatccagcctccagcctgaggacttcgccacctactactgcttccaaggcacccactttccatacaccttcggccagggcaccaaggtggaaatcaaaagactcgaggacctgaagaacgtgttcccacctgaggtggccgtgttcgagcctagcgaggccgagatcagccacacccagaaagccaccctcgtgtgcctggctaccggcttctaccccgaccatgtggaactgtcttggtgggtcaacggcaaagaggtgcacagcggcgtgtgtaccgacccccagccactgaaagaacagcccgccctgaacgacagccggtactgcctgagcagcagactgagagtgtccgccaccttctggcagaacccccggaaccacttcagatgccaggtgcagttctacggcctgagcgagaacgacgagtggacccaggacagagccaagcccgtgacccagatcgtgtctgccgaagcctggggcagagccgattgcggctttaccagcgagagctaccagcagggcgtgctgagcgccaccatcctgtacgagatcctgctgggcaaggccaccctgtacgccgtgctggtgtctgccctggtgctgatggctatggtcaagcggaaggacagccggggaagggccaagcgatctggatctggagcaacaaacttctcactactcaaacaagcaggtgacgtggaggagaatcccgggcctactagtaccatggactggatttggcgcatccttttccttgtcggcgctgctaccggcgcccattccgggccccaagttcagctggtggaaagcggtggtggcgttgtgcaacctggtggaagtctgaggctgagctgtgccgcttctggcctgagctttagcacctacactgtggcctggttcaggcaggctcccggaaagggtcttgaaggcgtggccgccattccttacaccagccagcacatggtgtacacagacagcgtcagaggccggttcaccatcagcagagacaactccaagaatacgctctatctccagatgaactctctgcgcgccgaagatacagccgtgtattactgcgccaccgacagacggcctggcacctctatgctggctatcaacggctacaacagatggggacagggaaccaccgtgaccgtgtcatctggatccggcggcggaggatctggcggaggcggatctgggggcggaggctctttcgaagaagtgcagctggttgaatcaggcggaggactggttcagcctggcggatctctgagactgtcttgtgccgccagcggctacaccttcaccaactactggatgaactgggtccgacaggcccctggcaaaggactggaatgggtcggaatgatcgaccccagcgacagcgagacacactacaaccacatcttcaaggaccgcttcaccatcagcgccgacaccagcaagaataccgcctacctccagatgaactccctgagagccgaggacaccgccgtgtactactgcgccagaaacctgtatctgtggggccagggaaccctggtcacagtgtcatctacgcgtatccagaaccctgatcctgccgtgtaccagctgcgggatagcaagagcagcgacaagagcgtgtgtctgttcaccgacttcgacagccagaccaacgtgtcccagagcaaggactccgacgtgtacatcaccgataagtgcgtgctggacatgcggagcatggacttcaagagcaactccgccgtggcctggtccaacaagtccgatttcgcctgcgccaacgccttcaacaacagcattatccccgaggacacattcttcccaagccccgagagcagctgcgacgtgaagctggtggaaaagagcttcgagacagacaccaacctgaacttccagaacctgagcgtgatcggcttcagaatcctgctgctgaaagtggccggctttaacctgctgatgaccctgcggctgtggtccagctaa

SEQ ID NO: 37302 - DNA, 2301 bp, synthetic construct
  source 1..2301: mol_type = other DNA
atggccttaccagtgaccgccttgctcctgccgctggccttgctgctccacgccgccaggccggacatccagatgacacagagccctagcagcctgtctgccagcgtgggagacagagtgaccatcacatgcaagagcagccagagcctgctggactccgatggcaagacctacctgaactggtatcagcagaagcccggcaaggcccctaagctgctgatctacctggtgtccaagctggatagcggcgtgcccagcagattttctggcagcggcagcggaaccgacttcaccctgacaatatccagcctccagcctgaggacttcgccacctactactgcttccaaggcacccactttccatacaccttcggccagggcaccaaggtggaaatcaaaagactcgaggacctgaagaacgtgttcccacctgaggtggccgtgttcgagcctagcgaggccgagatcagccacacccagaaagccaccctcgtgtgcctggctaccggcttctaccccgaccatgtggaactgtcttggtgggtcaacggcaaagaggtgcacagcggcgtgtgtaccgacccccagccactgaaagaacagcccgccctgaacgacagccggtactgcctgagcagcagactgagagtgtccgccaccttctggcagaacccccggaaccacttcagatgccaggtgcagttctacggcctgagcgagaacgacgagtggacccaggacagagccaagcccgtgacccagatcgtgtctgccgaagcctggggcagagccgattgcggctttaccagcgagagctaccagcagggcgtgctgagcgccaccatcctgtacgagatcctgctgggcaaggccaccctgtacgccgtgctggtgtctgccctggtgctgatggctatggtcaagcggaaggacagccggggaagggccaagcgatctggatctggagcaacaaacttctcactactcaaacaagcaggtgacgtggaggagaatcccgggcctactagtaccatggactggatttggcgcatccttttccttgtcggcgctgctaccggcgcccattccgggcccgaggtgcagctggttgaatctggcggaggatctgttcaggctggcggctctctgagactgtcttgtgccgccagcggctacacctacagcatcaactgcatgggctggttcagacaggcccctggcaaagagagagaaggcgttgccgccatctctaccggcggaggcagaaccgattaccgggattctgtgaagggcagattcaccatcagccaggacaacgccaagaacaccgtgtacctccagatgaacagcctgaagcctgaggacaccgccatgtactactgtgccggcaagaccacctatcctggctacggatgtggcctgggcagaagcgcctacaattattggggccagggcacccaagtgaccgtgtcatctggatccggcggcggaggatctggcggaggcggatctgggggcggaggctctttcgaagaagtgcagctggttgaatcaggcggaggactggttcagcctggcggatctctgagactgtcttgtgccgccagcggctacaccttcaccaactactggatgaactgggtccgacaggcccctggcaaaggactggaatgggtcggaatgatcgaccccagcgacagcgagacacactacaaccacatcttcaaggaccgcttcaccatcagcgccgacaccagcaagaataccgcctacctccagatgaactccctgagagccgaggacaccgccgtgtactactgcgccagaaacctgtatctgtggggccagggaaccctggtcacagtgtcatctacgcgtatccagaaccctgatcctgccgtgtaccagctgcgggatagcaagagcagcgacaagagcgtgtgtctgttcaccgacttcgacagccagaccaacgtgtcccagagcaaggactccgacgtgtacatcaccgataagtgcgtgctggacatgcggagcatggacttcaagagcaactccgccgtggcctggtccaacaagtccgatttcgcctgcgccaacgccttcaacaacagcattatccccgaggacacattcttcccaagccccgagagcagctgcgacgtgaagctggtggaaaagagcttcgagacagacaccaacctgaacttccagaacctgagcgtgatcggcttcagaatcctgctgctgaaagtggccggctttaacctgctgatgaccctgcggctgtggtccagctaa

SEQ ID NO: 37303 - DNA, 1857 bp, synthetic construct
  source 1..1857: mol_type = other DNA
atggccttaccagtgaccgccttgctcctgccgctggccttgctgctccacgccgccaggccggacatccagatgacacagagccctagcagcctgtctgccagcgtgggagacagagtgaccatcacatgcaagagcagccagagcctgctggactccgatggcaagacctacctgaactggtatcagcagaagcccggcaaggcccctaagctgctgatctacctggtgtccaagctggatagcggcgtgcccagcagattttctggcagcggcagcggaaccgacttcaccctgacaatatccagcctccagcctgaggacttcgccacctactactgcttccaaggcacccactttccatacaccttcggccagggcaccaaggtggaaatcaaaagactcgaggacctgaagcacgtgttcccacctgaggtggccgtgttcgagcctagcgacgccgagatctggcacacccagaaagccaccctcgtgtgcctggctaccggcttctaccccgaccatgtggaactgtcttggtgggtcaacggcaaagaggtgcacagcggcgtgtctaccgacccccagccactgaaagaacagcccgccctgaacgacagccggtactgcctgagcagcagactgagagtgtccgccaccttctggcagaacccccggaaccacttcagatgccaggtgcagttctacggcctgagcgagaacgacgagtggacccaggacagagccaagcccgtgacccagatcgtgtctgccgaagcctggggcagagccgattgcggctttaccagcgagagctaccagcagggcgtgctgagcgccaccatcctgtacgagatcctgctgggcaaggccaccctgtacgccgtgctggtgtctgccctggtgctgatggctatggtcaagcggaaggacagccggggaagggccaagcgatctggatctggagcaacaaacttctcactactcaaacaagcaggtgacgtggaggagaatcccgggcctactagtatggactggatttggcgcatccttttccttgtcggcgctgctaccggcgcgcattccttcgaagaagtgcagctggttgaatcaggcggaggactggttcagcctggcggatctctgagactgtcttgtgccgccagcggctacaccttcaccaactactggatgaactgggtccgacaggcccctggcaaaggactggaatgggtcggaatgatcgaccccagcgacagcgagacacactacaaccacatcttcaaggaccgcttcaccatcagcgccgacaccagcaagaataccgcctacctccagatgaactccctgagagccgaggacaccgccgtgtactactgcgccagaaacctgtatctgtggggccagggaaccctggtcacagtgtcatctacgcgtatccagaaccctgatcctgccgtgtaccagctgcgggatagcaagagcagcgacaagagcgtgtgtctgttcaccgacttcgacagccagaccaacgtgtcccagagcaaggactccgacgtgtacatcaccgataagaccgtgctggacatgcggagcatggacttcaagagcaactccgccgtggcctggtccagcaagtccgatttcgcctgcgccaacgccttcaacaacagcattatccccgaggacacattcttcccaagccccgagatggcctgcgacgtgaagctggtggaaaagagcttcgagacagacaccaacctgaacttccagaacctgctcgtgatctggctgagaatcctgctgctgaaagtggccggctttaacctgctgatgaccctgcggctgtggtccagc

SEQ ID NO: 37304 - DNA, 1857 bp, synthetic construct
  source 1..1857: mol_type = other DNA
atggccttaccagtgaccgccttgctcctgccgctggccttgctgctccacgccgccaggccggacatccagatgacacagagccctagcagcctgtctgccagcgtgggagacagagtgaccatcacatgcaagagcagccagagcctgctggactccgatggcaagacctacctgaactggtatcagcagaagcccggcaaggcccctaagctgctgatctacctggtgtccaagctggatagcggcgtgcccagcagattttctggcagcggcagcggaaccgacttcaccctgacaatatccagcctccagcctgaggacttcgccacctactactgcttccaaggcacccactttccatacaccttcggccagggcaccaaggtggaaatcaaaagactcgaggacctgaagcacgtgttcccacctgaggtggccgtgttcgagcctagcgacgccgagatctggcacacccagaaagccaccctcgtgtgcctggctaccggcttctaccccgaccatgtggaactgtcttggtgggtcaacggcaaagaggtgcacagcggcgtgtctaccgacccccagccactgaaagaacagcccgccctgaacgacagccggtactgcctgagcagcagactgagagtgtccgccaccttctggcagaacccccggaaccacttcagatgccaggtgcagttctacggcctgagcgagaacgacgagtggacccaggacagagccaagcccgtgacccagatcgtgtctgccgaagcctggggcagagccgattgcggctttaccagcgagagctaccagcagggcgtgctgagcgccaccatcctgtacgagatcctgctgggcaaggccaccctgtacgccgtgctggtgtctgccctggtgctgatggctatggtcaagcggaaggacagccggggaagggccaagcgatctggatctggagcaacaaacttctcactactcaaacaagcaggtgacgtggaggagaatcccgggcctactagtatggactggatttggcgcatccttttccttgtcggcgctgctaccggcgcgcattccttcgaagaagtgcagctggttgaatcaggcggaggactggttcagcctggcggatctctgagactgtcttgtgccgccagcggctacaccttcaccaactactggatgaactgggtccgacaggcccctggcaaaggactggaatgggtcggaatgatcgaccccagcgacagcgagacacactacaaccacatcttcaaggaccgcttcaccatcagcgccgacaccagcaagaataccgcctacctccagatgaactccctgagagccgaggacaccgccgtgtactactgcgccagaaacctgtatctgtggggccagggaaccctggtcacagtgtcatctacgcgtatccagaaccctgatcctgccgtgtaccagctgcgggatagcaagagcagcgacaagagcgtgtgtctgttcaccgacttcgacagccagaccaacgtgtcccagagcaaggactccgacgtgtacatcaccgataagaccgtgctggacatgcggagcatggacttcaagagcaactccgccgtggcctggtccaccaagtccgatttcgcctgcgccaacgccttcaacaacagcattatccccgaggacacattcttcccaagccccgaggtggtgtgcgacgtgaagctggtggaaaagagcttcgagacagacaccaacctgaacttccagaacctggtggtgatcggcgccagaatcctgctgctgaaagtggccggctttaacctgctgatgaccctgcggctgtggtccagc

SEQ ID NO: 37305 - DNA, 1857 bp, synthetic construct
  source 1..1857: mol_type = other DNA
atggccttaccagtgaccgccttgctcctgccgctggccttgctgctccacgccgccaggccggacatccagatgacacagagccctagcagcctgtctgccagcgtgggagacagagtgaccatcacatgcaagagcagccagagcctgctggactccgatggcaagacctacctgaactggtatcagcagaagcccggcaaggcccctaagctgctgatctacctggtgtccaagctggatagcggcgtgcccagcagattttctggcagcggcagcggaaccgacttcaccctgacaatatccagcctccagcctgaggacttcgccacctactactgcttccaaggcacccactttccatacaccttcggccagggcaccaaggtggaaatcaaaagactcgaggacctgaagaacgtgttcccacctgaggtggccgtgttcgagcctagcaaggccgagatcagcagaacccagaaagccaccctcgtgtgcctggctaccggcttctaccctcctcatgtggaactgtcttggtgggtcaacggcaaagaggtgcacgacggcgtgtgtaccgacccccagccactgaaagaacagcccgccctgaacgacagccggtactgcctgagcagcagactgagagtgtccgccaccttctggcagaacccccggaaccacttcagatgccaggtgcagttctacggcctgagcgagaacgacgagtggacccaggacagagccaagcccgtgacccagatcgtgtctgccgaagcctggggcagagccgattgcggctttaccagcgagagctaccagcagggcgtgctgagcgccaccatcctgtacgagatcctgctgggcaaggccaccctgtacgccgtgctggtgtctgccctggtgctgatggctatggtcaagcggaaggacagccggggaagggccaagcgatctggatctggagcaacaaacttctcactactcaaacaagcaggtgacgtggaggagaatcccgggcctactagtatggactggatttggcgcatccttttccttgtcggcgctgctaccggcgcgcattccttcgaagaagtgcagctggttgaatcaggcggaggactggttcagcctggcggatctctgagactgtcttgtgccgccagcggctacaccttcaccaactactggatgaactgggtccgacaggcccctggcaaaggactggaatgggtcggaatgatcgaccccagcgacagcgagacacactacaaccacatcttcaaggaccgcttcaccatcagcgccgacaccagcaagaataccgcctacctccagatgaactccctgagagccgaggacaccgccgtgtactactgcgccagaaacctgtatctgtggggccagggaaccctggtcacagtgtcatctacgcgtatccagaaccctgatcctgccgtgtaccagctgcgggatagcaagagcagcgacaagttcgtgtgtctgttcaccgacttcgacagccagatcaacgtgtcccagagcaaggactccgacgtgtacatcaccgataagtgcgtgctggacatgcggagcatggacttcaagagcaactccgccgtggcctggtccaacaagtccgatttcacctgcgccaacgccttcaacaacagcattatccccgaggacacattcttcccaagccccgagagcagctgcgacgtgaagctggtggaaaagagcttcgagacagacaccaacctgaacttccagaacctgagcgtgatcggcttcagaatcctgctgctgaaagtggccggctttaacctgctgatgaccctgcggctgtggtccagc

SEQ ID NO: 37306 - DNA, 2283 bp, synthetic construct
  source 1..2283: mol_type = other DNA
atggccttaccagtgaccgccttgctcctgccgctggccttgctgctccacgccgccaggccggacatccagatgacacagagccctagcagcctgtctgccagcgtgggagacagagtgaccatcacatgcaagagcagccagagcctgctggactccgatggcaagacctacctgaactggtatcagcagaagcccggcaaggcccctaagctgctgatctacctggtgtccaagctggatagcggcgtgcccagcagattttctggcagcggcagcggaaccgacttcaccctgacaatatccagcctccagcctgaggacttcgccacctactactgcttccaaggcacccactttccatacaccttcggccagggcaccaaggtggaaatcaaaagactcgaggacctgaagaacgtgttcccacctgaggtggccgtgttcgagcctagcgaggccgagatcagccacacccagaaagccaccctcgtgtgcctggctaccggcttctaccccgaccatgtggaactgtcttggtgggtcaacggcaaagaggtgcacagcggcgtgtgtaccgacccccagccactgaaagaacagcccgccctgaacgacagccggtactgcctgagcagcagactgagagtgtccgccaccttctggcagaacccccggaaccacttcagatgccaggtgcagttctacggcctgagcgagaacgacgagtggacccaggacagagccaagcccgtgacccagatcgtgtctgccgaagcctggggcagagccgattgcggctttaccagcgagagctaccagcagggcgtgctgagcgccaccatcctgtacgagatcctgctgggcaaggccaccctgtacgccgtgctggtgtctgccctggtgctgatggctatggtcaagcggaaggacagccggggaagggccaagcgatctggatctggagcaacaaacttctcactactcaaacaagcaggtgacgtggaggagaatcccgggcctactagtaccatggactggatttggcgcatccttttccttgtcggcgctgctaccggcgcccattccgggccccaggtgcagctccaagaaagcggacccggactggttaagccctctcagaccctgtctctgacctgcacagttagcggagccagcattaccacaggcgagtattattggaattggtttcggcagccaccaggcaaggggcttgagtggatgggtgctattgctgcctctggcagcaccacctactctcccagctttgagagcagaacctccatcagccgggacacctccaaaaaccagttctctctgaagctgtcctccgtgaccgctgctgacaccgccgtctattattgtggccggtctttcggcgtggcagctgtgaccacaggacagaacagaggccagggaacacttgtgaccgtgtcctctggatccggcggcggaggatctggcggaggcggatctgggggcggaggctctttcgaagaagtgcagctggttgaatcaggcggaggactggttcagcctggcggatctctgagactgtcttgtgccgccagcggctacaccttcaccaactactggatgaactgggtccgacaggcccctggcaaaggactggaatgggtcggaatgatcgaccccagcgacagcgagacacactacaaccacatcttcaaggaccgcttcaccatcagcgccgacaccagcaagaataccgcctacctccagatgaactccctgagagccgaggacaccgccgtgtactactgcgccagaaacctgtatctgtggggccagggaaccctggtcacagtgtcatctacgcgtatccagaaccctgatcctgccgtgtaccagctgcgggatagcaagagcagcgacaagagcgtgtgtctgttcaccgacttcgacagccagaccaacgtgtcccagagcaaggactccgacgtgtacatcaccgataagtgcgtgctggacatgcggagcatggacttcaagagcaactccgccgtggcctggtccaacaagtccgatttcgcctgcgccaacgccttcaacaacagcattatccccgaggacacattcttcccaagccccgagagcagctgcgacgtgaagctggtggaaaagagcttcgagacagacaccaacctgaacttccagaacctgagcgtgatcggcttcagaatcctgctgctgaaagtggccggctttaacctgctgatgaccctgcggctgtggtccagc

SEQ ID NO: 37307 - DNA, 2706 bp, synthetic construct
  source 1..2706: mol_type = other DNA
atggccttaccagtgaccgccttgctcctgccgctggccttgctgctccacgccgccaggccgcaggttcagctgcaagagtctggccctggcctggtcaagcctagccaaacactgagcctgacctgtaccgtgtctggcggctctatcaccaccggcgagttctactggaactggttcagacagcctcctggcaaaggactggaatggatgggagccattgccgccagcggcagcacaacatacagccctagcttcgagagccggaccagcatcagcagagacaccagcaagaatcagttcagcctgaagctgagcagcgtgacagccgccgatacagccgtgtattactgcggcagatcctttggagtggccgccgtgacaaccggccagaatagaggacagggcaccctggtcacagtgtctagcggtaccggcggaggcggatctggcggcggaggtagcggtggcggaggatctgaattcgacatccagatgacacagagccctagcagcctgtctgccagcgtgggagacagagtgaccatcacatgcaagagcagccagagcctgctggactccgatggcaagacctacctgaactggtatcagcagaagcccggcaaggcccctaagctgctgatctacctggtgtccaagctggatagcggcgtgcccagcagattttctggcagcggcagcggaaccgacttcaccctgacaatatccagcctccagcctgaggacttcgccacctactactgcttccaaggcacccactttccatacaccttcggccagggcaccaaggtggaaatcaaaagactcgagatccagaaccctgatcctgccgtgtaccagctgcgggatagcaagagcagcgacaagagcgtgtgtctgttcaccgacttcgacagccagaccaacgtgtcccagagcaaggactccgacgtgtacatcaccgataagtgcgtgctggacatgcggagcatggacttcaagagcaactccgccgtggcctggtccaacaagtccgatttcgcctgcgccaacgccttcaacaacagcattatccccgaggacacattcttcccaagcagcgacgtgccctgcgacgtgaagctggtggaaaagagcttcgagacagacaccaacctgaacttccagaacctgagcgtgatcggcttcagaatcctgctgctgaaagtggccggctttaacctgctgatgaccctgcggctgtggtccagccgcgccaagagaagcggatctggcgtgaagcagaccctgaatttcgacctgctgaagctggctggcgacgtggaatccaacccaggccctactagtaccatggactggatttggcgcatccttttccttgtcggcgctgctaccggcgcccattccgggcccgaagtgcaactggttgaatccggtggcggcctggtgcaacccggcggatctctcagacttagctgtgccgcctccggcagaaccttcacaatgggatggtacaggcaggctccagggaaagagagagagttcgtcgccgccatctctctgtctcccacactggcctactacgccgactctgtgaaaggccggttcaccatctccagagataatagcaagaacaccgtggtgctgcaaatgaactctctgagagccgaggatacagccctgtactattgtgccgctgaccggaagtccgtgatgagcatcagacccgattactggggacagggcacactggtcacagtgtctagtggatccggcggcggaggatctggcggaggcggatctgggggcggaggctctttcgaagaagtgcagctggttgaatcaggcggaggactggttcagcctggcggatctctgagactgtcttgtgccgccagcggctacaccttcaccaactactggatgaactgggtccgacaggcccctggcaaaggactggaatgggtcggaatgatcgaccccagcgacagcgagacacactacaaccacatcttcaaggaccgcttcaccatcagcgccgacaccagcaagaataccgcctacctccagatgaactccctgagagccgaggacaccgccgtgtactactgcgccagaaacctgtatctgtggggccagggaaccctggtcacagtgtcatctacgcgtgaggacctgaagaacgtgttcccacctgaggtggccgtgttcgagcctagcaaggccgagatcgcccacacccagaaagccaccctcgtgtgcctggctaccggcttctaccccgaccatgtggaactgtcttggtgggtcaacggcaaagaggtgcacagcggcgtgtgtaccgacccccagccactgaaagaacagcccgccctgaacgacagccggtactgcctgagcagcagactgagagtgtccgccaccttctggcagaacccccggaaccacttcagatgccaggtgcagttctacggcctgagcgagaacgacgagtggacccaggacagagccaagcccgtgacccagatcgtgtctgccgaagcctggggcagagccgattgcggcatcaccagcgccagctaccaccagggcgtgctgagcgccaccatcctgtacgagatcctgctgggcaaggccaccctgtacgccgtgctggtgtctgccctggtgctgatggctatggtcaagcggaaggacagccgggga

SEQ ID NO: 37308 - DNA, 2295 bp, synthetic construct
  source 1..2295: mol_type = other DNA
atggccttaccagtgaccgccttgctcctgccgctggccttgctgctccacgccgccaggccgcaggttcagctgcaagagtctggccctggcctggtcaagcctagccaaacactgagcctgacctgtaccgtgtctggcggctctatcaccaccggcgagttctactggaactggttcagacagcctcctggcaaaggactggaatggatgggagccattgccgccagcggcagcacaacatacagccctagcttcgagagccggaccagcatcagcagagacaccagcaagaatcagttcagcctgaagctgagcagcgtgacagccgccgatacagccgtgtattactgcggcagatcctttggagtggccgccgtgacaaccggccagaatagaggacagggcaccctggtcacagtgtctagcggtaccggcggaggcggatctggcggcggaggtagcggtggcggaggatctgaattcgacatccagatgacacagagccctagcagcctgtctgccagcgtgggagacagagtgaccatcacatgcaagagcagccagagcctgctggactccgatggcaagacctacctgaactggtatcagcagaagcccggcaaggcccctaagctgctgatctacctggtgtccaagctggatagcggcgtgcccagcagattttctggcagcggcagcggaaccgacttcaccctgacaatatccagcctccagcctgaggacttcgccacctactactgcttccaaggcacccactttccatacaccttcggccagggcaccaaggtggaaatcaaaagactcgagatccagaaccctgatcctgccgtgtaccagctgcgggatagcaagagcagcgacaagagcgtgtgtctgttcaccgacttcgacagccagaccaacgtgtcccagagcaaggactccgacgtgtacatcaccgataagtgcgtgctggacatgcggagcatggacttcaagagcaactccgccgtggcctggtccaacaagtccgatttcgcctgcgccaacgccttcaacaacagcattatccccgaggacacattcttcccaagcagcgacgtgccctgcgacgtgaagctggtggaaaagagcttcgagacagacaccaacctgaacttccagaacctgagcgtgatcggcttcagaatcctgctgctgaaagtggccggctttaacctgctgatgaccctgcggctgtggtccagccgcgccaagagaagcggatctggcgtgaagcagaccctgaatttcgacctgctgaagctggctggcgacgtggaatccaacccaggccctactagtaccatggactggatttggcgcatccttttccttgtcggcgctgctaccggcgcccattccttcgaagaagtgcagctggttgaatcaggcggaggactggttcagcctggcggatctctgagactgtcttgtgccgccagcggctacaccttcaccaactactggatgaactgggtccgacaggcccctggcaaaggactggaatgggtcggaatgatcgaccccagcgacagcgagacacactacaaccacatcttcaaggaccgcttcaccatcagcgccgacaccagcaagaataccgcctacctccagatgaactccctgagagccgaggacaccgccgtgtactactgcgccagaaacctgtatctgtggggccagggaaccctggtcacagtgtcatctacgcgtgaggacctgaagaacgtgttcccacctgaggtggccgtgttcgagcctagcaaggccgagatcgcccacacccagaaagccaccctcgtgtgcctggctaccggcttctaccccgaccatgtggaactgtcttggtgggtcaacggcaaagaggtgcacagcggcgtgtgtaccgacccccagccactgaaagaacagcccgccctgaacgacagccggtactgcctgagcagcagactgagagtgtccgccaccttctggcagaacccccggaaccacttcagatgccaggtgcagttctacggcctgagcgagaacgacgagtggacccaggacagagccaagcccgtgacccagatcgtgtctgccgaagcctggggcagagccgattgcggcatcaccagcgccagctaccaccagggcgtgctgagcgccaccatcctgtacgagatcctgctgggcaaggccaccctgtacgccgtgctggtgtctgccctggtgctgatggctatggtcaagcggaaggacagccgggga

SEQ ID NO: 37309 - DNA, 2694 bp, synthetic construct
  source 1..2694: mol_type = other DNA
atggccttaccagtgaccgccttgctcctgccgctggccttgctgctccacgccgccaggccggaagtgcagctggttgaatctggcggaggactggttcaggctggcggatctctgagactgtcttgtgccgccagcggcagaacctttagcatgggctggtttagacaggcccctggcaaagagagagagttcgtcgccgccatcacatactctggcggcagcccttactacgccgactctgtgaagggcagattcaccatcagccgggacaacgccaagaacaccgtgtacctccagatgaacagcctgaagcctgaggacaccgccgtgtactactgcgccgccaatccaacatacggcagcgactggaacgccgagaattggggccagggaacccaagtgacagtgtctagcggtaccggcggaggcggatctggcggcggaggtagcggtggcggaggatctgaattcgacatccagatgacacagagccctagcagcctgtctgccagcgtgggagacagagtgaccatcacatgcaagagcagccagagcctgctggactccgatggcaagacctacctgaactggtatcagcagaagcccggcaaggcccctaagctgctgatctacctggtgtccaagctggatagcggcgtgcccagcagattttctggcagcggcagcggaaccgacttcaccctgacaatatccagcctccagcctgaggacttcgccacctactactgcttccaaggcacccactttccatacaccttcggccagggcaccaaggtggaaatcaaaagactcgaggacctgaagaacgtgttcccacctgaggtggccgtgttcgagcctagcgaggccgagatcagccacacccagaaagccaccctcgtgtgcctggctaccggcttctaccccgaccatgtggaactgtcttggtgggtcaacggcaaagaggtgcacagcggcgtgtgtaccgacccccagccactgaaagaacagcccgccctgaacgacagccggtactgcctgagcagcagactgagagtgtccgccaccttctggcagaacccccggaaccacttcagatgccaggtgcagttctacggcctgagcgagaacgacgagtggacccaggacagagccaagcccgtgacccagatcgtgtctgccgaagcctggggcagagccgattgcggctttaccagcgagagctaccagcagggcgtgctgagcgccaccatcctgtacgagatcctgctgggcaaggccaccctgtacgccgtgctggtgtctgccctggtgctgatggctatggtcaagcggaaggacagccggggaagggccaagcgatctggatctggagcaacaaacttctcactactcaaacaagcaggtgacgtggaggagaatcccgggcctactagtaccatggactggatttggcgcatccttttccttgtcggcgctgctaccggcgcccattccgggccccaggtgcagctccaagaaagcggacccggactggttaagccctctcagaccctgtctctgacctgcacagttagcggagccagcattaccacaggcgagtattattggaattggtttcggcagccaccaggcaaggggcttgagtggatgggtgctattgctgcctctggcagcaccacctactctcccagctttgagagcagaacctccatcagccgggacacctccaaaaaccagttctctctgaagctgtcctccgtgaccgctgctgacaccgccgtctattattgtggccggtctttcggcgtggcagctgtgaccacaggacagaacagaggccagggaacacttgtgaccgtgtcctctggatccggcggcggaggatctggcggaggcggatctgggggcggaggctctttcgaagaagtgcagctggttgaatcaggcggaggactggttcagcctggcggatctctgagactgtcttgtgccgccagcggctacaccttcaccaactactggatgaactgggtccgacaggcccctggcaaaggactggaatgggtcggaatgatcgaccccagcgacagcgagacacactacaaccacatcttcaaggaccgcttcaccatcagcgccgacaccagcaagaataccgcctacctccagatgaactccctgagagccgaggacaccgccgtgtactactgcgccagaaacctgtatctgtggggccagggaaccctggtcacagtgtcatctacgcgtatccagaaccctgatcctgccgtgtaccagctgcgggatagcaagagcagcgacaagagcgtgtgtctgttcaccgacttcgacagccagaccaacgtgtcccagagcaaggactccgacgtgtacatcaccgataagtgcgtgctggacatgcggagcatggacttcaagagcaactccgccgtggcctggtccaacaagtccgatttcgcctgcgccaacgccttcaacaacagcattatccccgaggacacattcttcccaagccccgagagcagctgcgacgtgaagctggtggaaaagagcttcgagacagacaccaacctgaacttccagaacctgagcgtgatcggcttcagaatcctgctgctgaaagtggccggctttaacctgctgatgaccctgcggctgtggtccagc

SEQ ID NO: 37310 - DNA, 2715 bp, synthetic construct
  source 1..2715: mol_type = other DNA
atggccttaccagtgaccgccttgctcctgccgctggccttgctgctccacgccgccaggccggaagtgcagctggttgaatctggcggaggactggttcaggctggcggatctctgagactgtcttgtgccgccagcggcagaacctttagcatgggctggtttagacaggcccctggcaaagagagagagttcgtcgccgccatcacatactctggcggcagcccttactacgccgactctgtgaagggcagattcaccatcagccgggacaacgccaagaacaccgtgtacctccagatgaacagcctgaagcctgaggacaccgccgtgtactactgcgccgccaatccaacatacggcagcgactggaacgccgagaattggggccagggaacccaagtgacagtgtctagcggtaccggcggaggcggatctggcggcggaggtagcggtggcggaggatctgaattcgacatccagatgacacagagccctagcagcctgtctgccagcgtgggagacagagtgaccatcacatgcaagagcagccagagcctgctggactccgatggcaagacctacctgaactggtatcagcagaagcccggcaaggcccctaagctgctgatctacctggtgtccaagctggatagcggcgtgcccagcagattttctggcagcggcagcggaaccgacttcaccctgacaatatccagcctccagcctgaggacttcgccacctactactgcttccaaggcacccactttccatacaccttcggccagggcaccaaggtggaaatcaaaagactcgagatccagaaccctgatcctgccgtgtaccagctgcgggatagcaagagcagcgacaagagcgtgtgtctgttcaccgacttcgacagccagaccaacgtgtcccagagcaaggactccgacgtgtacatcaccgataagtgcgtgctggacatgcggagcatggacttcaagagcaactccgccgtggcctggtccaacaagtccgatttcgcctgcgccaacgccttcaacaacagcattatccccgaggacacattcttcccaagcagcgacgtgccctgcgacgtgaagctggtggaaaagagcttcgagacagacaccaacctgaacttccagaacctgagcgtgatcggcttcagaatcctgctgctgaaagtggccggctttaacctgctgatgaccctgcggctgtggtccagccgcgccaagagaagcggatctggcgtgaagcagaccctgaatttcgacctgctgaagctggctggcgacgtggaatccaacccaggccctactagtaccatggactggatttggcgcatccttttccttgtcggcgctgctaccggcgcccattccgggccccaggtgcagctggttgaatctggcggaggactggttcagcctggcggatctctgagactgtcttgtgccgccagcggcaacatcaacagcagaaactgcatgggctggttcagacaggcccctggcaagggaagagaaggcgtggcagctatcggccaagtgaccggcagaacctactacgtggacagcgtgaagggcagattcaccatcagcctggacaacagcaagaacaccctgtacctccagatgaacagcctgagagccgaggacaccgccgtgtactattgtgctgctgcccctggctgtctgctgtctgcacttagaagcgccgactacagaaactggggccagggcacactggtcaccgtttcttctggatccggcggcggaggatctggcggaggcggatctgggggcggaggctctttcgaagaagtgcagctggttgaatcaggcggaggactggttcagcctggcggatctctgagactgtcttgtgccgccagcggctacaccttcaccaactactggatgaactgggtccgacaggcccctggcaaaggactggaatgggtcggaatgatcgaccccagcgacagcgagacacactacaaccacatcttcaaggaccgcttcaccatcagcgccgacaccagcaagaataccgcctacctccagatgaactccctgagagccgaggacaccgccgtgtactactgcgccagaaacctgtatctgtggggccagggaaccctggtcacagtgtcatctacgcgtgaggacctgaagaacgtgttcccacctgaggtggccgtgttcgagcctagcaaggccgagatcgcccacacccagaaagccaccctcgtgtgcctggctaccggcttctaccccgaccatgtggaactgtcttggtgggtcaacggcaaagaggtgcacagcggcgtgtgtaccgacccccagccactgaaagaacagcccgccctgaacgacagccggtactgcctgagcagcagactgagagtgtccgccaccttctggcagaacccccggaaccacttcagatgccaggtgcagttctacggcctgagcgagaacgacgagtggacccaggacagagccaagcccgtgacccagatcgtgtctgccgaagcctggggcagagccgattgcggcatcaccagcgccagctaccaccagggcgtgctgagcgccaccatcctgtacgagatcctgctgggcaaggccaccctgtacgccgtgctggtgtctgccctggtgctgatggctatggtcaagcggaaggacagccgggga

SEQ ID NO: 37311 - DNA, 2703 bp, synthetic construct
  source 1..2703: mol_type = other DNA
atggccttaccagtgaccgccttgctcctgccgctggccttgctgctccacgccgccaggccggaagtgcagctggttgaatctggcggaggactggttcaggctggcggatctctgagactgtcttgtgccgccagcggcagaacctttagcatgggctggtttagacaggcccctggcaaagagagagagttcgtcgccgccatcacatactctggcggcagcccttactacgccgactctgtgaagggcagattcaccatcagccgggacaacgccaagaacaccgtgtacctccagatgaacagcctgaagcctgaggacaccgccgtgtactactgcgccgccaatccaacatacggcagcgactggaacgccgagaattggggccagggaacccaagtgacagtgtctagcggtaccggcggaggcggatctggcggcggaggtagcggtggcggaggatctgaattcgacatccagatgacacagagccctagcagcctgtctgccagcgtgggagacagagtgaccatcacatgcaagagcagccagagcctgctggactccgatggcaagacctacctgaactggtatcagcagaagcccggcaaggcccctaagctgctgatctacctggtgtccaagctggatagcggcgtgcccagcagattttctggcagcggcagcggaaccgacttcaccctgacaatatccagcctccagcctgaggacttcgccacctactactgcttccaaggcacccactttccatacaccttcggccagggcaccaaggtggaaatcaaaagactcgaggacctgaagaacgtgttcccacctgaggtggccgtgttcgagcctagcgaggccgagatcagccacacccagaaagccaccctcgtgtgcctggctaccggcttctaccccgaccatgtggaactgtcttggtgggtcaacggcaaagaggtgcacagcggcgtgtgtaccgacccccagccactgaaagaacagcccgccctgaacgacagccggtactgcctgagcagcagactgagagtgtccgccaccttctggcagaacccccggaaccacttcagatgccaggtgcagttctacggcctgagcgagaacgacgagtggacccaggacagagccaagcccgtgacccagatcgtgtctgccgaagcctggggcagagccgattgcggctttaccagcgagagctaccagcagggcgtgctgagcgccaccatcctgtacgagatcctgctgggcaaggccaccctgtacgccgtgctggtgtctgccctggtgctgatggctatggtcaagcggaaggacagccggggaagggccaagcgatctggatctggagcaacaaacttctcactactcaaacaagcaggtgacgtggaggagaatcccgggcctactagtaccatggactggatttggcgcatccttttccttgtcggcgctgctaccggcgcccattccgggccccaggtgcagctggttgaatctggcggaggactggttcagcctggcggatctctgagactgtcttgtgccgccagcggcaacatcaacagcagaaactgcatgggctggttcagacaggcccctggcaagggaagagaaggcgtggcagctatcggccaagtgaccggcagaacctactacgtggacagcgtgaagggcagattcaccatcagcctggacaacagcaagaacaccctgtacctccagatgaacagcctgagagccgaggacaccgccgtgtactattgtgctgctgcccctggctgtctgctgtctgcacttagaagcgccgactacagaaactggggccagggcacactggtcaccgtttcttctggatccggcggcggaggatctggcggaggcggatctgggggcggaggctctttcgaagaagtgcagctggttgaatcaggcggaggactggttcagcctggcggatctctgagactgtcttgtgccgccagcggctacaccttcaccaactactggatgaactgggtccgacaggcccctggcaaaggactggaatgggtcggaatgatcgaccccagcgacagcgagacacactacaaccacatcttcaaggaccgcttcaccatcagcgccgacaccagcaagaataccgcctacctccagatgaactccctgagagccgaggacaccgccgtgtactactgcgccagaaacctgtatctgtggggccagggaaccctggtcacagtgtcatctacgcgtatccagaaccctgatcctgccgtgtaccagctgcgggatagcaagagcagcgacaagagcgtgtgtctgttcaccgacttcgacagccagaccaacgtgtcccagagcaaggactccgacgtgtacatcaccgataagtgcgtgctggacatgcggagcatggacttcaagagcaactccgccgtggcctggtccaacaagtccgatttcgcctgcgccaacgccttcaacaacagcattatccccgaggacacattcttcccaagccccgagagcagctgcgacgtgaagctggtggaaaagagcttcgagacagacaccaacctgaacttccagaacctgagcgtgatcggcttcagaatcctgctgctgaaagtggccggctttaacctgctgatgaccctgcggctgtggtccagc

SEQ ID NO: 37312 - DNA, 2703 bp, synthetic construct
  source 1..2703: mol_type = other DNA
atggccttaccagtgaccgccttgctcctgccgctggccttgctgctccacgccgccaggccggaagtgcaactggttgaatccggtggcggcctggtgcaagcaggcggatctctcagacttagctgtgccgcctccggcagaaccttcacaatgggatggtttaggcaggctccagggaaagagagagagttcgtcgccgccatctctctgtctcccacactggcctactacgccgactctgtgaaaggccggttcaccatctccagagataatgccaagaacaccgtggtgctgcaaatgaactctctgaaacccgaggatacagccctgtactattgtgccgctgaccggaagtccgtgatgagcatcagacccgattactggggacagggcacacaagtcacagtgtcctctggtaccggcggaggcggatctggcggcggaggtagcggtggcggaggatctgaattcgacatccagatgacacagagccctagcagcctgtctgccagcgtgggagacagagtgaccatcacatgcaagagcagccagagcctgctggactccgatggcaagacctacctgaactggtatcagcagaagcccggcaaggcccctaagctgctgatctacctggtgtccaagctggatagcggcgtgcccagcagattttctggcagcggcagcggaaccgacttcaccctgacaatatccagcctccagcctgaggacttcgccacctactactgcttccaaggcacccactttccatacaccttcggccagggcaccaaggtggaaatcaaaagactcgaggacctgaagaacgtgttcccacctgaggtggccgtgttcgagcctagcgaggccgagatcagccacacccagaaagccaccctcgtgtgcctggctaccggcttctaccccgaccatgtggaactgtcttggtgggtcaacggcaaagaggtgcacagcggcgtgtgtaccgacccccagccactgaaagaacagcccgccctgaacgacagccggtactgcctgagcagcagactgagagtgtccgccaccttctggcagaacccccggaaccacttcagatgccaggtgcagttctacggcctgagcgagaacgacgagtggacccaggacagagccaagcccgtgacccagatcgtgtctgccgaagcctggggcagagccgattgcggctttaccagcgagagctaccagcagggcgtgctgagcgccaccatcctgtacgagatcctgctgggcaaggccaccctgtacgccgtgctggtgtctgccctggtgctgatggctatggtcaagcggaaggacagccggggaagggccaagcgatctggatctggagcaacaaacttctcactactcaaacaagcaggtgacgtggaggagaatcccgggcctactagtaccatggactggatttggcgcatccttttccttgtcggcgctgctaccggcgcccattccgggccccaggtgcagctggttgaatctggcggaggactggttcagcctggcggatctctgagactgtcttgtgccgccagcggcaacatcaacagcagaaactgcatgggctggttcagacaggcccctggcaagggaagagaaggcgtggcagctatcggccaagtgaccggcagaacctactacgtggacagcgtgaagggcagattcaccatcagcctggacaacagcaagaacaccctgtacctccagatgaacagcctgagagccgaggacaccgccgtgtactattgtgctgctgcccctggctgtctgctgtctgcacttagaagcgccgactacagaaactggggccagggcacactggtcaccgtttcttctggatccggcggcggaggatctggcggaggcggatctgggggcggaggctctttcgaagaagtgcagctggttgaatcaggcggaggactggttcagcctggcggatctctgagactgtcttgtgccgccagcggctacaccttcaccaactactggatgaactgggtccgacaggcccctggcaaaggactggaatgggtcggaatgatcgaccccagcgacagcgagacacactacaaccacatcttcaaggaccgcttcaccatcagcgccgacaccagcaagaataccgcctacctccagatgaactccctgagagccgaggacaccgccgtgtactactgcgccagaaacctgtatctgtggggccagggaaccctggtcacagtgtcatctacgcgtatccagaaccctgatcctgccgtgtaccagctgcgggatagcaagagcagcgacaagagcgtgtgtctgttcaccgacttcgacagccagaccaacgtgtcccagagcaaggactccgacgtgtacatcaccgataagtgcgtgctggacatgcggagcatggacttcaagagcaactccgccgtggcctggtccaacaagtccgatttcgcctgcgccaacgccttcaacaacagcattatccccgaggacacattcttcccaagccccgagagcagctgcgacgtgaagctggtggaaaagagcttcgagacagacaccaacctgaacttccagaacctgagcgtgatcggcttcagaatcctgctgctgaaagtggccggctttaacctgctgatgaccctgcggctgtggtccagc

SEQ ID NO: 37313 - DNA, 2715 bp, synthetic construct
  source 1..2715: mol_type = other DNA
atggccttaccagtgaccgccttgctcctgccgctggccttgctgctccacgccgccaggccgcaggttcagctgcaagagtctggccctggcctggtcaagcctagccaaacactgagcctgacctgtaccgtgtctggcggctctatcaccaccggcgagttctactggaactggttcagacagcctcctggcaaaggactggaatggatgggagccattgccgccagcggcagcacaacatacagccctagcttcgagagccggaccagcatcagcagagacaccagcaagaatcagttcagcctgaagctgagcagcgtgacagccgccgatacagccgtgtattactgcggcagatcctttggagtggccgccgtgacaaccggccagaatagaggacagggcaccctggtcacagtgtctagcggtaccggcggaggcggatctggcggcggaggtagcggtggcggaggatctgaattcgacatccagatgacacagagccctagcagcctgtctgccagcgtgggagacagagtgaccatcacatgcaagagcagccagagcctgctggactccgatggcaagacctacctgaactggtatcagcagaagcccggcaaggcccctaagctgctgatctacctggtgtccaagctggatagcggcgtgcccagcagattttctggcagcggcagcggaaccgacttcaccctgacaatatccagcctccagcctgaggacttcgccacctactactgcttccaaggcacccactttccatacaccttcggccagggcaccaaggtggaaatcaaaagactcgaggacctgaagaacgtgttcccacctgaggtggccgtgttcgagcctagcgaggccgagatcagccacacccagaaagccaccctcgtgtgcctggctaccggcttctaccccgaccatgtggaactgtcttggtgggtcaacggcaaagaggtgcacagcggcgtgtgtaccgacccccagccactgaaagaacagcccgccctgaacgacagccggtactgcctgagcagcagactgagagtgtccgccaccttctggcagaacccccggaaccacttcagatgccaggtgcagttctacggcctgagcgagaacgacgagtggacccaggacagagccaagcccgtgacccagatcgtgtctgccgaagcctggggcagagccgattgcggctttaccagcgagagctaccagcagggcgtgctgagcgccaccatcctgtacgagatcctgctgggcaaggccaccctgtacgccgtgctggtgtctgccctggtgctgatggctatggtcaagcggaaggacagccggggaagggccaagcgatctggatctggagcaacaaacttctcactactcaaacaagcaggtgacgtggaggagaatcccgggcctactagtaccatggactggatttggcgcatccttttccttgtcggcgctgctaccggcgcccattccgggccccaggtgcagctggttgaatctggcggaggactggttcagcctggcggatctctgagactgtcttgtgccgccagcggcaacatcaacagcagaaactgcatgggctggttcagacaggcccctggcaagggaagagaaggcgtggcagctatcggccaagtgaccggcagaacctactacgtggacagcgtgaagggcagattcaccatcagcctggacaacagcaagaacaccctgtacctccagatgaacagcctgagagccgaggacaccgccgtgtactattgtgctgctgcccctggctgtctgctgtctgcacttagaagcgccgactacagaaactggggccagggcacactggtcaccgtttcttctggatccggcggcggaggatctggcggaggcggatctgggggcggaggctctttcgaagaagtgcagctggttgaatcaggcggaggactggttcagcctggcggatctctgagactgtcttgtgccgccagcggctacaccttcaccaactactggatgaactgggtccgacaggcccctggcaaaggactggaatgggtcggaatgatcgaccccagcgacagcgagacacactacaaccacatcttcaaggaccgcttcaccatcagcgccgacaccagcaagaataccgcctacctccagatgaactccctgagagccgaggacaccgccgtgtactactgcgccagaaacctgtatctgtggggccagggaaccctggtcacagtgtcatctacgcgtatccagaaccctgatcctgccgtgtaccagctgcgggatagcaagagcagcgacaagagcgtgtgtctgttcaccgacttcgacagccagaccaacgtgtcccagagcaaggactccgacgtgtacatcaccgataagtgcgtgctggacatgcggagcatggacttcaagagcaactccgccgtggcctggtccaacaagtccgatttcgcctgcgccaacgccttcaacaacagcattatccccgaggacacattcttcccaagccccgagagcagctgcgacgtgaagctggtggaaaagagcttcgagacagacaccaacctgaacttccagaacctgagcgtgatcggcttcagaatcctgctgctgaaagtggccggctttaacctgctgatgaccctgcggctgtggtccagc

SEQ ID NO: 37314 - DNA, 1452 bp, synthetic construct
  source 1..1452: mol_type = other DNA
atggccttaccagtgaccgccttgctcctgccgctggccttgctgctccacgccgccaggccggacatccagatgacacagagccctagcagcctgtctgccagcgtgggagacagagtgaccatcacatgcaagagcagccagagcctgctggactccgatggcaagacctacctgaactggtatcagcagaagcccggcaaggcccctaagctgctgatctacctggtgtccaagctggatagcggcgtgcccagcagattttctggcagcggcagcggaaccgacttcaccctgacaatatccagcctccagcctgaggacttcgccacctactactgcttccaaggcacccactttccattcaccttcggccagggcaccaaggtggaaatcaaaagaggcggaggcggaagtggaggcggaggatctggcggcggaggctctgaagtgcagctggttgaatcaggcggaggactggttcagcctggcggatctctgagactgtcttgtgccgccagcggctacaccttcaccaactactggatgaactgggtccgacaggcccctggcaaaggactggaatgggtcggaatgatcgaccccagcgacagcgagacacactacaaccacatcttcaaggaccgcttcaccatcagcgccgacaccagcaagaataccgcctacctccagatgaactccctgagagccgaggacaccgccgtgtactactgcgccagaaacctgtatctgtggggccagggaaccctggtcacagtgtcatctacgcgtaaaattgaagttatgtatcctcctccttacctagacaatgagaagagcaatggaaccattatccatgtgaaagggaaacacctttgtccaagtcccctatttcccggaccttctaagcccttttgggtgctggtggtggttgggggagtcctggcttgctatagcttgctagtaacagtggcctttattattttctgggtgaggagtaagaggagcaggctcctgcacagtgactacatgaacatgactccacgccgccccggacccacccgcaagcattaccagccctatgccccaccacgcgacttcgcagcctatcgctccagagtgaagttcagcaggagcgcagacgcccccgcgtaccagcagggccagaaccagctctataacgagctcaatctaggacgaagagaggagtacgatgttttggacaagagacgtggccgggaccctgagatggggggaaagccgagaaggaagaaccctcaggaaggcctgtacaatgaactgcagaaagataagatggcggaggcctacagtgagattgggatgaaaggcgagcgccggaggggcaaggggcacgatggcctttaccagggtctcagtacagccaccaaggacacctacgacgcccttcacatgcaggccctgccccctcgc

SEQ ID NO: 37315 - DNA, 1470 bp, synthetic construct
  source 1..1470: mol_type = other DNA
atggccttaccagtgaccgccttgctcctgccgctggccttgctgctccacgccgccaggccggacatccagatgacacagagccctagcagcctgtctgccagcgtgggagacagagtgaccatcacatgcaagagcagccagagcctgctggactccgatggcaagacctacctgaactggtatcagcagaagcccggcaaggcccctaagctgctgatctacctggtgtccaagctggatagcggcgtgcccagcagattttctggcagcggcagcggaaccgacttcaccctgacaatatccagcctccagcctgaggacttcgccacctactactgcttccaaggcacccactttccattcaccttcggccagggcaccaaggtggaaatcaaaagaggcggaggcggaagtggaggcggaggatctggcggcggaggctctgaagtgcagctggttgaatcaggcggaggactggttcagcctggcggatctctgagactgtcttgtgccgccagcggctacaccttcaccaactactggatgaactgggtccgacaggcccctggcaaaggactggaatgggtcggaatgatcgaccccagcgacagcgagacacactacaaccacatcttcaaggaccgcttcaccatcagcgccgacaccagcaagaataccgcctacctccagatgaactccctgagagccgaggacaccgccgtgtactactgcgccagaaacctgtatctgtggggccagggaaccctggtcacagtgtcatctacgcgtgcgaagcccaccacgacgccagcgccgcgaccaccaacaccggcgcccaccatcgcgtcgcagcccctgtccctgcgcccagaggcgtgccggccagcggcggggggcgcagtgcacacgagggggctggacttcgcctgtgacatctacatctgggcgcccttggccgggacttgtggggtccttctcctgtcactggttatcaccctttactgcaaacggggcagaaagaaactcctgtatatattcaaacaaccatttatgagaccagtacaaactactcaagaggaagatggctgtagctgccgatttccagaagaagaagaaggaggatgtgaactgagagtgaagttcagcaggagcgcagacgcccccgcgtaccagcagggccagaaccagctctataacgagctgaatctaggacgaagagaggagtacgatgttttggacaagagacgtggccgggaccctgagatggggggaaagccgagaaggaagaaccctcaggaaggcctgtacaatgaactgcagaaagataagatggcggaggcctacagtgagattgggatgaaaggcgagcgccggaggggcaaggggcacgatggcctttaccagggtctcagtacagccaccaaggacacctacgacgcccttcacatgcaggccctgccccctcgc

SEQ ID NO: 37316 - DNA, 1470 bp, synthetic construct
  source 1..1470: mol_type = other DNA
atggccttaccagtgaccgccttgctcctgccgctggccttgctgctccacgccgccaggccggaagtgcagctggttgaatcaggcggaggactggttcagcctggcggatctctgagactgtcttgtgccgccagcggctacaccttcaccaactactggatgaactgggtccgacaggcccctggcaaaggactggaatgggtcggaatgatcgaccccagcgacagcgagacacactacaaccacatcttcaaggaccgcttcaccatcagcgccgacaccagcaagaataccgcctacctccagatgaactccctgagagccgaggacaccgccgtgtactactgcgccagaaacctgtatctgtggggccagggaaccctggtcacagtgtcatctggcggaggcggaagtggaggcggaggatctggcggcggaggctctgacatccagatgacacagagccctagcagcctgtctgccagcgtgggagacagagtgaccatcacatgcaagagcagccagagcctgctggactccgatggcaagacctacctgaactggtatcagcagaagcccggcaaggcccctaagctgctgatctacctggtgtccaagctggatagcggcgtgcccagcagattttctggcagcggcagcggaaccgacttcaccctgacaatatccagcctccagcctgaggacttcgccacctactactgcttccaaggcacccactttccattcaccttcggccagggcaccaaggtggaaatcaaaagaacgcgtgcgaagcccaccacgacgccagcgccgcgaccaccaacaccggcgcccaccatcgcgtcgcagcccctgtccctgcgcccagaggcgtgccggccagcggcggggggcgcagtgcacacgagggggctggacttcgcctgtgacatctacatctgggcgcccttggccgggacttgtggggtccttctcctgtcactggttatcaccctttactgcaaacggggcagaaagaaactcctgtatatattcaaacaaccatttatgagaccagtacaaactactcaagaggaagatggctgtagctgccgatttccagaagaagaagaaggaggatgtgaactgagagtgaagttcagcaggagcgcagacgcccccgcgtaccagcagggccagaaccagctctataacgagctgaatctaggacgaagagaggagtacgatgttttggacaagagacgtggccgggaccctgagatggggggaaagccgagaaggaagaaccctcaggaaggcctgtacaatgaactgcagaaagataagatggcggaggcctacagtgagattgggatgaaaggcgagcgccggaggggcaaggggcacgatggcctttaccagggtctcagtacagccaccaaggacacctacgacgcccttcacatgcaggccctgccccctcgc

SEQ ID NO: 37317 - DNA, 1869 bp, synthetic construct
  source 1..1869: mol_type = other DNA
atggccttaccagtgaccgccttgctcctgccgctggccttgctgctccacgccgccaggccggacatccagatgacacagagccctagcagcctgtctgccagcgtgggagacagagtgaccatcacatgcaagagcagccagagcctgctggactccgatggcaagacctacctgaactggtatcagcagaagcccggcaaggcccctaagctgctgatctacctggtgtccaagctggatagcggcgtgcccagcagattttctggcagcggcagcggaaccgacttcaccctgacaatatccagcctccagcctgaggacttcgccacctactactgcttccaaggcacccactttccattcaccttcggccagggcaccaaggtggaaatcaaaagactcgagatccagaaccctgatcctgccgtgtaccagctgcgggatagcaagagcagcgacaagagcgtgtgtctgttcaccgacttcgacagccagaccaacgtgtcccagagcaaggactccgacgtgtacatcaccgataagtgcgtgctggacatgcggagcatggacttcaagagcaactccgccgtggcctggtccaacaagtccgatttcgcctgcgccaacgccttcaacaacagcattatccccgaggacacattcttcccaagcagcgacgtgccctgcgacgtgaagctggtggaaaagagcttcgagacagacaccaacctgaacttccagaacctgagcgtgatcggcttcagaatcctgctgctgaaagtggccggctttaacctgctgatgaccctgcggctgtggtccagccgcgccaagagaagcggatctggcgtgaagcagaccctgaatttcgacctgctgaagctggctggcgacgtggaatccaacccaggccctactagtatggactggatttggcgcatccttttccttgtcggcgctgctaccggcgcgcattccttcgaagaagtgcagctggttgaatcaggcggaggactggttcagcctggcggatctctgagactgtcttgtgccgccagcggctacaccttcaccaactactggatgaactgggtccgacaggcccctggcaaaggactggaatgggtcggaatgatcgaccccagcgacagcgagacacactacaaccacatcttcaaggaccgcttcaccatcagcgccgacaccagcaagaataccgcctacctccagatgaactccctgagagccgaggacaccgccgtgtactactgcgccagaaacctgtatctgtggggccagggaaccctggtcacagtgtcatctacgcgtgaggacctgaagaacgtgttcccacctgaggtggccgtgttcgagcctagcaaggccgagatcgcccacacccagaaagccaccctcgtgtgcctggctaccggcttctaccccgaccatgtggaactgtcttggtgggtcaacggcaaagaggtgcacagcggcgtgtgtaccgacccccagccactgaaagaacagcccgccctgaacgacagccggtactgcctgagcagcagactgagagtgtccgccaccttctggcagaacccccggaaccacttcagatgccaggtgcagttctacggcctgagcgagaacgacgagtggacccaggacagagccaagcccgtgacccagatcgtgtctgccgaagcctggggcagagccgattgcggcatcaccagcgccagctaccaccagggcgtgctgagcgccaccatcctgtacgagatcctgctgggcaaggccaccctgtacgccgtgctggtgtctgccctggtgctgatggctatggtcaagcggaaggacagccgggga

SEQ ID NO: 37318 - DNA, 1857 bp, synthetic construct
  source 1..1857: mol_type = other DNA
atggccttaccagtgaccgccttgctcctgccgctggccttgctgctccacgccgccaggccggacatccagatgacacagagccctagcagcctgtctgccagcgtgggagacagagtgaccatcacatgcaagagcagccagagcctgctggactccgatggcaagacctacctgaactggtatcagcagaagcccggcaaggcccctaagctgctgatctacctggtgtccaagctggatagcggcgtgcccagcagattttctggcagcggcagcggaaccgacttcaccctgacaatatccagcctccagcctgaggacttcgccacctactactgcttccaaggcacccactttccattcaccttcggccagggcaccaaggtggaaatcaaaagactcgaggacctgaagaacgtgttcccacctgaggtggccgtgttcgagcctagcaaggccgagatcgcccacacccagaaagccaccctcgtgtgcctggctaccggcttctaccccgaccatgtggaactgtcttggtgggtcaacggcaaagaggtgcacagcggcgtgtgtaccgacccccagccactgaaagaacagcccgccctgaacgacagccggtactgcctgagcagcagactgagagtgtccgccaccttctggcagaacccccggaaccacttcagatgccaggtgcagttctacggcctgagcgagaacgacgagtggacccaggacagagccaagcccgtgacccagatcgtgtctgccgaagcctggggcagagccgattgcggcatcaccagcgccagctaccaccagggcgtgctgagcgccaccatcctgtacgagatcctgctgggcaaggccaccctgtacgccgtgctggtgtctgccctggtgctgatggctatggtcaagcggaaggacagccggggaagggccaagcgatctggatctggagcaacaaacttctcactactcaaacaagcaggtgacgtggaggagaatcccgggcctactagtatggactggatttggcgcatccttttccttgtcggcgctgctaccggcgcgcattccttcgaagaagtgcagctggttgaatcaggcggaggactggttcagcctggcggatctctgagactgtcttgtgccgccagcggctacaccttcaccaactactggatgaactgggtccgacaggcccctggcaaaggactggaatgggtcggaatgatcgaccccagcgacagcgagacacactacaaccacatcttcaaggaccgcttcaccatcagcgccgacaccagcaagaataccgcctacctccagatgaactccctgagagccgaggacaccgccgtgtactactgcgccagaaacctgtatctgtggggccagggaaccctggtcacagtgtcatctacgcgtatccagaaccctgatcctgccgtgtaccagctgcgggatagcaagagcagcgacaagagcgtgtgtctgttcaccgacttcgacagccagaccaacgtgtcccagagcaaggactccgacgtgtacatcaccgataagtgcgtgctggacatgcggagcatggacttcaagagcaactccgccgtggcctggtccaacaagtccgatttcgcctgcgccaacgccttcaacaacagcattatccccgaggacacattcttcccaagcagcgacgtgccctgcgacgtgaagctggtggaaaagagcttcgagacagacaccaacctgaacttccagaacctgagcgtgatcggcttcagaatcctgctgctgaaagtggccggctttaacctgctgatgaccctgcggctgtggtccagc

SEQ ID NO: 37319 - DNA, 1857 bp, synthetic construct
  source 1..1857: mol_type = other DNA
atggccttaccagtgaccgccttgctcctgccgctggccttgctgctccacgccgccaggccggacatccagatgacacagagccctagcagcctgtctgccagcgtgggagacagagtgaccatcacatgcaagagcagccagagcctgctggactccgatggcaagacctacctgaactggtatcagcagaagcccggcaaggcccctaagctgctgatctacctggtgtccaagctggatagcggcgtgcccagcagattttctggcagcggcagcggaaccgacttcaccctgacaatatccagcctccagcctgaggacttcgccacctactactgcttccaaggcacccactttccattcaccttcggccagggcaccaaggtggaaatcaaaagactcgaggacctgaagaacgtgttcccacctgaggtggccgtgttcgagcctagcgaggccgagatcagccacacccagaaagccaccctcgtgtgcctggctaccggcttctaccccgaccatgtggaactgtcttggtgggtcaacggcaaagaggtgcacagcggcgtgtgtaccgacccccagccactgaaagaacagcccgccctgaacgacagccggtactgcctgagcagcagactgagagtgtccgccaccttctggcagaacccccggaaccacttcagatgccaggtgcagttctacggcctgagcgagaacgacgagtggacccaggacagagccaagcccgtgacccagatcgtgtctgccgaagcctggggcagagccgattgcggctttaccagcgagagctaccagcagggcgtgctgagcgccaccatcctgtacgagatcctgctgggcaaggccaccctgtacgccgtgctggtgtctgccctggtgctgatggctatggtcaagcggaaggacagccggggaagggccaagcgatctggatctggagcaacaaacttctcactactcaaacaagcaggtgacgtggaggagaatcccgggcctactagtatggactggatttggcgcatccttttccttgtcggcgctgctaccggcgcgcattccttcgaagaagtgcagctggttgaatcaggcggaggactggttcagcctggcggatctctgagactgtcttgtgccgccagcggctacaccttcaccaactactggatgaactgggtccgacaggcccctggcaaaggactggaatgggtcggaatgatcgaccccagcgacagcgagacacactacaaccacatcttcaaggaccgcttcaccatcagcgccgacaccagcaagaataccgcctacctccagatgaactccctgagagccgaggacaccgccgtgtactactgcgccagaaacctgtatctgtggggccagggaaccctggtcacagtgtcatctacgcgtatccagaaccctgatcctgccgtgtaccagctgcgggatagcaagagcagcgacaagagcgtgtgtctgttcaccgacttcgacagccagaccaacgtgtcccagagcaaggactccgacgtgtacatcaccgataagtgcgtgctggacatgcggagcatggacttcaagagcaactccgccgtggcctggtccaacaagtccgatttcgcctgcgccaacgccttcaacaacagcattatccccgaggacacattcttcccaagccccgagagcagctgcgacgtgaagctggtggaaaagagcttcgagacagacaccaacctgaacttccagaacctgagcgtgatcggcttcagaatcctgctgctgaaagtggccggctttaacctgctgatgaccctgcggctgtggtccagc

SEQ ID NO: 37320 - DNA, 1869 bp, synthetic construct
  source 1..1869: mol_type = other DNA
atggccttaccagtgaccgccttgctcctgccgctggccttgctgctccacgccgccaggccggacatccagatgacacagagccctagcagcctgtctgccagcgtgggagacagagtgaccatcacatgcaagagcagccagagcctgctggactccgatggcaagacctacctgaactggtatcagcagaagcccggcaaggcccctaagctgctgatctacctggtgtccaagctggatagcggcgtgcccagcagattttctggcagcggcagcggaaccgacttcaccctgacaatatccagcctccagcctgaggacttcgccacctactactgcttccaaggcacccactttccattcaccttcggccagggcaccaaggtggaaatcaaaagactcgagatccagaaccctgatcctgccgtgtaccagctgcgggatagcaagagcagcgacaagagcgtgtgtctgttcaccgacttcgacagccagaccaacgtgtcccagagcaaggactccgacgtgtacatcaccgataagtgcgtgctggacatgcggagcatggacttcaagagcaactccgccgtggcctggtccaacaagtccgatttcgcctgcgccaacgccttcaacaacagcattatccccgaggacacattcttcccaagccccgagagcagctgcgacgtgaagctggtggaaaagagcttcgagacagacaccaacctgaacttccagaacctgagcgtgatcggcttcagaatcctgctgctgaaagtggccggctttaacctgctgatgaccctgcggctgtggtccagccgcgccaagagaagcggatctggcgtgaagcagaccctgaatttcgacctgctgaagctggctggcgacgtggaatccaacccaggccctactagtatggactggatttggcgcatccttttccttgtcggcgctgctaccggcgcgcattccttcgaagaagtgcagctggttgaatcaggcggaggactggttcagcctggcggatctctgagactgtcttgtgccgccagcggctacaccttcaccaactactggatgaactgggtccgacaggcccctggcaaaggactggaatgggtcggaatgatcgaccccagcgacagcgagacacactacaaccacatcttcaaggaccgcttcaccatcagcgccgacaccagcaagaataccgcctacctccagatgaactccctgagagccgaggacaccgccgtgtactactgcgccagaaacctgtatctgtggggccagggaaccctggtcacagtgtcatctacgcgtgaggacctgaagaacgtgttcccacctgaggtggccgtgttcgagcctagcgaggccgagatcagccacacccagaaagccaccctcgtgtgcctggctaccggcttctaccccgaccatgtggaactgtcttggtgggtcaacggcaaagaggtgcacagcggcgtgtgtaccgacccccagccactgaaagaacagcccgccctgaacgacagccggtactgcctgagcagcagactgagagtgtccgccaccttctggcagaacccccggaaccacttcagatgccaggtgcagttctacggcctgagcgagaacgacgagtggacccaggacagagccaagcccgtgacccagatcgtgtctgccgaagcctggggcagagccgattgcggctttaccagcgagagctaccagcagggcgtgctgagcgccaccatcctgtacgagatcctgctgggcaaggccaccctgtacgccgtgctggtgtctgccctggtgctgatggctatggtcaagcggaaggacagccgggga

SEQ ID NO: 37321 - DNA, 1905 bp, synthetic construct
  source 1..1905: mol_type = other DNA
atggccttaccagtgaccgccttgctcctgccgctggccttgctgctccacgccgccaggccgctcgaggaggacctgaagaacgtgttcccacctgaggtggccgtgttcgagcctagcaaggccgagatcgcccacacccagaaagccaccctcgtgtgcctggctaccggcttctaccccgaccatgtggaactgtcttggtgggtcaacggcaaagaggtgcacagcggcgtgtgtaccgacccccagccactgaaagaacagcccgccctgaacgacagccggtactgcctgagcagcagactgagagtgtccgccaccttctggcagaacccccggaaccacttcagatgccaggtgcagttctacggcctgagcgagaacgacgagtggacccaggacagagccaagcccgtgacccagatcgtgtctgccgaagcctggggcagagccgattgcggcatcaccagcgccagctaccaccagggcgtgctgagcgccaccatcctgtacgagatcctgctgggcaaggccaccctgtacgccgtgctggtgtctgccctggtgctgatggctatggtcaagcggaaggacagccggggaagggccaagcgatctggatctggagcaacaaacttctcactactcaaacaagcaggtgacgtggaggagaatcccgggcctactagcatggccttaccagtgaccgccttgctcctgccgctggccttgctgctccacgccgccaggccggacatccagatgacacagagccctagcagcctgtctgccagcgtgggagacagagtgaccatcacatgcaagagcagccagagcctgctggactccgatggcaagacctacctgaactggtatcagcagaagcccggcaaggcccctaagctgctgatctacctggtgtccaagctggatagcggcgtgcccagcagattttctggcagcggcagcggaaccgacttcaccctgacaatatccagcctccagcctgaggacttcgccacctactactgcttccaaggcacccactttccattcaccttcggccagggcaccaaggtggaaatcaaaagaggcggaggcggaagtggaggcggaggatctggcggcggaggctctgaagtgcagctggttgaatcaggcggaggactggttcagcctggcggatctctgagactgtcttgtgccgccagcggctacaccttcaccaactactggatgaactgggtccgacaggcccctggcaaaggactggaatgggtcggaatgatcgaccccagcgacagcgagacacactacaaccacatcttcaaggaccgcttcaccatcagcgccgacaccagcaagaataccgcctacctccagatgaactccctgagagccgaggacaccgccgtgtactactgcgccagaaacctgtatctgtggggccagggaaccctggtcacagtgtcatctacgcgtatccagaaccctgatcctgccgtgtaccagctgcgggatagcaagagcagcgacaagagcgtgtgtctgttcaccgacttcgacagccagaccaacgtgtcccagagcaaggactccgacgtgtacatcaccgataagtgcgtgctggacatgcggagcatggacttcaagagcaactccgccgtggcctggtccaacaagtccgatttcgcctgcgccaacgccttcaacaacagcattatccccgaggacacattcttcccaagcagcgacgtgccctgcgacgtgaagctggtggaaaagagcttcgagacagacaccaacctgaacttccagaacctgagcgtgatcggcttcagaatcctgctgctgaaagtggccggctttaacctgctgatgaccctgcggctgtggtccagc

SEQ ID NO: 37322 - DNA, 1926 bp, synthetic construct
  source 1..1926: mol_type = other DNA
atggccttaccagtgaccgccttgctcctgccgctggccttgctgctccacgccgccaggccgctcgagggctccggcgatcgccctgatcctgccgtgtaccagctgcgggatagcaagagcagcgacaagagcgtgtgtctgttcaccgacttcgacagccagaccaacgtgtcccagagcaaggactccgacgtgtacatcaccgataagtgcgtgctggacatgcggagcatggacttcaagagcaactccgccgtggcctggtccaacaagtccgatttcgcctgcgccaacgccttcaacaacagcattatccccgaggacacattcttcccaagccccgagagcagctgcgacgtgaagctggtggaaaagagcttcgagacagacaccaacctgaacttccagaacctgagcgtgatcggcttcagaatcctgctgctgaaagtggccggctttaacctgctgatgaccctgcggctgtggtccagctctagtcgcgccaagagaagcggatctggcgtgaagcagaccctgaatttcgacctgctgaagctggctggcgacgtggaatccaacccaggccccactagcatggccttaccagtgaccgccttgctcctgccgctggccttgctgctccacgccgccaggccggacatccagatgacacagagccctagcagcctgtctgccagcgtgggagacagagtgaccatcacatgcaagagcagccagagcctgctggactccgatggcaagacctacctgaactggtatcagcagaagcccggcaaggcccctaagctgctgatctacctggtgtccaagctggatagcggcgtgcccagcagattttctggcagcggcagcggaaccgacttcaccctgacaatatccagcctccagcctgaggacttcgccacctactactgcttccaaggcacccactttccattcaccttcggccagggcaccaaggtggaaatcaaaagaggcggaggcggaagtggaggcggaggatctggcggcggaggctctgaagtgcagctggttgaatcaggcggaggactggttcagcctggcggatctctgagactgtcttgtgccgccagcggctacaccttcaccaactactggatgaactgggtccgacaggcccctggcaaaggactggaatgggtcggaatgatcgaccccagcgacagcgagacacactacaaccacatcttcaaggaccgcttcaccatcagcgccgacaccagcaagaataccgcctacctccagatgaactccctgagagccgaggacaccgccgtgtactactgcgccagaaacctgtatctgtggggccagggaaccctggtcacagtgtcatctacgcgtgaggacctgaagaacgtgttcccacctgaggtggccgtgttcgagcctagcgaggccgagatcagccacacccagaaagccaccctcgtgtgcctggctaccggcttctaccccgaccatgtggaactgtcttggtgggtcaacggcaaagaggtgcacagcggcgtgtgtaccgacccccagccactgaaagaacagcccgccctgaacgacagccggtactgcctgagcagcagactgagagtgtccgccaccttctggcagaacccccggaaccacttcagatgccaggtgcagttctacggcctgagcgagaacgacgagtggacccaggacagagccaagcccgtgacccagatcgtgtctgccgaagcctggggcagagccgattgcggctttaccagcgagagctaccagcagggcgtgctgagcgccaccatcctgtacgagatcctgctgggcaaggccaccctgtacgccgtgctggtgtctgccctggtgctgatggctatggtcaagcggaaggacagccgggga

SEQ ID NO: 37323 - DNA, 1857 bp, synthetic construct
  source 1..1857: mol_type = other DNA
atggccttaccagtgaccgccttgctcctgccgctggccttgctgctccacgccgccaggccggacatccagatgacacagagccctagcagcctgtctgccagcgtgggagacagagtgaccatcacatgcaagagcagccagagcctgctggactccgatggcaagacctacctgaactggtatcagcagaagcccggcaaggcccctaagctgctgatctacctggtgtccaagctggatagcggcgtgcccagcagattttctggcagcggcagcggaaccgacttcaccctgacaatatccagcctccagcctgaggacttcgccacctactactgcttccaaggcacccactttccattcaccttcggccagggcaccaaggtggaaatcaaaagactcgaggacctgaagaacgtgttcccacctgaggtggccgtgttcgagcctagcgaggccgagatcagccacacccagaaagccaccctcgtgtgcctggctaccggcttctaccccgaccatgtggaactgtcttggtgggtcaacggcaaagaggtgcacagcggcgtgtctaccgacccccagccactgaaagaacagcccgccctgaacgacagccggtactgcctgagcagcagactgagagtgtccgccaccttctggcagaacccccggaaccacttcagatgccaggtgcagttctacggcctgagcgagaacgacgagtggacccaggacagagccaagcccgtgacccagatcgtgtctgccgaagcctggggcagagccgattgcggctttaccagcgagagctaccagcagggcgtgctgagcgccaccatcctgtacgagatcctgctgggcaaggccaccctgtacgccgtgctggtgtctgccctggtgctgatggctatggtcaagcggaaggacagccggggaagggccaagcgatctggatctggagcaacaaacttctcactactcaaacaagcaggtgacgtggaggagaatcccgggcctactagtatggactggatttggcgcatccttttccttgtcggcgctgctaccggcgcgcattccttcgaagaagtgcagctggttgaatcaggcggaggactggttcagcctggcggatctctgagactgtcttgtgccgccagcggctacaccttcaccaactactggatgaactgggtccgacaggcccctggcaaaggactggaatgggtcggaatgatcgaccccagcgacagcgagacacactacaaccacatcttcaaggaccgcttcaccatcagcgccgacaccagcaagaataccgcctacctccagatgaactccctgagagccgaggacaccgccgtgtactactgcgccagaaacctgtatctgtggggccagggaaccctggtcacagtgtcatctacgcgtatccagaaccctgatcctgccgtgtaccagctgcgggatagcaagagcagcgacaagagcgtgtgtctgttcaccgacttcgacagccagaccaacgtgtcccagagcaaggactccgacgtgtacatcaccgataagaccgtgctggacatgcggagcatggacttcaagagcaactccgccgtggcctggtccaacaagtccgatttcgcctgcgccaacgccttcaacaacagcattatccccgaggacacattcttcccaagccccgagagcagctgcgacgtgaagctggtggaaaagagcttcgagacagacaccaacctgaacttccagaacctgagcgtgatcggcttcagaatcctgctgctgaaagtggccggctttaacctgctgatgaccctgcggctgtggtccagc

SEQ ID NO: 37324 - DNA, 1881 bp, synthetic construct
  source 1..1881: mol_type = other DNA
atggccttaccagtgaccgccttgctcctgccgctggccttgctgctccacgccgccaggccggacatccagatgacacagagccctagcagcctgtctgccagcgtgggagacagagtgaccatcacatgcaagagcagccagagcctgctggactccgatggcaagacctacctgaactggtatcagcagaagcccggcaaggcccctaagctgctgatctacctggtgtccaagctggatagcggcgtgcccagcagattttctggcagcggcagcggaaccgacttcaccctgacaatatccagcctccagcctgaggacttcgccacctactactgcttccaaggcacccactttccattcaccttcggccagggcaccaaggtggaaatcaaaagactcgaggacaagcagctggacgccgacgtgtcccccaagcctaccatcttcctgccctctatcgccgagacaaagctccagaaggccggcacctacctgtgcctgctggaaaagttcttcccagatgtgattaagatccactggcaggaaaagaagtccaacaccatcctgggcagccaggaaggcaacaccatgaagaccaacgacacctacatgaagttcagctggctgaccgtgcccgagaagtccctggacaaagaacacagatgcatcgtgcggcacgaaaacaacaagaacggcgtggaccaggaaatcatcttcccacccatcaagaccgatgtgattacaatggaccccaaggacaactgctccaaggacgccaacgataccctgctgctccagctgaccaacaccagcgcctactacatgtacttgttgctgctgctgaagtccgtggtgtacttcgccatcatcacatgctgcctgctgcggagaaccgccttctgctgcaacggcgagaagtctagggccaagcgatctggatctggagcaacaaacttctcactactcaaacaagcaggtgacgtggaggagaatcccgggcctactagtatggactggatttggcgcatccttttccttgtcggcgctgctaccggcgcgcattccttcgaagaagtgcagctggttgaatcaggcggaggactggttcagcctggcggatctctgagactgtcttgtgccgccagcggctacaccttcaccaactactggatgaactgggtccgacaggcccctggcaaaggactggaatgggtcggaatgatcgaccccagcgacagcgagacacactacaaccacatcttcaaggaccgcttcaccatcagcgccgacaccagcaagaataccgcctacctccagatgaactccctgagagccgaggacaccgccgtgtactactgcgccagaaacctgtatctgtggggccagggaaccctggtcacagtgtcatctacgcgtagccagcctcacaccaagcccagcgtgttcgtgatgaagaacggcaccaacgtggcctgcctcgtgaaagagttctaccccaaggacatcaggatcaacctggtgtccagcaagaagatcaccgagttcgaccccgccatcgtgatctcccccagcggcaagtacaacgccgtgaagctggggaagtacgaggacagcaacagcgtgacctgctccgtgcagcacgacaacaagaccgtgcacagcaccgactttgaagtgaaaaccgactccaccgaccacgtgaagcccaaagagacagagaacaccaagcagcccagcaagagctgccacaagcccaaggccatcgtgcacaccgagaaagtgaacatgatgagcctgaccgtgctgggcctgcggatgctgttcgccaaaaccgtggccgtgaacttcctgctgaccgccaagctgttcttcctc

SEQ ID NO: 37325 - DNA, 1881 bp, synthetic construct
  source 1..1881: mol_type = other DNA
atggccttaccagtgaccgccttgctcctgccgctggccttgctgctccacgccgccaggccggacatccagatgacacagagccctagcagcctgtctgccagcgtgggagacagagtgaccatcacatgcaagagcagccagagcctgctggactccgatggcaagacctacctgaactggtatcagcagaagcccggcaaggcccctaagctgctgatctacctggtgtccaagctggatagcggcgtgcccagcagattttctggcagcggcagcggaaccgacttcaccctgacaatatccagcctccagcctgaggacttcgccacctactactgcttccaaggcacccactttccattcaccttcggccagggcaccaaggtggaaatcaaaagactcgagagccagcctcacaccaagcccagcgtgttcgtgatgaagaacggcaccaacgtggcctgcctcgtgaaagagttctaccccaaggacatcaggatcaacctggtgtccagcaagaagatcaccgagttcgaccccgccatcgtgatctcccccagcggcaagtacaacgccgtgaagctggggaagtacgaggacagcaacagcgtgacctgctccgtgcagcacgacaacaagaccgtgcacagcaccgactttgaagtgaaaaccgactccaccgaccacgtgaagcccaaagagacagagaacaccaagcagcccagcaagagctgccacaagcccaaggccatcgtgcacaccgagaaagtgaacatgatgagcctgaccgtgctgggcctgcggatgctgttcgccaaaaccgtggccgtgaacttcctgctgaccgccaagctgttcttcctcagggccaagcgatctggatctggagcaacaaacttctcactactcaaacaagcaggtgacgtggaggagaatcccgggcctactagtatggactggatttggcgcatccttttccttgtcggcgctgctaccggcgcgcattccttcgaagaagtgcagctggttgaatcaggcggaggactggttcagcctggcggatctctgagactgtcttgtgccgccagcggctacaccttcaccaactactggatgaactgggtccgacaggcccctggcaaaggactggaatgggtcggaatgatcgaccccagcgacagcgagacacactacaaccacatcttcaaggaccgcttcaccatcagcgccgacaccagcaagaataccgcctacctccagatgaactccctgagagccgaggacaccgccgtgtactactgcgccagaaacctgtatctgtggggccagggaaccctggtcacagtgtcatctacgcgtgacaagcagctggacgccgacgtgtcccccaagcctaccatcttcctgccctctatcgccgagacaaagctccagaaggccggcacctacctgtgcctgctggaaaagttcttcccagatgtgattaagatccactggcaggaaaagaagtccaacaccatcctgggcagccaggaaggcaacaccatgaagaccaacgacacctacatgaagttcagctggctgaccgtgcccgagaagtccctggacaaagaacacagatgcatcgtgcggcacgaaaacaacaagaacggcgtggaccaggaaatcatcttcccacccatcaagaccgatgtgattacaatggaccccaaggacaactgctccaaggacgccaacgataccctgctgctccagctgaccaacaccagcgcctactacatgtacttgttgctgctgctgaagtccgtggtgtacttcgccatcatcacatgctgcctgctgcggagaaccgccttctgctgcaacggcgagaagtct

SEQ ID NO: 37326 - DNA, 1926 bp, synthetic construct
  source 1..1926: mol_type = other DNA
atggccttaccagtgaccgccttgctcctgccgctggccttgctgctccacgccgccaggccgctcgaggacaagcagctggacgccgacgtgtcccccaagcctaccatcttcctgccctctatcgccgagacaaagctccagaaggccggcacctacctgtgcctgctggaaaagttcttcccagatgtgattaagatccactggcaggaaaagaagtccaacaccatcctgggcagccaggaaggcaacaccatgaagaccaacgacacctacatgaagttcagctggctgaccgtgcccgagaagtccctggacaaagaacacagatgcatcgtgcggcacgaaaacaacaagaacggcgtggaccaggaaatcatcttcccacccatcaagaccgatgtgattacaatggaccccaaggacaactgctccaaggacgccaacgataccctgctgctccagctgaccaacaccagcgcctactacatgtacttgttgctgctgctgaagtccgtggtgtacttcgccatcatcacatgctgcctgctgcggagaaccgccttctgctgcaacggcgagaagtctagggccaagcgatctggatctggagcaacaaacttctcactactcaaacaagcaggtgacgtggaggagaatcccgggcctactagcatggccttaccagtgaccgccttgctcctgccgctggccttgctgctccacgccgccaggccggacatccagatgacacagagccctagcagcctgtctgccagcgtgggagacagagtgaccatcacatgcaagagcagccagagcctgctggactccgatggcaagacctacctgaactggtatcagcagaagcccggcaaggcccctaagctgctgatctacctggtgtccaagctggatagcggcgtgcccagcagattttctggcagcggcagcggaaccgacttcaccctgacaatatccagcctccagcctgaggacttcgccacctactactgcttccaaggcacccactttccattcaccttcggccagggcaccaaggtggaaatcaaaagaggcggaggcggaagtggaggcggaggatctggcggcggaggctctgaagtgcagctggttgaatcaggcggaggactggttcagcctggcggatctctgagactgtcttgtgccgccagcggctacaccttcaccaactactggatgaactgggtccgacaggcccctggcaaaggactggaatgggtcggaatgatcgaccccagcgacagcgagacacactacaaccacatcttcaaggaccgcttcaccatcagcgccgacaccagcaagaataccgcctacctccagatgaactccctgagagccgaggacaccgccgtgtactactgcgccagaaacctgtatctgtggggccagggaaccctggtcacagtgtcatctacgcgtagccagcctcacaccaagcccagcgtgttcgtgatgaagaacggcaccaacgtggcctgcctcgtgaaagagttctaccccaaggacatcaggatcaacctggtgtccagcaagaagatcaccgagttcgaccccgccatcgtgatctcccccagcggcaagtacaacgccgtgaagctggggaagtacgaggacagcaacagcgtgacctgctccgtgcagcacgacaacaagaccgtgcacagcaccgactttgaagtgaaaaccgactccaccgaccacgtgaagcccaaagagacagagaacaccaagcagcccagcaagagctgccacaagcccaaggccatcgtgcacaccgagaaagtgaacatgatgagcctgaccgtgctgggcctgcggatgctgttcgccaaaaccgtggccgtgaacttcctgctgaccgccaagctgttcttcctc

SEQ ID NO: 37327 - DNA, 2388 bp, synthetic construct
  source 1..2388: mol_type = other DNA
atggccttaccagtgaccgccttgctcctgccgctggccttgctgctccacgccgccaggccggacatccagatgacacagagccctagcagcctgtctgccagcgtgggagacagagtgaccatcacatgcaagagcagccagagcctgctggactccgatggcaagacctacctgaactggtatcagcagaagcccggcaaggcccctaagctgctgatctacctggtgtccaagctggatagcggcgtgcccagcagattttctggcagcggcagcggaaccgacttcaccctgacaatatccagcctccagcctgaggacttcgccacctactactgcttccaaggcacccactttccattcaccttcggccagggcaccaaggtggaaatcaaaagaggacagcctaaggccaatcctaccgtgacactgttccctccaagcagcgaagaactccaggccaacaaggccacacttgtgtgcctgatctccgacttctaccctggggctgtgacagtggcttggaaggccgatggatctcctgtgaaagccggcgtggaaaccaccaagccatccaagcagagcaacaacaaatacgccgccagctcctacctgagcctgacacctgagcagtggaagtcccacagatcctacagctgccaagtgacccacgaaggcagcaccgtggaaaagacagtggcccctacagagtgcagcggatcccagagcttcggcctgctggaccccaagctgtgctacctgctggatggcatcctgttcatctacggcgtgatcctgaccgccctgttcctgagagtgaagttcagcagaagcgccgacgcccctgcctaccagcagggacagaaccaactgtacaacgagctgaacctgggcagacgggaagagtacgacgtgctggacaagcggagaggcagggaccctgagatgggcggaaagccccagcggagaaagaacccccaggaaggactgtataacgaactccagaaagacaagatggccgaagcctacagcgagatcggcatgaagggcgagcggagaagaggcaagggccacgatggcctgtaccagggcctgagcaccgccaccaaggacacctatgacgccctgcacatgcaggccctgcctccaagaagggccaagcgatctggatctggagcaacaaacttctcactactcaaacaagcaggtgacgtggaggagaatcccgggcctactagtatggactggatttggcgcatccttttccttgtcggcgctgctaccggcgcgcattccttcgaagaagtgcagctggttgaatcaggcggaggactggttcagcctggcggatctctgagactgtcttgtgccgccagcggctacaccttcaccaactactggatgaactgggtccgacaggcccctggcaaaggactggaatgggtcggaatgatcgaccccagcgacagcgagacacactacaaccacatcttcaaggaccgcttcaccatcagcgccgacaccagcaagaataccgcctacctccagatgaactccctgagagccgaggacaccgccgtgtactactgcgccagaaacctgtatctgtggggccagggaaccctggtcacagtgtcatctgcctctacaaagggaccctccgtgtttcctctggctcccagcagcaagtctacaagcggaggaacagccgctctgggctgcctggtcaaggattactttcccgagcctgtgaccgtgtcctggaatagcggagcactgacaagcggcgtgcacacctttccagccgtgctgcaaagcagcggcctgtactctctgagcagcgtggtcacagtgcctagctctagcctgggcacccagacctacatctgcaatgtgaaccacaagcctagcaacaccaaggtggacaagagagtggaacccaagagctgtggtacccagagttttgggttgttggaccctaaattgtgctatctgttggacggaatcctgttcatttacggagtgatcctgaccgcattgttcctgcgggttaagttttccagatccgcagacgcacccgcttaccaacaagggcagaaccaactctacaatgaacttaatttggggcggagggaagagtacgacgttctggacaaaaggaggggacgagatcccgagatgggcggaaagcctcagcgaaggaagaatccgcaagaggggctttataacgaactccagaaagataaaatggcagaagcctatagtgagattgggatgaagggagaaaggaggaggggtaaaggtcacgatgggttgtaccaaggattgagcacagccactaaagatacctatgatgcgctccacatgcaggccctgccgccaaga

SEQ ID NO: 37328 - DNA, 2445 bp, synthetic construct
  source 1..2445: mol_type = other DNA
atggccttaccagtgaccgccttgctcctgccgctggccttgctgctccacgccgccaggccggacatccagatgacacagagccctagcagcctgtctgccagcgtgggagacagagtgaccatcacatgcaagagcagccagagcctgctggactccgatggcaagacctacctgaactggtatcagcagaagcccggcaaggcccctaagctgctgatctacctggtgtccaagctggatagcggcgtgcccagcagattttctggcagcggcagcggaaccgacttcaccctgacaatatccagcctccagcctgaggacttcgccacctactactgcttccaaggcacccactttccattcaccttcggccagggcaccaaggtggaaatcaaaagactcgaggacctgaagaacgtgttcccacctgaggtggccgtgttcgagcctagcgaggccgagatcagccacacccagaaagccaccctcgtgtgcctggctaccggcttctaccccgaccatgtggaactgtcttggtgggtcaacggcaaagaggtgcacagcggcgtgtctaccgacccccagccactgaaagaacagcccgccctgaacgacagccggtactgcctgagcagcagactgagagtgtccgccaccttctggcagaacccccggaaccacttcagatgccaggtgcagttctacggcctgagcgagaacgacgagtggacccaggacagagccaagcccgtgacccagatcgtgtctgccgaagcctggggcagagccgattgcggatcccagagcttcggcctgctggaccccaagctgtgctacctgctggatggcatcctgttcatctacggcgtgatcctgaccgccctgttcctgagagtgaagttcagcagaagcgccgacgcccctgcctaccagcagggacagaaccaactgtacaacgagctgaacctgggcagacgggaagagtacgacgtgctggacaagcggagaggcagggaccctgagatgggcggaaagccccagcggagaaagaacccccaggaaggactgtataacgaactccagaaagacaagatggccgaagcctacagcgagatcggcatgaagggcgagcggagaagaggcaagggccacgatggcctgtaccagggcctgagcaccgccaccaaggacacctatgacgccctgcacatgcaggccctgcctccaagaagggccaagcgatctggatctggagcaacaaacttctcactactcaaacaagcaggtgacgtggaggagaatcccgggcctactagtatggactggatttggcgcatccttttccttgtcggcgctgctaccggcgcgcattccttcgaagaagtgcagctggttgaatcaggcggaggactggttcagcctggcggatctctgagactgtcttgtgccgccagcggctacaccttcaccaactactggatgaactgggtccgacaggcccctggcaaaggactggaatgggtcggaatgatcgaccccagcgacagcgagacacactacaaccacatcttcaaggaccgcttcaccatcagcgccgacaccagcaagaataccgcctacctccagatgaactccctgagagccgaggacaccgccgtgtactactgcgccagaaacctgtatctgtggggccagggaaccctggtcacagtgtcatctacgcgtatccagaaccctgatcctgccgtgtaccagctgcgggatagcaagagcagcgacaagagcgtgtgtctgttcaccgacttcgacagccagaccaacgtgtcccagagcaaggactccgacgtgtacatcaccgataagaccgtgctggacatgcggagcatggacttcaagagcaactccgccgtggcctggtccaacaagtccgatttcgcctgcgccaacgccttcaacaacagcattatccccgaggacacattcttcccaagccccgagagcagctgcggtacccagagttttgggttgttggaccctaaattgtgctatctgttggacggaatcctgttcatttacggagtgatcctgaccgcattgttcctgcgggttaagttttccagatccgcagacgcacccgcttaccaacaagggcagaaccaactctacaatgaacttaatttggggcggagggaagagtacgacgttctggacaaaaggaggggacgagatcccgagatgggcggaaagcctcagcgaaggaagaatccgcaagaggggctttataacgaactccagaaagataaaatggcagaagcctatagtgagattgggatgaagggagaaaggaggaggggtaaaggtcacgatgggttgtaccaaggattgagcacagccactaaagatacctatgatgcgctccacatgcaggccctgccgccaaga

SEQ ID NO: 37329 - DNA, 2571 bp, synthetic construct
  source 1..2571: mol_type = other DNA
atggccttaccagtgaccgccttgctcctgccgctggccttgctgctccacgccgccaggccggacatccagatgacacagagccctagcagcctgtctgccagcgtgggagacagagtgaccatcacatgcaagagcagccagagcctgctggactccgatggcaagacctacctgaactggtatcagcagaagcccggcaaggcccctaagctgctgatctacctggtgtccaagctggatagcggcgtgcccagcagattttctggcagcggcagcggaaccgacttcaccctgacaatatccagcctccagcctgaggacttcgccacctactactgcttccaaggcacccactttccattcaccttcggccagggcaccaaggtggaaatcaaaagactcgaggaggacctgaagaacgtgttcccacctgaggtggccgtgttcgagcctagcgaggccgagatcagccacacccagaaagccaccctcgtgtgcctggctaccggcttctaccccgaccatgtggaactgtcttggtgggtcaacggcaaagaggtgcacagcggcgtgtctaccgacccccagccactgaaagaacagcccgccctgaacgacagccggtactgcctgagcagcagactgagagtgtccgccaccttctggcagaacccccggaaccacttcagatgccaggtgcagttctacggcctgagcgagaacgacgagtggacccaggacagagccaagcccgtgacccagatcgtgtctgccgaagcctggggcagagccgattgcggatcccagagcttcggcctgctggaccccaagctgtgctacctgctggatggcatcctgttcatctacggcgtgatcctgaccgccctgttcctgagagtgaagttcagcagaagcgccgacgcccctgcctaccagcagggacagaaccaactgtacaacgagctgaacctgggcagacgggaagagtacgacgtgctggacaagcggagaggcagggaccctgagatgggcggaaagccccagcggagaaagaacccccaggaaggactgtataacgaactccagaaagacaagatggccgaagcctacagcgagatcggcatgaagggcgagcggagaagaggcaagggccacgatggcctgtaccagggcctgagcaccgccaccaaggacacctatgacgccctgcacatgcaggccctgcctccaagaagggccaagcgatctggatctggagcaacaaacttctcactactcaaacaagcaggtgacgtggaggagaatcccgggcctactagtatggactggatttggcgcatccttttccttgtcggcgctgctaccggcgcgcattccttcgaagaagtgcagctggttgaatcaggcggaggactggttcagcctggcggatctctgagactgtcttgtgccgccagcggctacaccttcaccaactactggatgaactgggtccgacaggcccctggcaaaggactggaatgggtcggaatgatcgaccccagcgacagcgagacacactacaaccacatcttcaaggaccgcttcaccatcagcgccgacaccagcaagaataccgcctacctccagatgaactccctgagagccgaggacaccgccgtgtactactgcgccagaaacctgtatctgtggggccagggaaccctggtcacagtgtcatctacgcgtatccagaaccctgatcctgccgtgtaccagctgcgggatagcaagagcagcgacaagagcgtgtgtctgttcaccgacttcgacagccagaccaacgtgtcccagagcaaggactccgacgtgtacatcaccgataagaccgtgctggacatgcggagcatggacttcaagagcaactccgccgtggcctggtccaacaagtccgatttcgcctgcgccaacgccttcaacaacagcattatccccgaggacacattcttcccaagccccgagagcagctgcggtacccagagttttgggttgttggaccctaaattgtgctatctgttggacggaatcctgttcatttacggagtgatcctgaccgcattgttcctgaggagcaagcggtcacggctgctccacagcgattacatgaatatgacaccacgaagaccgggtcctactcgcaaacactaccaaccctacgcacctccccgcgactttgcagcgtaccgatctcgggttaagttttccagatccgcagacgcacccgcttaccaacaagggcagaaccaactctacaatgaacttaatttggggcggagggaagagtacgacgttctggacaaaaggaggggacgagatcccgagatgggcggaaagcctcagcgaaggaagaatccgcaagaggggctttataacgaactccagaaagataaaatggcagaagcctatagtgagattgggatgaagggagaaaggaggaggggtaaaggtcacgatgggttgtaccaaggattgagcacagccactaaagatacctatgatgcgctccacatgcaggccctgccgccaaga

SEQ ID NO: 37330 - DNA, 2700 bp, synthetic construct
  source 1..2700: mol_type = other DNA
atggccttaccagtgaccgccttgctcctgccgctggccttgctgctccacgccgccaggccggacatccagatgacacagagccctagcagcctgtctgccagcgtgggagacagagtgaccatcacatgcaagagcagccagagcctgctggactccgatggcaagacctacctgaactggtatcagcagaagcccggcaaggcccctaagctgctgatctacctggtgtccaagctggatagcggcgtgcccagcagattttctggcagcggcagcggaaccgacttcaccctgacaatatccagcctccagcctgaggacttcgccacctactactgcttccaaggcacccactttccattcaccttcggccagggcaccaaggtggaaatcaaaagactcgaggaggacctgaagaacgtgttcccacctgaggtggccgtgttcgagcctagcgaggccgagatcagccacacccagaaagccaccctcgtgtgcctggctaccggcttctaccccgaccatgtggaactgtcttggtgggtcaacggcaaagaggtgcacagcggcgtgtctaccgacccccagccactgaaagaacagcccgccctgaacgacagccggtactgcctgagcagcagactgagagtgtccgccaccttctggcagaacccccggaaccacttcagatgccaggtgcagttctacggcctgagcgagaacgacgagtggacccaggacagagccaagcccgtgacccagatcgtgtctgccgaagcctggggcagagccgattgcggatcccagagcttcggcctgctggaccccaagctgtgctacctgctggatggcatcctgttcatctacggcgtgatcctgaccgccctgttcctgaaacggggcagaaagaaactcctgtatatattcaaacaaccatttatgagaccagtacaaactactcaagaggaagatggctgtagctgccgatttccagaagaagaagaaggaggatgtgaactgagagtgaagttcagcagaagcgccgacgcccctgcctaccagcagggacagaaccaactgtacaacgagctgaacctgggcagacgggaagagtacgacgtgctggacaagcggagaggcagggaccctgagatgggcggaaagccccagcggagaaagaacccccaggaaggactgtataacgaactccagaaagacaagatggccgaagcctacagcgagatcggcatgaagggcgagcggagaagaggcaagggccacgatggcctgtaccagggcctgagcaccgccaccaaggacacctatgacgccctgcacatgcaggccctgcctccaagaagggccaagcgatctggatctggagcaacaaacttctcactactcaaacaagcaggtgacgtggaggagaatcccgggcctactagtatggactggatttggcgcatccttttccttgtcggcgctgctaccggcgcgcattccttcgaagaagtgcagctggttgaatcaggcggaggactggttcagcctggcggatctctgagactgtcttgtgccgccagcggctacaccttcaccaactactggatgaactgggtccgacaggcccctggcaaaggactggaatgggtcggaatgatcgaccccagcgacagcgagacacactacaaccacatcttcaaggaccgcttcaccatcagcgccgacaccagcaagaataccgcctacctccagatgaactccctgagagccgaggacaccgccgtgtactactgcgccagaaacctgtatctgtggggccagggaaccctggtcacagtgtcatctacgcgtatccagaaccctgatcctgccgtgtaccagctgcgggatagcaagagcagcgacaagagcgtgtgtctgttcaccgacttcgacagccagaccaacgtgtcccagagcaaggactccgacgtgtacatcaccgataagaccgtgctggacatgcggagcatggacttcaagagcaactccgccgtggcctggtccaacaagtccgatttcgcctgcgccaacgccttcaacaacagcattatccccgaggacacattcttcccaagccccgagagcagctgcggtacccagagttttgggttgttggaccctaaattgtgctatctgttggacggaatcctgttcatttacggagtgatcctgaccgcattgttcctgaagagaggccggaagaagctgctgtacatcttcaagcagcctttcatgcggcccgtgcagaccacccaggaagaggacggctgctcctgccggttccccgaggaagaagaaggcggctgcgagctgcgggttaagttttccagatccgcagacgcacccgcttaccaacaagggcagaaccaactctacaatgaacttaatttggggcggagggaagagtacgacgttctggacaaaaggaggggacgagatcccgagatgggcggaaagcctcagcgaaggaagaatccgcaagaggggctttataacgaactccagaaagataaaatggcagaagcctatagtgagattgggatgaagggagaaaggaggaggggtaaaggtcacgatgggttgtaccaaggattgagcacagccactaaagatacctatgatgcgctccacatgcaggccctgccgccaaga

SEQ ID NO: 37331 - DNA, 1761 bp, synthetic construct
  source 1..1761: mol_type = other DNA
atggccttaccagtgaccgccttgctcctgccgctggccttgctgctccacgccgccaggccggacatccagatgacacagagccctagcagcctgtctgccagcgtgggagacagagtgaccatcacatgcaagagcagccagagcctgctggactccgatggcaagacctacctgaactggtatcagcagaagcccggcaaggcccctaagctgctgatctacctggtgtccaagctggatagcggcgtgcccagcagattttctggcagcggcagcggaaccgacttcaccctgacaatatccagcctccagcctgaggacttcgccacctactactgcttccaaggcacccactttccattcaccttcggccagggcaccaaggtggaaatcaaaagactcgagcagagcttcggcctgctggaccccaagctgtgctacctgctggatggcatcctgttcatctacggcgtgatcctgaccgccctgttcctgagagtgaagttcagcagaagcgccgacgcccctgcctaccagcagggacagaaccaactgtacaacgagctgaacctgggcagacgggaagagtacgacgtgctggacaagcggagaggcagggaccctgagatgggcggaaagccccagcggagaaagaacccccaggaaggactgtataacgaactccagaaagacaagatggccgaagcctacagcgagatcggcatgaagggcgagcggagaagaggcaagggccacgatggcctgtaccagggcctgagcaccgccaccaaggacacctatgacgccctgcacatgcaggccctgcctccaagaagggccaagcgatctggatctggagcaacaaacttctcactactcaaacaagcaggtgacgtggaggagaatcccgggcctactagtatggactggatttggcgcatccttttccttgtcggcgctgctaccggcgcgcattccttcgaagaagtgcagctggttgaatcaggcggaggactggttcagcctggcggatctctgagactgtcttgtgccgccagcggctacaccttcaccaactactggatgaactgggtccgacaggcccctggcaaaggactggaatgggtcggaatgatcgaccccagcgacagcgagacacactacaaccacatcttcaaggaccgcttcaccatcagcgccgacaccagcaagaataccgcctacctccagatgaactccctgagagccgaggacaccgccgtgtactactgcgccagaaacctgtatctgtggggccagggaaccctggtcacagtgtcatctacgcgtcagagttttgggttgttggaccctaaattgtgctatctgttggacggaatcctgttcatttacggagtgatcctgaccgcattgttcctgcgggttaagttttccagatccgcagacgcacccgcttaccaacaagggcagaaccaactctacaatgaacttaatttggggcggagggaagagtacgacgttctggacaaaaggaggggacgagatcccgagatgggcggaaagcctcagcgaaggaagaatccgcaagaggggctttataacgaactccagaaagataaaatggcagaagcctatagtgagattgggatgaagggagaaaggaggaggggtaaaggtcacgatgggttgtaccaaggattgagcacagccactaaagatacctatgatgcgctccacatgcaggccctgccgccaaga

SEQ ID NO: 37332 - DNA, 1935 bp, synthetic construct
  source 1..1935: mol_type = other DNA
atggccttaccagtgaccgccttgctcctgccgctggccttgctgctccacgccgccaggccggacatccagatgacacagagccctagcagcctgtctgccagcgtgggagacagagtgaccatcacatgcaagagcagccagagcctgctggactccgatggcaagacctacctgaactggtatcagcagaagcccggcaaggcccctaagctgctgatctacctggtgtccaagctggatagcggcgtgcccagcagattttctggcagcggcagcggaaccgacttcaccctgacaatatccagcctccagcctgaggacttcgccacctactactgcttccaaggcacccactttccattcaccttcggccagggcaccaaggtggaaatcaaaagactcgagggacagcctaaggccaatcctaccgtgacactgttccctccaagcagcgaagaactccaggccaacaaggccacacttgtgtgcctgatctccgacttctaccctggggctgtgacagtggcttggaaggccgatggatctcctgtgaaagccggcgtggaaaccaccaagccatccaagcagagcaacaacaaatacgccgccagctcctacctgagcctgacacctgagcagtggaagtcccacagatcctacagctgccaagtgacccacgaaggcagcaccgtggaaaagacagtggcccctacagagtgcagccccatcaagaccgatgtgattacaatggaccccaaggacaactgctccaaggacgccaacgataccctgctgctccagctgaccaacaccagcgcctactacatgtacttgttgctgctgctgaagtccgtggtgtacttcgccatcatcacatgctgcctgctgcggagaaccgccttctgctgcaacggcgagaagtctagggccaagcgatctggatctggagcaacaaacttctcactactcaaacaagcaggtgacgtggaggagaatcccgggcctactagtatggactggatttggcgcatccttttccttgtcggcgctgctaccggcgcgcattccttcgaagaagtgcagctggttgaatcaggcggaggactggttcagcctggcggatctctgagactgtcttgtgccgccagcggctacaccttcaccaactactggatgaactgggtccgacaggcccctggcaaaggactggaatgggtcggaatgatcgaccccagcgacagcgagacacactacaaccacatcttcaaggaccgcttcaccatcagcgccgacaccagcaagaataccgcctacctccagatgaactccctgagagccgaggacaccgccgtgtactactgcgccagaaacctgtatctgtggggccagggaaccctggtcacagtgtcatctacgcgtgcctctacaaagggaccctccgtgtttcctctggctcccagcagcaagtctacaagcggaggaacagccgctctgggctgcctggtcaaggattactttcccgagcctgtgaccgtgtcctggaatagcggagcactgacaagcggcgtgcacacctttccagccgtgctgcaaagcagcggcctgtactctctgagcagcgtggtcacagtgcctagctctagcctgggcacccagacctacatctgcaatgtgaaccacaagcctagcaacaccaaggtggacaagagagtggaacccaagagctgtgaagtgaaaaccgactccaccgaccacgtgaagcccaaagagacagagaacaccaagcagcccagcaagagctgccacaagcccaaggccatcgtgcacaccgagaaagtgaacatgatgagcctgaccgtgctgggcctgcggatgctgttcgccaaaaccgtggccgtgaacttcctgctgaccgccaagctgttcttcctc

SEQ ID NO: 37333 - DNA, 1869 bp, synthetic construct
  source 1..1869: mol_type = other DNA
atggccttaccagtgaccgccttgctcctgccgctggccttgctgctccacgccgccaggccggacatccagatgacacagagccctagcagcctgtctgccagcgtgggagacagagtgaccatcacatgcaagagcagccagagcctgctggactccgatggcaagacctacctgaactggtatcagcagaagcccggcaaggcccctaagctgctgatctacctggtgtccaagctggatagcggcgtgcccagcagattttctggcagcggcagcggaaccgacttcaccctgacaatatccagcctccagcctgaggacttcgccacctactactgcttccaaggcacccactttccattcaccttcggccagggcaccaaggtggaaatcaaaagactcgagggacagcctaaggccaatcctaccgtgacactgttccctccaagcagcgaagaactccaggccaacaaggccacacttgtgtgcctgatctccgacttctaccctggggctgtgacagtggcttggaaggccgatggatctcctgtgaaagccggcgtggaaaccaccaagccatccaagcagagcaacaacaaatacgccgccagctcctacctgagcctgacacctgagcagtggaagtcccacagatcctacagctgccaagtgacccacgaaggcagcaccgtggaaaagacagtggcccctacagagtgcagcggcagagccgattgcggcatcaccagcgccagctaccaccagggcgtgctgagcgccaccatcctgtacgagatcctgctgggcaaggccaccctgtacgccgtgctggtgtctgccctggtgctgatggctatggtcaagcggaaggacagccggggaagggccaagcgatctggatctggagcaacaaacttctcactactcaaacaagcaggtgacgtggaggagaatcccgggcctactagtatggactggatttggcgcatccttttccttgtcggcgctgctaccggcgcgcattccttcgaagaagtgcagctggttgaatcaggcggaggactggttcagcctggcggatctctgagactgtcttgtgccgccagcggctacaccttcaccaactactggatgaactgggtccgacaggcccctggcaaaggactggaatgggtcggaatgatcgaccccagcgacagcgagacacactacaaccacatcttcaaggaccgcttcaccatcagcgccgacaccagcaagaataccgcctacctccagatgaactccctgagagccgaggacaccgccgtgtactactgcgccagaaacctgtatctgtggggccagggaaccctggtcacagtgtcatctacgcgtgcctctacaaagggaccctccgtgtttcctctggctcccagcagcaagtctacaagcggaggaacagccgctctgggctgcctggtcaaggattactttcccgagcctgtgaccgtgtcctggaatagcggagcactgacaagcggcgtgcacacctttccagccgtgctgcaaagcagcggcctgtactctctgagcagcgtggtcacagtgcctagctctagcctgggcacccagacctacatctgcaatgtgaaccacaagcctagcaacaccaaggtggacaagagagtggaacccaagagctgtatccccgaggacacattcttcccaagcagcgacgtgccctgcgacgtgaagctggtggaaaagagcttcgagacagacaccaacctgaacttccagaacctgagcgtgatcggcttcagaatcctgctgctgaaagtggccggctttaacctgctgatgaccctgcggctgtggtccagc

SEQ ID NO: 37334 - DNA, 1869 bp, synthetic construct
  source 1..1869: mol_type = other DNA
atggccttaccagtgaccgccttgctcctgccgctggccttgctgctccacgccgccaggccggacatccagatgacacagagccctagcagcctgtctgccagcgtgggagacagagtgaccatcacatgcaagagcagccagagcctgctggactccgatggcaagacctacctgaactggtatcagcagaagcccggcaaggcccctaagctgctgatctacctggtgtccaagctggatagcggcgtgcccagcagattttctggcagcggcagcggaaccgacttcaccctgacaatatccagcctccagcctgaggacttcgccacctactactgcttccaaggcacccactttccattcaccttcggccagggcaccaaggtggaaatcaaaagactcgagggacagcctaaggccaatcctaccgtgacactgttccctccaagcagcgaagaactccaggccaacaaggccacacttgtgtgcctgatctccgacttctaccctggggctgtgacagtggcttggaaggccgatggatctcctgtgaaagccggcgtggaaaccaccaagccatccaagcagagcaacaacaaatacgccgccagctcctacctgagcctgacacctgagcagtggaagtcccacagatcctacagctgccaagtgacccacgaaggcagcaccgtggaaaagacagtggcccctacagagtgcagcggcagagccgattgcggctttaccagcgagagctaccagcagggcgtgctgagcgccaccatcctgtacgagatcctgctgggcaaggccaccctgtacgccgtgctggtgtctgccctggtgctgatggctatggtcaagcggaaggacagccggggaagggccaagcgatctggatctggagcaacaaacttctcactactcaaacaagcaggtgacgtggaggagaatcccgggcctactagtatggactggatttggcgcatccttttccttgtcggcgctgctaccggcgcgcattccttcgaagaagtgcagctggttgaatcaggcggaggactggttcagcctggcggatctctgagactgtcttgtgccgccagcggctacaccttcaccaactactggatgaactgggtccgacaggcccctggcaaaggactggaatgggtcggaatgatcgaccccagcgacagcgagacacactacaaccacatcttcaaggaccgcttcaccatcagcgccgacaccagcaagaataccgcctacctccagatgaactccctgagagccgaggacaccgccgtgtactactgcgccagaaacctgtatctgtggggccagggaaccctggtcacagtgtcatctacgcgtgcctctacaaagggaccctccgtgtttcctctggctcccagcagcaagtctacaagcggaggaacagccgctctgggctgcctggtcaaggattactttcccgagcctgtgaccgtgtcctggaatagcggagcactgacaagcggcgtgcacacctttccagccgtgctgcaaagcagcggcctgtactctctgagcagcgtggtcacagtgcctagctctagcctgggcacccagacctacatctgcaatgtgaaccacaagcctagcaacaccaaggtggacaagagagtggaacccaagagctgtatccccgaggacacattcttcccaagccccgagagcagctgcgacgtgaagctggtggaaaagagcttcgagacagacaccaacctgaacttccagaacctgagcgtgatcggcttcagaatcctgctgctgaaagtggccggctttaacctgctgatgaccctgcggctgtggtccagc

SEQ ID NO: 37335 - DNA, 1347 bp, synthetic construct
  source 1..1347: mol_type = other DNA
atggccttaccagtgaccgccttgctcctgccgctggccttgctgctccacgccgccaggccggacatccagatgacacagagccctagcagcctgtctgccagcgtgggagacagagtgaccatcacatgcaagagcagccagagcctgctggactccgatggcaagacctacctgaactggtatcagcagaagcccggcaaggcccctaagctgctgatctacctggtgtccaagctggatagcggcgtgcccagcagattttctggcagcggcagcggaaccgacttcaccctgacaatatccagcctccagcctgaggacttcgccacctactactgcttccaaggcacccactttccattcaccttcggccagggcaccaaggtggaaatcaaaagaggcggaggcggaagtggaggcggaggatctggcggcggaggctctgaagtgcagctggttgaatcaggcggaggactggttcagcctggcggatctctgagactgtcttgtgccgccagcggctacaccttcaccaactactggatgaactgggtccgacaggcccctggcaaaggactggaatgggtcggaatgatcgaccccagcgacagcgagacacactacaaccacatcttcaaggaccgcttcaccatcagcgccgacaccagcaagaataccgcctacctccagatgaactccctgagagccgaggacaccgccgtgtactactgcgccagaaacctgtatctgtggggccagggaaccctggtcacagtgtcatctacgcgtgacggtaacgaggagatgggaggaatcactcaaaccccttacaaagtctcaatttcaggaacaactgttatccttacatgtccccagtatcctggcagcgagatcctttggcagcataacgacaagaatatagggggagatgaagacgataagaatatcggatctgacgaggatcacttgagcctgaaagagttctccgagcttgaacaaagcggatattatgtgtgctatccgcgcgggtcaaagccggaagacgctaacttttacctttatctccgagccagagtgtgcgaaaattgcatggaaatggacgttatgtccgttgctacaatagttatcgtagatatatgcatcacgggtggactgcttctgctggtttattattggtccaagaatagaaaggccaaagctaaacccgtgaccagaggcgctggcgcaggcggaaggcaaaggggacaaaacaaagaacggccaccaccagtgccaaatccagattatgagcctattcggaaaggacagagggacctgtactctggcctgaatcagagaagaatc

SEQ ID NO: 37336 - DNA, 1242 bp, synthetic construct
  source 1..1242: mol_type = other DNA
atggccttaccagtgaccgccttgctcctgccgctggccttgctgctccacgccgccaggccggacatccagatgacacagagccctagcagcctgtctgccagcgtgggagacagagtgaccatcacatgcaagagcagccagagcctgctggactccgatggcaagacctacctgaactggtatcagcagaagcccggcaaggcccctaagctgctgatctacctggtgtccaagctggatagcggcgtgcccagcagattttctggcagcggcagcggaaccgacttcaccctgacaatatccagcctccagcctgaggacttcgccacctactactgcttccaaggcacccactttccattcaccttcggccagggcaccaaggtggaaatcaaaagaggcggaggcggaagtggaggcggaggatctggcggcggaggctctgaagtgcagctggttgaatcaggcggaggactggttcagcctggcggatctctgagactgtcttgtgccgccagcggctacaccttcaccaactactggatgaactgggtccgacaggcccctggcaaaggactggaatgggtcggaatgatcgaccccagcgacagcgagacacactacaaccacatcttcaaggaccgcttcaccatcagcgccgacaccagcaagaataccgcctacctccagatgaactccctgagagccgaggacaccgccgtgtactactgcgccagaaacctgtatctgtggggccagggaaccctggtcacagtgtcatctacgcgtttcaagatccccatcgaggaactggaagatcgggtgttcgtgaactgcaacacctctatcacctgggtggaaggcaccgtgggaacactgctgagcgacatcaccagactggacctcggcaagcggattctggaccctcggggcatctacagatgcaacggcaccgacatctacaaggacaaagaaagcaccgtgcaggtccactacagaatgtgccagtcctgcgtggaactggaccctgctacagtggccggcatcatcgtgaccgatgtgatcgctactctgctgctggctctgggagtgttctgcttcgccggacacgaaacaggcagactgtctggcgctgccgatacacaggccctgctgagaaacgaccaagtgtatcagcccctgcgcgacagagatgatgcccagtattctcacctcggcggcaactgggctagaaacaag

SEQ ID NO: 37337 - DNA, 1272 bp, synthetic construct
  source 1..1272: mol_type = other DNA
atggccttaccagtgaccgccttgctcctgccgctggccttgctgctccacgccgccaggccggacatccagatgacacagagccctagcagcctgtctgccagcgtgggagacagagtgaccatcacatgcaagagcagccagagcctgctggactccgatggcaagacctacctgaactggtatcagcagaagcccggcaaggcccctaagctgctgatctacctggtgtccaagctggatagcggcgtgcccagcagattttctggcagcggcagcggaaccgacttcaccctgacaatatccagcctccagcctgaggacttcgccacctactactgcttccaaggcacccactttccattcaccttcggccagggcaccaaggtggaaatcaaaagaggcggaggcggaagtggaggcggaggatctggcggcggaggctctgaagtgcagctggttgaatcaggcggaggactggttcagcctggcggatctctgagactgtcttgtgccgccagcggctacaccttcaccaactactggatgaactgggtccgacaggcccctggcaaaggactggaatgggtcggaatgatcgaccccagcgacagcgagacacactacaaccacatcttcaaggaccgcttcaccatcagcgccgacaccagcaagaataccgcctacctccagatgaactccctgagagccgaggacaccgccgtgtactactgcgccagaaacctgtatctgtggggccagggaaccctggtcacagtgtcatctacgcgtcagagcatcaagggcaaccacctggtcaaggtgtacgactaccaagaggacggcagcgtgctgctgacatgtgatgccgaggccaagaacatcacctggtttaaggacggcaagatgatcggcttcctgaccgaggacaagaagaagtggaacctgggcagcaacgctaaggaccccagaggcatgtatcagtgcaagggcagccagaacaagagcaagcccctccaggtgtactaccggatgtgccagaactgcatcgagctgaacgccgctaccatcagcggctttctgttcgccgagatcgtgtccatcttcgtgctggccgtgggcgtgtactttatcgctggacaggatggcgtgcggcagagcagagcttccgataagcaaaccctgctgcctaacgaccagctgtaccagcctctgaaggacagagaggacgaccagtacagccacctccagggcaatcagctgagaagaaac

SEQ ID NO: 37338 - DNA, 1221 bp, synthetic construct
  source 1..1221: mol_type = other DNA
atggccttaccagtgaccgccttgctcctgccgctggccttgctgctccacgccgccaggccggacatccagatgacacagagccctagcagcctgtctgccagcgtgggagacagagtgaccatcacatgcaagagcagccagagcctgctggactccgatggcaagacctacctgaactggtatcagcagaagcccggcaaggcccctaagctgctgatctacctggtgtccaagctggatagcggcgtgcccagcagattttctggcagcggcagcggaaccgacttcaccctgacaatatccagcctccagcctgaggacttcgccacctactactgcttccaaggcacccactttccattcaccttcggccagggcaccaaggtggaaatcaaaagaggcggaggcggaagtggaggcggaggatctggcggcggaggctctgaagtgcagctggttgaatcaggcggaggactggttcagcctggcggatctctgagactgtcttgtgccgccagcggctacaccttcaccaactactggatgaactgggtccgacaggcccctggcaaaggactggaatgggtcggaatgatcgaccccagcgacagcgagacacactacaaccacatcttcaaggaccgcttcaccatcagcgccgacaccagcaagaataccgcctacctccagatgaactccctgagagccgaggacaccgccgtgtactactgcgccagaaacctgtatctgtggggccagggaaccctggtcacagtgtcatctacgcgtcagagttttgggttgttggaccctaaattgtgctatctgttggacggaatcctgttcatttacggagtgatcctgaccgcattgttcctgcgggttaagttttccagatccgcagacgcacccgcttaccaacaagggcagaaccaactctacaatgaacttaatttggggcggagggaagagtacgacgttctggacaaaaggaggggacgagatcccgagatgggcggaaagcctcagcgaaggaagaatccgcaagaggggctttataacgaactccagaaagataaaatggcagaagcctatagtgagattgggatgaagggagaaaggaggaggggtaaaggtcacgatgggttgtaccaaggattgagcacagccactaaagatacctatgatgcgctccacatgcaggccctgccgccaaga

SEQ ID NO: 37339 - DNA, 1506 bp, synthetic construct
  source 1..1506: mol_type = other DNA
atggccttaccagtgaccgccttgctcctgccgctggccttgctgctccacgccgccaggccggacatccagatgacacagagccctagcagcctgtctgccagcgtgggagacagagtgaccatcacatgcaagagcagccagagcctgctggactccgatggcaagacctacctgaactggtatcagcagaagcccggcaaggcccctaagctgctgatctacctggtgtccaagctggatagcggcgtgcccagcagattttctggcagcggcagcggaaccgacttcaccctgacaatatccagcctccagcctgaggacttcgccacctactactgcttccaaggcacccactttccattcaccttcggccagggcaccaaggtggaaatcaaaagaggcggaggcggaagtggaggcggaggatctggcggcggaggctctgaagtgcagctggttgaatcaggcggaggactggttcagcctggcggatctctgagactgtcttgtgccgccagcggctacaccttcaccaactactggatgaactgggtccgacaggcccctggcaaaggactggaatgggtcggaatgatcgaccccagcgacagcgagacacactacaaccacatcttcaaggaccgcttcaccatcagcgccgacaccagcaagaataccgcctacctccagatgaactccctgagagccgaggacaccgccgtgtactactgcgccagaaacctgtatctgtggggccagggaaccctggtcacagtgtcatctacgcgtggaatgaggactgaggatcttcccaaagctgtcgtctttctcgaaccccaatggtatcgggtgctcgaaaaagactctgtgacactgaaatgccaaggggcctactctcccgaggacaactccacacagtggtttcataatgagtccctcatcagctctcaggccagctcttatttcattgatgccgctacagtggacgactccggcgagtatcggtgtcagaccaatctgtctacactgtctgaccccgtgcagcttgaggtccacattggatggttgctcttgcaagccccacgctgggttttcaaagaggaagatccaatccatctgcggtgccacagctggaaaaacaccgctctccacaaagtcacatacctgcaaaatggcaaaggacgcaaatacttccatcacaattccgatttttacattccgaaggctaccctgaaagacagcggcagctatttctgccggggactcgtcggctccaagaatgtgtcctccgaaaccgtgaatatcacgattacccaaggactggctgtgcctacaatctctagcttctttccgcctggataccaagtctccttctgtcttgtgatggtcctcctgtttgctgtggacacaggactgtacttttccgtgaaaacgaacatccgcagctccacacgcgattggaaagatcacaagtttaaatggcgcaaagatccccaggacaag

SEQ ID NO: 37340 - DNA, 1431 bp, synthetic construct
  source 1..1431: mol_type = other DNA
atggccttaccagtgaccgccttgctcctgccgctggccttgctgctccacgccgccaggccggacatccagatgacacagagccctagcagcctgtctgccagcgtgggagacagagtgaccatcacatgcaagagcagccagagcctgctggactccgatggcaagacctacctgaactggtatcagcagaagcccggcaaggcccctaagctgctgatctacctggtgtccaagctggatagcggcgtgcccagcagattttctggcagcggcagcggaaccgacttcaccctgacaatatccagcctccagcctgaggacttcgccacctactactgcttccaaggcacccactttccattcaccttcggccagggcaccaaggtggaaatcaaaagaggcggaggcggaagtggaggcggaggatctggcggcggaggctctgaagtgcagctggttgaatcaggcggaggactggttcagcctggcggatctctgagactgtcttgtgccgccagcggctacaccttcaccaactactggatgaactgggtccgacaggcccctggcaaaggactggaatgggtcggaatgatcgaccccagcgacagcgagacacactacaaccacatcttcaaggaccgcttcaccatcagcgccgacaccagcaagaataccgcctacctccagatgaactccctgagagccgaggacaccgccgtgtactactgcgccagaaacctgtatctgtggggccagggaaccctggtcacagtgtcatctacgcgtggaatgaggactgaggatcttcccaaagctgtcgtctttctcgaaccccaatggtatcgggtgctcgaaaaagactctgtgacactgaaatgccaaggggcctactctcccgaggacaactccacacagtggtttcataatgagtccctcatcagctctcaggccagctcttatttcattgatgccgctacagtggacgactccggcgagtatcggtgtcagaccaatctgtctacactgtctgaccccgtgcagcttgaggtccacattggatggttgctcttgcaagccccacgctgggttttcaaagaggaagatccaatccatctgcggtgccacagctggaaaaacaccgctctccacaaagtcacatacctgcaaaatggcaaaggacgcaaatacttccatcacaattccgatttttacattccgaaggctaccctgaaagacagcggcagctatttctgccggggactcgtcggctccaagaatgtgtcctccgaaaccgtgaatatcacgattacccaaggactggctgtgcctacaatctctagcttctttccgcctggataccaagtctccttctgtcttgtgatggtcctcctgtttgctgtggacacaggactgtacttttccgtg

SEQ ID NO: 37341 - DNA, 1434 bp, synthetic construct
  source 1..1434: mol_type = other DNA
atggccttaccagtgaccgccttgctcctgccgctggccttgctgctccacgccgccaggccggacatccagatgacacagagccctagcagcctgtctgccagcgtgggagacagagtgaccatcacatgcaagagcagccagagcctgctggactccgatggcaagacctacctgaactggtatcagcagaagcccggcaaggcccctaagctgctgatctacctggtgtccaagctggatagcggcgtgcccagcagattttctggcagcggcagcggaaccgacttcaccctgacaatatccagcctccagcctgaggacttcgccacctactactgcttccaaggcacccactttccattcaccttcggccagggcaccaaggtggaaatcaaaagaggcggaggcggaagtggaggcggaggatctggcggcggaggctctgaagtgcagctggttgaatcaggcggaggactggttcagcctggcggatctctgagactgtcttgtgccgccagcggctacaccttcaccaactactggatgaactgggtccgacaggcccctggcaaaggactggaatgggtcggaatgatcgaccccagcgacagcgagacacactacaaccacatcttcaaggaccgcttcaccatcagcgccgacaccagcaagaataccgcctacctccagatgaactccctgagagccgaggacaccgccgtgtactactgcgccagaaacctgtatctgtggggccagggaaccctggtcacagtgtcatctacgcgtggaatgaggactgaggatcttcccaaagctgtcgtctttctcgaaccccaatggtatcgggtgctcgaaaaagactctgtgacactgaaatgccaaggggcctactctcccgaggacaactccacacagtggtttcataatgagtccctcatcagctctcaggccagctcttatttcattgatgccgctacagtggacgactccggcgagtatcggtgtcagaccaatctgtctacactgtctgaccccgtgcagcttgaggtccacattggatggttgctcttgcaagccccacgctgggttttcaaagaggaagatccaatccatctgcggtgccacagctggaaaaacaccgctctccacaaagtcacatacctgcaaaatggcaaaggacgcaaatacttccatcacaattccgatttttacattccgaaggctaccctgaaagacagcggcagctatttctgccggggactcgtcggctccaagaatgtgtcctccgaaaccgtgaatatcacgattacccaaggactggctgtgcctacaatctctagcttctttccgcctggataccaagtctccttctgtcttgtgatggtcctcctgtttgctgtggacacaggactgtacttttccgtgaaa

SEQ ID NO: 37342 - DNA, 2166 bp, synthetic construct
  source 1..2166: mol_type = other DNA
atggccttaccagtgaccgccttgctcctgccgctggccttgctgctccacgccgccaggccggacatccagatgacacagagccctagcagcctgtctgccagcgtgggagacagagtgaccatcacatgcaagagcagccagagcctgctggactccgatggcaagacctacctgaactggtatcagcagaagcccggcaaggcccctaagctgctgatctacctggtgtccaagctggatagcggcgtgcccagcagattttctggcagcggcagcggaaccgacttcaccctgacaatatccagcctccagcctgaggacttcgccacctactactgcttccaaggcacccactttccattcaccttcggccagggcaccaaggtggaaatcaaaagactcgagggacagcctaaggccaatcctaccgtgacactgttccctccaagcagcgaagaactccaggccaacaaggccacacttgtgtgcctgatctccgacttctaccctggggctgtgacagtggcttggaaggccgatggatctcctgtgaaagccggcgtggaaaccaccaagccatccaagcagagcaacaacaaatacgccgccagctcctacctgagcctgacacctgagcagtggaagtcccacagatcctacagctgccaagtgacccacgaaggcagcaccgtggaaaagacagtggcccctacagagtgcagcggatcccagagcttcggcctgctggaccccaagctgtgctacctgctggatggcatcctgttcatctacggcgtgatcctgaccgccctgttcctgagagtgaagttcagcagaagcgccgacgcccctgcctaccagcagggacagaaccaactgtacaacgagctgaacctgggcagacgggaagagtacgacgtgctggacaagcggagaggcagggaccctgagatgggcggaaagccccagcggagaaagaacccccaggaaggactgtataacgaactccagaaagacaagatggccgaagcctacagcgagatcggcatgaagggcgagcggagaagaggcaagggccacgatggcctgtaccagggcctgagcaccgccaccaaggacacctatgacgccctgcacatgcaggccctgcctccaagaagggccaagcgatctggatctggagcaacaaacttctcactactcaaacaagcaggtgacgtggaggagaatcccgggcctactagtatggactggatttggcgcatccttttccttgtcggcgctgctaccggcgcgcattccttcgaagaagtgcagctggttgaatcaggcggaggactggttcagcctggcggatctctgagactgtcttgtgccgccagcggctacaccttcaccaactactggatgaactgggtccgacaggcccctggcaaaggactggaatgggtcggaatgatcgaccccagcgacagcgagacacactacaaccacatcttcaaggaccgcttcaccatcagcgccgacaccagcaagaataccgcctacctccagatgaactccctgagagccgaggacaccgccgtgtactactgcgccagaaacctgtatctgtggggccagggaaccctggtcacagtgtcatctacgcgtgcctctacaaagggaccctccgtgtttcctctggctcccagcagcaagtctacaagcggaggaacagccgctctgggctgcctggtcaaggattactttcccgagcctgtgaccgtgtcctggaatagcggagcactgacaagcggcgtgcacacctttccagccgtgctgcaaagcagcggcctgtactctctgagcagcgtggtcacagtgcctagctctagcctgggcacccagacctacatctgcaatgtgaaccacaagcctagcaacaccaaggtggacaagagagtggaacccaagagctgtggtaccatcactcaaggtttggcagtgtcaaccatctcatcattctttccacctggctaccaagtgtccttctgcctggtcatggtgctgctgttcgccgtggataccggcctgtacttcagcgtcaagaccaacatccggtccagcaccagagactggaaggaccacaagttcaagtggcggaaggaccctcaggacaag

SEQ ID NO: 37343 - DNA, 2211 bp, synthetic construct
  source 1..2211: mol_type = other DNA
atggccttaccagtgaccgccttgctcctgccgctggccttgctgctccacgccgccaggccggacatccagatgacacagagccctagcagcctgtctgccagcgtgggagacagagtgaccatcacatgcaagagcagccagagcctgctggactccgatggcaagacctacctgaactggtatcagcagaagcccggcaaggcccctaagctgctgatctacctggtgtccaagctggatagcggcgtgcccagcagattttctggcagcggcagcggaaccgacttcaccctgacaatatccagcctccagcctgaggacttcgccacctactactgcttccaaggcacccactttccattcaccttcggccagggcaccaaggtggaaatcaaaagactcgaggacctgaagaacgtgttcccacctgaggtggccgtgttcgagcctagcgaggccgagatcagccacacccagaaagccaccctcgtgtgcctggctaccggcttctaccccgaccatgtggaactgtcttggtgggtcaacggcaaagaggtgcacagcggcgtgtctaccgacccccagccactgaaagaacagcccgccctgaacgacagccggtactgcctgagcagcagactgagagtgtccgccaccttctggcagaacccccggaaccacttcagatgccaggtgcagttctacggcctgagcgagaacgacgagtggacccaggacagagccaagcccgtgacccagatcgtgtctgccgaagcctggggcagagccgattgcggatcccagagcttcggcctgctggaccccaagctgtgctacctgctggatggcatcctgttcatctacggcgtgatcctgaccgccctgttcctgagagtgaagttcagcagaagcgccgacgcccctgcctaccagcagggacagaaccaactgtacaacgagctgaacctgggcagacgggaagagtacgacgtgctggacaagcggagaggcagggaccctgagatgggcggaaagccccagcggagaaagaacccccaggaaggactgtataacgaactccagaaagacaagatggccgaagcctacagcgagatcggcatgaagggcgagcggagaagaggcaagggccacgatggcctgtaccagggcctgagcaccgccaccaaggacacctatgacgccctgcacatgcaggccctgcctccaagaagggccaagcgatctggatctggagcaacaaacttctcactactcaaacaagcaggtgacgtggaggagaatcccgggcctactagtatggactggatttggcgcatccttttccttgtcggcgctgctaccggcgcgcattccttcgaagaagtgcagctggttgaatcaggcggaggactggttcagcctggcggatctctgagactgtcttgtgccgccagcggctacaccttcaccaactactggatgaactgggtccgacaggcccctggcaaaggactggaatgggtcggaatgatcgaccccagcgacagcgagacacactacaaccacatcttcaaggaccgcttcaccatcagcgccgacaccagcaagaataccgcctacctccagatgaactccctgagagccgaggacaccgccgtgtactactgcgccagaaacctgtatctgtggggccagggaaccctggtcacagtgtcatctacgcgtatccagaaccctgatcctgccgtgtaccagctgcgggatagcaagagcagcgacaagagcgtgtgtctgttcaccgacttcgacagccagaccaacgtgtcccagagcaaggactccgacgtgtacatcaccgataagaccgtgctggacatgcggagcatggacttcaagagcaactccgccgtggcctggtccaacaagtccgatttcgcctgcgccaacgccttcaacaacagcattatccccgaggacacattcttcccaagccccgagagcagctgcggtaccatcactcaaggtttggcagtgtcaaccatctcatcattctttccacctggctaccaagtgtccttctgcctggtcatggtgctgctgttcgccgtggataccggcctgtacttcagcgtcaagaccaacatccggtccagcaccagagactggaaggaccacaagttcaagtggcggaaggaccctcaggacaag

SEQ ID NO: 37344 - DNA, 2136 bp, synthetic construct
  source 1..2136: mol_type = other DNA
atggccttaccagtgaccgccttgctcctgccgctggccttgctgctccacgccgccaggccggacatccagatgacacagagccctagcagcctgtctgccagcgtgggagacagagtgaccatcacatgcaagagcagccagagcctgctggactccgatggcaagacctacctgaactggtatcagcagaagcccggcaaggcccctaagctgctgatctacctggtgtccaagctggatagcggcgtgcccagcagattttctggcagcggcagcggaaccgacttcaccctgacaatatccagcctccagcctgaggacttcgccacctactactgcttccaaggcacccactttccattcaccttcggccagggcaccaaggtggaaatcaaaagactcgaggacctgaagaacgtgttcccacctgaggtggccgtgttcgagcctagcgaggccgagatcagccacacccagaaagccaccctcgtgtgcctggctaccggcttctaccccgaccatgtggaactgtcttggtgggtcaacggcaaagaggtgcacagcggcgtgtctaccgacccccagccactgaaagaacagcccgccctgaacgacagccggtactgcctgagcagcagactgagagtgtccgccaccttctggcagaacccccggaaccacttcagatgccaggtgcagttctacggcctgagcgagaacgacgagtggacccaggacagagccaagcccgtgacccagatcgtgtctgccgaagcctggggcagagccgattgcggatcccagagcttcggcctgctggaccccaagctgtgctacctgctggatggcatcctgttcatctacggcgtgatcctgaccgccctgttcctgagagtgaagttcagcagaagcgccgacgcccctgcctaccagcagggacagaaccaactgtacaacgagctgaacctgggcagacgggaagagtacgacgtgctggacaagcggagaggcagggaccctgagatgggcggaaagccccagcggagaaagaacccccaggaaggactgtataacgaactccagaaagacaagatggccgaagcctacagcgagatcggcatgaagggcgagcggagaagaggcaagggccacgatggcctgtaccagggcctgagcaccgccaccaaggacacctatgacgccctgcacatgcaggccctgcctccaagaagggccaagcgatctggatctggagcaacaaacttctcactactcaaacaagcaggtgacgtggaggagaatcccgggcctactagtatggactggatttggcgcatccttttccttgtcggcgctgctaccggcgcgcattccttcgaagaagtgcagctggttgaatcaggcggaggactggttcagcctggcggatctctgagactgtcttgtgccgccagcggctacaccttcaccaactactggatgaactgggtccgacaggcccctggcaaaggactggaatgggtcggaatgatcgaccccagcgacagcgagacacactacaaccacatcttcaaggaccgcttcaccatcagcgccgacaccagcaagaataccgcctacctccagatgaactccctgagagccgaggacaccgccgtgtactactgcgccagaaacctgtatctgtggggccagggaaccctggtcacagtgtcatctacgcgtatccagaaccctgatcctgccgtgtaccagctgcgggatagcaagagcagcgacaagagcgtgtgtctgttcaccgacttcgacagccagaccaacgtgtcccagagcaaggactccgacgtgtacatcaccgataagaccgtgctggacatgcggagcatggacttcaagagcaactccgccgtggcctggtccaacaagtccgatttcgcctgcgccaacgccttcaacaacagcattatccccgaggacacattcttcccaagccccgagagcagctgcggtaccatcactcaaggtttggcagtgtcaaccatctcatcattctttccacctggctaccaagtgtccttctgcctggtcatggtgctgctgttcgccgtggataccggcctgtacttcagcgtc

SEQ ID NO: 37345 - DNA, 2139 bp, synthetic construct
  source 1..2139: mol_type = other DNA
atggccttaccagtgaccgccttgctcctgccgctggccttgctgctccacgccgccaggccggacatccagatgacacagagccctagcagcctgtctgccagcgtgggagacagagtgaccatcacatgcaagagcagccagagcctgctggactccgatggcaagacctacctgaactggtatcagcagaagcccggcaaggcccctaagctgctgatctacctggtgtccaagctggatagcggcgtgcccagcagattttctggcagcggcagcggaaccgacttcaccctgacaatatccagcctccagcctgaggacttcgccacctactactgcttccaaggcacccactttccattcaccttcggccagggcaccaaggtggaaatcaaaagactcgaggacctgaagaacgtgttcccacctgaggtggccgtgttcgagcctagcgaggccgagatcagccacacccagaaagccaccctcgtgtgcctggctaccggcttctaccccgaccatgtggaactgtcttggtgggtcaacggcaaagaggtgcacagcggcgtgtctaccgacccccagccactgaaagaacagcccgccctgaacgacagccggtactgcctgagcagcagactgagagtgtccgccaccttctggcagaacccccggaaccacttcagatgccaggtgcagttctacggcctgagcgagaacgacgagtggacccaggacagagccaagcccgtgacccagatcgtgtctgccgaagcctggggcagagccgattgcggatcccagagcttcggcctgctggaccccaagctgtgctacctgctggatggcatcctgttcatctacggcgtgatcctgaccgccctgttcctgagagtgaagttcagcagaagcgccgacgcccctgcctaccagcagggacagaaccaactgtacaacgagctgaacctgggcagacgggaagagtacgacgtgctggacaagcggagaggcagggaccctgagatgggcggaaagccccagcggagaaagaacccccaggaaggactgtataacgaactccagaaagacaagatggccgaagcctacagcgagatcggcatgaagggcgagcggagaagaggcaagggccacgatggcctgtaccagggcctgagcaccgccaccaaggacacctatgacgccctgcacatgcaggccctgcctccaagaagggccaagcgatctggatctggagcaacaaacttctcactactcaaacaagcaggtgacgtggaggagaatcccgggcctactagtatggactggatttggcgcatccttttccttgtcggcgctgctaccggcgcgcattccttcgaagaagtgcagctggttgaatcaggcggaggactggttcagcctggcggatctctgagactgtcttgtgccgccagcggctacaccttcaccaactactggatgaactgggtccgacaggcccctggcaaaggactggaatgggtcggaatgatcgaccccagcgacagcgagacacactacaaccacatcttcaaggaccgcttcaccatcagcgccgacaccagcaagaataccgcctacctccagatgaactccctgagagccgaggacaccgccgtgtactactgcgccagaaacctgtatctgtggggccagggaaccctggtcacagtgtcatctacgcgtatccagaaccctgatcctgccgtgtaccagctgcgggatagcaagagcagcgacaagagcgtgtgtctgttcaccgacttcgacagccagaccaacgtgtcccagagcaaggactccgacgtgtacatcaccgataagaccgtgctggacatgcggagcatggacttcaagagcaactccgccgtggcctggtccaacaagtccgatttcgcctgcgccaacgccttcaacaacagcattatccccgaggacacattcttcccaagccccgagagcagctgcggtaccatcactcaaggtttggcagtgtcaaccatctcatcattctttccacctggctaccaagtgtccttctgcctggtcatggtgctgctgttcgccgtggataccggcctgtacttcagcgtcaag

SEQ ID NO: 37346 - DNA, 2142 bp, synthetic construct
  source 1..2142: mol_type = other DNA
atggccttaccagtgaccgccttgctcctgccgctggccttgctgctccacgccgccaggccggacatccagatgacacagagccctagcagcctgtctgccagcgtgggagacagagtgaccatcacatgcaagagcagccagagcctgctggactccgatggcaagacctacctgaactggtatcagcagaagcccggcaaggcccctaagctgctgatctacctggtgtccaagctggatagcggcgtgcccagcagattttctggcagcggcagcggaaccgacttcaccctgacaatatccagcctccagcctgaggacttcgccacctactactgcttccaaggcacccactttccattcaccttcggccagggcaccaaggtggaaatcaaaagactcgaggacctgaagaacgtgttcccacctgaggtggccgtgttcgagcctagcgaggccgagatcagccacacccagaaagccaccctcgtgtgcctggctaccggcttctaccccgaccatgtggaactgtcttggtgggtcaacggcaaagaggtgcacagcggcgtgtctaccgacccccagccactgaaagaacagcccgccctgaacgacagccggtactgcctgagcagcagactgagagtgtccgccaccttctggcagaacccccggaaccacttcagatgccaggtgcagttctacggcctgagcgagaacgacgagtggacccaggacagagccaagcccgtgacccagatcgtgtctgccgaagcctggggcagagccgattgcggatcccagagcttcggcctgctggaccccaagctgtgctacctgctggatggcatcctgttcatctacggcgtgatcctgaccgccctgttcctgagagtgaagttcagcagaagcgccgacgcccctgcctaccagcagggacagaaccaactgtacaacgagctgaacctgggcagacgggaagagtacgacgtgctggacaagcggagaggcagggaccctgagatgggcggaaagccccagcggagaaagaacccccaggaaggactgtataacgaactccagaaagacaagatggccgaagcctacagcgagatcggcatgaagggcgagcggagaagaggcaagggccacgatggcctgtaccagggcctgagcaccgccaccaaggacacctatgacgccctgcacatgcaggccctgcctccaagaagggccaagcgatctggatctggagcaacaaacttctcactactcaaacaagcaggtgacgtggaggagaatcccgggcctactagtatggactggatttggcgcatccttttccttgtcggcgctgctaccggcgcgcattccttcgaagaagtgcagctggttgaatcaggcggaggactggttcagcctggcggatctctgagactgtcttgtgccgccagcggctacaccttcaccaactactggatgaactgggtccgacaggcccctggcaaaggactggaatgggtcggaatgatcgaccccagcgacagcgagacacactacaaccacatcttcaaggaccgcttcaccatcagcgccgacaccagcaagaataccgcctacctccagatgaactccctgagagccgaggacaccgccgtgtactactgcgccagaaacctgtatctgtggggccagggaaccctggtcacagtgtcatctacgcgtatccagaaccctgatcctgccgtgtaccagctgcgggatagcaagagcagcgacaagagcgtgtgtctgttcaccgacttcgacagccagaccaacgtgtcccagagcaaggactccgacgtgtacatcaccgataagaccgtgctggacatgcggagcatggacttcaagagcaactccgccgtggcctggtccaacaagtccgatttcgcctgcgccaacgccttcaacaacagcattatccccgaggacacattcttcccaagccccgagagcagctgcggtaccatcactcaaggtttggcagtgtcaaccatctcatcattctttccacctggctaccaagtgtccttctgcctggtcatggtgctgctgttcgccgtggataccggcctgtacttcagcgtcaagacc

SEQ ID NO: 37347 - DNA, 1953 bp, synthetic construct
  source 1..1953: mol_type = other DNA
atggccttaccagtgaccgccttgctcctgccgctggccttgctgctccacgccgccaggccggacatccagatgacacagagccctagcagcctgtctgccagcgtgggagacagagtgaccatcacatgcaagagcagccagagcctgctggactccgatggcaagacctacctgaactggtatcagcagaagcccggcaaggcccctaagctgctgatctacctggtgtccaagctggatagcggcgtgcccagcagattttctggcagcggcagcggaaccgacttcaccctgacaatatccagcctccagcctgaggacttcgccacctactactgcttccaaggcacccactttccattcaccttcggccagggcaccaaggtggaaatcaaaagactcgagggacagcctaaggccaatcctaccgtgacactgttccctccaagcagcgaagaactccaggccaacaaggccacacttgtgtgcctgatctccgacttctaccctggggctgtgacagtggcttggaaggccgatggatctcctgtgaaagccggcgtggaaaccaccaagccatccaagcagagcaacaacaaatacgccgccagctcctacctgagcctgacacctgagcagtggaagtcccacagatcctacagctgccaagtgacccacgaaggcagcaccgtggaaaagacagtggcccctacagagtgcagcggatccctgggagagcctcagctgtgctatatcctggacgccatcctgtttctgtacggcatcgtgctgaccctgctgtactgccggctgaagatccaagtgcggaaggccgccatcaccagctacgagaaatccgacggcgtgtacaccggcctgagcaccagaaatcaagagacatacgagacactgaagcacgaaaagcctccacaaagggccaagcgatctggatctggagcaacaaacttctcactactcaaacaagcaggtgacgtggaggagaatcccgggcctactagtatggactggatttggcgcatccttttccttgtcggcgctgctaccggcgcgcattccttcgaagaagtgcagctggttgaatcaggcggaggactggttcagcctggcggatctctgagactgtcttgtgccgccagcggctacaccttcaccaactactggatgaactgggtccgacaggcccctggcaaaggactggaatgggtcggaatgatcgaccccagcgacagcgagacacactacaaccacatcttcaaggaccgcttcaccatcagcgccgacaccagcaagaataccgcctacctccagatgaactccctgagagccgaggacaccgccgtgtactactgcgccagaaacctgtatctgtggggccagggaaccctggtcacagtgtcatctacgcgtgcctctacaaagggaccctccgtgtttcctctggctcccagcagcaagtctacaagcggaggaacagccgctctgggctgcctggtcaaggattactttcccgagcctgtgaccgtgtcctggaatagcggagcactgacaagcggcgtgcacacctttccagccgtgctgcaaagcagcggcctgtactctctgagcagcgtggtcacagtgcctagctctagcctgggcacccagacctacatctgcaatgtgaaccacaagcctagcaacaccaaggtggacaagagagtggaacccaagagctgtggtaccctcggagaaccacagctctgttacattctggatgctatcctgttcctctatgggatcgtcctgacactcctgtattgcagactcaaaattcaagttcgcaaagccgccattacctcttacgagaagagtgatggggtgtacacaggactgtctacccggaatcaagaaacctacgaaaccctcaaacatgagaagccacctcagtaa

SEQ ID NO: 37348 - DNA, 1860 bp, synthetic construct
  source 1..1860: mol_type = other DNA
atggccttaccagtgaccgccttgctcctgccgctggccttgctgctccacgccgccaggccggacatccagatgacacagagccctagcagcctgtctgccagcgtgggagacagagtgaccatcacatgcaagagcagccagagcctgctggactccgatggcaagacctacctgaactggtatcagcagaagcccggcaaggcccctaagctgctgatctacctggtgtccaagctggatagcggcgtgcccagcagattttctggcagcggcagcggaaccgacttcaccctgacaatatccagcctccagcctgaggacttcgccacctactactgcttccaaggcacccactttccattcaccttcggccagggcaccaaggtggaaatcaaaagactcgaggacctgaagaacgtgttcccacctgaggtggccgtgttcgagcctagcgaggccgagatcagccacacccagaaagccaccctcgtgtgcctggctaccggcttctaccccgaccatgtggaactgtcttggtgggtcaacggcaaagaggtgcacagcggcgtgtgtaccgacccccagccactgaaagaacagcccgccctgaacgacagccggtactgcctgagcagcagactgagagtgtccgccaccttctggcagaacccccggaaccacttcagatgccaggtgcagttctacggcctgagcgagaacgacgagtggacccaggacagagccaagcccgtgacccagatcgtgtctgccgaagcctggggcagagccgattgcggctttaccagcgagagctaccagcagggcgtgctgagcgcctactacatgtacttgttgctgctgctgaagtccgtggtgtacttcgccatcatcacatgctgcctgctgcggagaaccgccttctgctgcaacggcgagaagtctagggccaagcgatctggatctggagcaacaaacttctcactactcaaacaagcaggtgacgtggaggagaatcccgggcctactagtatggactggatttggcgcatccttttccttgtcggcgctgctaccggcgcgcattccttcgaagaagtgcagctggttgaatcaggcggaggactggttcagcctggcggatctctgagactgtcttgtgccgccagcggctacaccttcaccaactactggatgaactgggtccgacaggcccctggcaaaggactggaatgggtcggaatgatcgaccccagcgacagcgagacacactacaaccacatcttcaaggaccgcttcaccatcagcgccgacaccagcaagaataccgcctacctccagatgaactccctgagagccgaggacaccgccgtgtactactgcgccagaaacctgtatctgtggggccagggaaccctggtcacagtgtcatctacgcgtatccagaaccctgatcctgccgtgtaccagctgcgggatagcaagagcagcgacaagagcgtgtgtctgttcaccgacttcgacagccagaccaacgtgtcccagagcaaggactccgacgtgtacatcaccgataagtgcgtgctggacatgcggagcatggacttcaagagcaactccgccgtggcctggtccaacaagtccgatttcgcctgcgccaacgccttcaacaacagcattatccccgaggacacattcttcccaagccccgagagcagctgcgacgtgaagctggtggaaaagagcttcgagacagacaccaacctgaacttccagaacctgagcgtgatcggcttcagaatcctgctgctgaaagtggccggctttaacctgctgatgaccctgcggctgtggtccagc

SEQ ID NO: 37349 - DNA, 1881 bp, synthetic construct
  source 1..1881: mol_type = other DNA
atggccttaccagtgaccgccttgctcctgccgctggccttgctgctccacgccgccaggccggacatccagatgacacagagccctagcagcctgtctgccagcgtgggagacagagtgaccatcacatgcaagagcagccagagcctgctggactccgatggcaagacctacctgaactggtatcagcagaagcccggcaaggcccctaagctgctgatctacctggtgtccaagctggatagcggcgtgcccagcagattttctggcagcggcagcggaaccgacttcaccctgacaatatccagcctccagcctgaggacttcgccacctactactgcttccaaggcacccactttccattcaccttcggccagggcaccaaggtggaaatcaaaagactcgaggacaagcagctggacgccgacgtgtcccccaagcctaccatcttcctgccctctatcgccgagacaaagctccagaaggccggcacctacctgtgcctgctggaaaagttcttcccagatgtgattaagatccactggcaggaaaagaagtccaacaccatcctgggcagccaggaaggcaacaccatgaagaccaacgacacctacatgaagttcagctggctgaccgtgcccgagaagtccctggacaaagaacacagatgcatcgtgcggcacgaaaacaacaagaacggcgtggaccaggaaatcatcttcccacccatcaagaccgatgtgattacaatggaccccaaggacaactgctccaaggacgccaacgataccctgctgctccagctgaccaacaccagcgcctactacatgtacgagatcctgctgggcaaggccaccctgtacgccgtgctggtgtctgccctggtgctgatggctatggtcaagcggaaggacagccggggaagggccaagcgatctggatctggagcaacaaacttctcactactcaaacaagcaggtgacgtggaggagaatcccgggcctactagtatggactggatttggcgcatccttttccttgtcggcgctgctaccggcgcgcattccttcgaagaagtgcagctggttgaatcaggcggaggactggttcagcctggcggatctctgagactgtcttgtgccgccagcggctacaccttcaccaactactggatgaactgggtccgacaggcccctggcaaaggactggaatgggtcggaatgatcgaccccagcgacagcgagacacactacaaccacatcttcaaggaccgcttcaccatcagcgccgacaccagcaagaataccgcctacctccagatgaactccctgagagccgaggacaccgccgtgtactactgcgccagaaacctgtatctgtggggccagggaaccctggtcacagtgtcatctacgcgtagccagcctcacaccaagcccagcgtgttcgtgatgaagaacggcaccaacgtggcctgcctcgtgaaagagttctaccccaaggacatcaggatcaacctggtgtccagcaagaagatcaccgagttcgaccccgccatcgtgatctcccccagcggcaagtacaacgccgtgaagctggggaagtatgaggacagcaacagcgtgacctgctccgtgcagcacgacaacaagaccgtgcacagcaccgactttgaagtgaaaaccgactccaccgaccacgtgaagcccaaagagacagagaacaccaagcagcccagcaagagctgccacaagcccaaggccatcgtgcacaccgagaaagtgaacatgatgagcctgaccgtgatcggcttcagaatcctgctgctgaaagtggccggctttaacctgctgatgaccctgcggctgtggtccagctaa

SEQ ID NO: 37350 - DNA, 1881 bp, synthetic construct
  source 1..1881: mol_type = other DNA
atggccttaccagtgaccgccttgctcctgccgctggccttgctgctccacgccgccaggccggacatccagatgacacagagccctagcagcctgtctgccagcgtgggagacagagtgaccatcacatgcaagagcagccagagcctgctggactccgatggcaagacctacctgaactggtatcagcagaagcccggcaaggcccctaagctgctgatctacctggtgtccaagctggatagcggcgtgcccagcagattttctggcagcggcagcggaaccgacttcaccctgacaatatccagcctccagcctgaggacttcgccacctactactgcttccaaggcacccactttccattcaccttcggccagggcaccaaggtggaaatcaaaagactcgaggacaagcagctggacgccgacgtgtcccccaagcctaccatcttcctgccctctatcgccgagacaaagctccagaaggccggcacctacctgtgcctgctggaaaagttcttcccagatgtgattaagatccactggcaggaaaagaagtccaacaccatcctgggcagccaggaaggcaacaccatgaagaccaacgacacctacatgaagttcagctggctgaccgtgcccgagaagtccctggacaaagaacacagatgcatcgtgcggcacgaaaacaacaagaacggcgtggaccaggaaatcatcttcccacccatcaagaccgatgtgattacaatggaccccaaggacaactgctccaaggacgccaacgataccctgctgctccagctgaccaacaccagcgccaccatcctgtacgagatcctgctgggcaaggccaccctgtacgccgtgctggtgtctgccctggtgctgatggctatggtcaagcggaaggacagccggggaagggccaagcgatctggatctggagcaacaaacttctcactactcaaacaagcaggtgacgtggaggagaatcccgggcctactagtatggactggatttggcgcatccttttccttgtcggcgctgctaccggcgcgcattccttcgaagaagtgcagctggttgaatcaggcggaggactggttcagcctggcggatctctgagactgtcttgtgccgccagcggctacaccttcaccaactactggatgaactgggtccgacaggcccctggcaaaggactggaatgggtcggaatgatcgaccccagcgacagcgagacacactacaaccacatcttcaaggaccgcttcaccatcagcgccgacaccagcaagaataccgcctacctccagatgaactccctgagagccgaggacaccgccgtgtactactgcgccagaaacctgtatctgtggggccagggaaccctggtcacagtgtcatctacgcgtagccagcctcacaccaagcccagcgtgttcgtgatgaagaacggcaccaacgtggcctgcctcgtgaaagagttctaccccaaggacatcaggatcaacctggtgtccagcaagaagatcaccgagttcgaccccgccatcgtgatctcccccagcggcaagtacaacgccgtgaagctggggaagtatgaggacagcaacagcgtgacctgctccgtgcagcacgacaacaagaccgtgcacagcaccgactttgaagtgaaaaccgactccaccgaccacgtgaagcccaaagagacagagaacaccaagcagcccagcaagagctgccacaagcccaaggccatcgtgcacaccgagaaagtgaacatgatgagcctgaccgtgatcggcttcagaatcctgctgctgaaagtggccggctttaacctgctgatgaccctgcggctgtggtccagctaa

SEQ ID NO: 37351 - DNA, 1881 bp, synthetic construct
  source 1..1881: mol_type = other DNA
atggccttaccagtgaccgccttgctcctgccgctggccttgctgctccacgccgccaggccggacatccagatgacacagagccctagcagcctgtctgccagcgtgggagacagagtgaccatcacatgcaagagcagccagagcctgctggactccgatggcaagacctacctgaactggtatcagcagaagcccggcaaggcccctaagctgctgatctacctggtgtccaagctggatagcggcgtgcccagcagattttctggcagcggcagcggaaccgacttcaccctgacaatatccagcctccagcctgaggacttcgccacctactactgcttccaaggcacccactttccattcaccttcggccagggcaccaaggtggaaatcaaaagactcgaggacaagcagctggacgccgacgtgtcccccaagcctaccatcttcctgccctctatcgccgagacaaagctccagaaggccggcacctacctgtgcctgctggaaaagttcttcccagatgtgattaagatccactggcaggaaaagaagtccaacaccatcctgggcagccaggaaggcaacaccatgaagaccaacgacacctacatgaagttcagctggctgaccgtgcccgagaagtccctggacaaagaacacagatgcatcgtgcggcacgaaaacaacaagaacggcgtggaccaggaaatcatcttcccacccatcaagaccgatgtgattacaatggaccccaaggacaactgctccaaggacgccaacgataccctgctgctccagctgaccaacaccagcgcctactacatgtacgagatcctgctgggcaaggccaccctgtacgccgtgctggtgtctgccctggtgctgatggctatggtcaagcggaaggacagccggggaagggccaagcgatctggatctggagcaacaaacttctcactactcaaacaagcaggtgacgtggaggagaatcccgggcctactagtatggactggatttggcgcatccttttccttgtcggcgctgctaccggcgcgcattccttcgaagaagtgcagctggttgaatcaggcggaggactggttcagcctggcggatctctgagactgtcttgtgccgccagcggctacaccttcaccaactactggatgaactgggtccgacaggcccctggcaaaggactggaatgggtcggaatgatcgaccccagcgacagcgagacacactacaaccacatcttcaaggaccgcttcaccatcagcgccgacaccagcaagaataccgcctacctccagatgaactccctgagagccgaggacaccgccgtgtactactgcgccagaaacctgtatctgtggggccagggaaccctggtcacagtgtcatctacgcgtagccagcctcacaccaagcccagcgtgttcgtgatgaagaacggcaccaacgtggcctgcctcgtgaaagagttctaccccaaggacatcaggatcaacctggtgtccagcaagaagatcaccgagttcgaccccgccatcgtgatctcccccagcggcaagtacaacgccgtgaagctggggaagtacgaggacagcaacagcgtgacctgctccgtgcagcacgacaacaagaccgtgcacagcaccgactttgaagtgaaaaccgactccaccgaccacgtgaagcccaaagagacagagaacaccaagcagcccagcaagagctgccacaagcccaaggccatcgtgcacaccgagaaagtgaacatgatgagcctgaccgtgctgggcttcagaatcctgctgctgaaagtggccggctttaacctgctgatgaccctgcggctgtggtccagctaa

SEQ ID NO: 37352 - DNA, 1881 bp, synthetic construct
  source 1..1881: mol_type = other DNA
atggccttaccagtgaccgccttgctcctgccgctggccttgctgctccacgccgccaggccggacatccagatgacacagagccctagcagcctgtctgccagcgtgggagacagagtgaccatcacatgcaagagcagccagagcctgctggactccgatggcaagacctacctgaactggtatcagcagaagcccggcaaggcccctaagctgctgatctacctggtgtccaagctggatagcggcgtgcccagcagattttctggcagcggcagcggaaccgacttcaccctgacaatatccagcctccagcctgaggacttcgccacctactactgcttccaaggcacccactttccattcaccttcggccagggcaccaaggtggaaatcaaaagactcgaggacaagcagctggacgccgacgtgtcccccaagcctaccatcttcctgccctctatcgccgagacaaagctccagaaggccggcacctacctgtgcctgctggaaaagttcttcccagatgtgattaagatccactggcaggaaaagaagtccaacaccatcctgggcagccaggaaggcaacaccatgaagaccaacgacacctacatgaagttcagctggctgaccgtgcccgagaagtccctggacaaagaacacagatgcatcgtgcggcacgaaaacaacaagaacggcgtggaccaggaaatcatcttcccacccatcaagaccgatgtgattacaatggaccccaaggacaactgctccaaggacgccaacgataccctgctgctccagctgaccaacaccagcgccaccatcctgtacgagatcctgctgggcaaggccaccctgtacgccgtgctggtgtctgccctggtgctgatggctatggtcaagcggaaggacagccggggaagggccaagcgatctggatctggagcaacaaacttctcactactcaaacaagcaggtgacgtggaggagaatcccgggcctactagtatggactggatttggcgcatccttttccttgtcggcgctgctaccggcgcgcattccttcgaagaagtgcagctggttgaatcaggcggaggactggttcagcctggcggatctctgagactgtcttgtgccgccagcggctacaccttcaccaactactggatgaactgggtccgacaggcccctggcaaaggactggaatgggtcggaatgatcgaccccagcgacagcgagacacactacaaccacatcttcaaggaccgcttcaccatcagcgccgacaccagcaagaataccgcctacctccagatgaactccctgagagccgaggacaccgccgtgtactactgcgccagaaacctgtatctgtggggccagggaaccctggtcacagtgtcatctacgcgtagccagcctcacaccaagcccagcgtgttcgtgatgaagaacggcaccaacgtggcctgcctcgtgaaagagttctaccccaaggacatcaggatcaacctggtgtccagcaagaagatcaccgagttcgaccccgccatcgtgatctcccccagcggcaagtacaacgccgtgaagctggggaagtacgaggacagcaacagcgtgacctgctccgtgcagcacgacaacaagaccgtgcacagcaccgactttgaagtgaaaaccgactccaccgaccacgtgaagcccaaagagacagagaacaccaagcagcccagcaagagctgccacaagcccaaggccatcgtgcacaccgagaaagtgaacatgatgagcctgaccgtgctgggcttcagaatcctgctgctgaaagtggccggctttaacctgctgatgaccctgcggctgtggtccagctaa

SEQ ID NO: 37353 - DNA, 1863 bp, synthetic construct
  source 1..1863: mol_type = other DNA
atggccttaccagtgaccgccttgctcctgccgctggccttgctgctccacgccgccaggccggacatccagatgacacagagccctagcagcctgtctgccagcgtgggagacagagtgaccatcacatgcaagagcagccagagcctgctggactccgatggcaagacctacctgaactggtatcagcagaagcccggcaaggcccctaagctgctgatctacctggtgtccaagctggatagcggcgtgcccagcagattttctggcagcggcagcggaaccgacttcaccctgacaatatccagcctccagcctgaggacttcgccacctactactgcttccaaggcacccactttccattcaccttcggccagggcaccaaggtggaaatcaaaagactcgaggacctgaagaacgtgttcccacctgaggtggccgtgttcgagcctagcgaggccgagatcagccacacccagaaagccaccctcgtgtgcctggctaccggcttctaccccgaccatgtggaactgtcttggtgggtcaacggcaaagaggtgcacagcggcgtgtgtaccgacccccagccactgaaagaacagcccgccctgaacgacagccggtactgcctgagcagcagactgagagtgtccgccaccttctggcagaacccccggaaccacttcagatgccaggtgcagttctacggcctgagcgagaacgacgagtggacccaggacagagccaagcccgtgacccagatcgtgtctgccgaagcctggggcagagccgattgcggctttaccagcgagagctaccagcagggcgtgctgagcgccaccatcctgtacttgttgctgctgctgaagtccgtggtgtacttcgccatcatcacatgctgcctgctgcggagaaccgccttctgctgcaacggcgagaagtctagggccaagcgatctggatctggagcaacaaacttctcactactcaaacaagcaggtgacgtggaggagaatcccgggcctactagtatggactggatttggcgcatccttttccttgtcggcgctgctaccggcgcgcattccttcgaagaagtgcagctggttgaatcaggcggaggactggttcagcctggcggatctctgagactgtcttgtgccgccagcggctacaccttcaccaactactggatgaactgggtccgacaggcccctggcaaaggactggaatgggtcggaatgatcgaccccagcgacagcgagacacactacaaccacatcttcaaggaccgcttcaccatcagcgccgacaccagcaagaataccgcctacctccagatgaactccctgagagccgaggacaccgccgtgtactactgcgccagaaacctgtatctgtggggccagggaaccctggtcacagtgtcatctacgcgtatccagaaccctgatcctgccgtgtaccagctgcgggatagcaagagcagcgacaagagcgtgtgtctgttcaccgacttcgacagccagaccaacgtgtcccagagcaaggactccgacgtgtacatcaccgataagtgcgtgctggacatgcggagcatggacttcaagagcaactccgccgtggcctggtccaacaagtccgatttcgcctgcgccaacgccttcaacaacagcattatccccgaggacacattcttcccaagccccgagagcagctgcgacgtgaagctggtggaaaagagcttcgagacagacaccaacctgaacttccagaacctgagcgtgatcggcctgcggatgctgttcgccaaaaccgtggccgtgaacttcctgctgaccgccaagctgttcttcctctaa

SEQ ID NO: 37354 - DNA, 1950 bp, synthetic construct
  source 1..1950: mol_type = other DNA
atggccttaccagtgaccgccttgctcctgccgctggccttgctgctccacgccgccaggccggacatccagatgacacagagccctagcagcctgtctgccagcgtgggagacagagtgaccatcacatgcaagagcagccagagcctgctggactccgatggcaagacctacctgaactggtatcagcagaagcccggcaaggcccctaagctgctgatctacctggtgtccaagctggatagcggcgtgcccagcagattttctggcagcggcagcggaaccgacttcaccctgacaatatccagcctccagcctgaggacttcgccacctactactgcttccaaggcacccactttccattcaccttcggccagggcaccaaggtggaaatcaaaagactcgaggacctgaagaacgtgttcccacctgaggtggccgtgttcgagcctagcgaggccgagatcagccacacccagaaagccaccctcgtgtgcctggctaccggcttctaccccgaccatgtggaactgtcttggtgggtcaacggcaaagaggtgcacagcggcgtgtctaccgacccccagccactgaaagaacagcccgccctgaacgacagccggtactgcctgagcagcagactgagagtgtccgccaccttctggcagaacccccggaaccacttcagatgccaggtgcagttctacggcctgagcgagaacgacgagtggacccaggacagagccaagcccgtgacccagatcgtgtctgccgaagcctggggcagagccgattgcggatcctccaaggacgccaacgataccctgctgctccagctgaccaacaccagcgcctactacatgtacttgttgctgctgctgaagtccgtggtgtacttcgccatcatcacatgctgcctgctgcggagaaccgccttctgctgcaacggcgagaagtctagggccaagcgatctggatctggagcaacaaacttctcactactcaaacaagcaggtgacgtggaggagaatcccgggcctactagtatggactggatttggcgcatccttttccttgtcggcgctgctaccggcgcgcattccttcgaagaagtgcagctggttgaatcaggcggaggactggttcagcctggcggatctctgagactgtcttgtgccgccagcggctacaccttcaccaactactggatgaactgggtccgacaggcccctggcaaaggactggaatgggtcggaatgatcgaccccagcgacagcgagacacactacaaccacatcttcaaggaccgcttcaccatcagcgccgacaccagcaagaataccgcctacctccagatgaactccctgagagccgaggacaccgccgtgtactactgcgccagaaacctgtatctgtggggccagggaaccctggtcacagtgtcatctacgcgtatccagaaccctgatcctgccgtgtaccagctgcgggatagcaagagcagcgacaagagcgtgtgtctgttcaccgacttcgacagccagaccaacgtgtcccagagcaaggactccgacgtgtacatcaccgataagaccgtgctggacatgcggagcatggacttcaagagcaactccgccgtggcctggtccaacaagtccgatttcgcctgcgccaacgccttcaacaacagcattatccccgaggacacattcttcccaagccccgagagcagctgcggtaccgaagtgaaaaccgactccaccgaccacgtgaagcccaaagagacagagaacaccaagcagcccagcaagagctgccacaagcccaaggccatcgtgcacaccgagaaagtgaacatgatgagcctgaccgtgctgggcctgcggatgctgttcgccaaaaccgtggccgtgaacttcctgctgaccgccaagctgttcttcctctaa

SEQ ID NO: 37355 - DNA, 1860 bp, synthetic construct
  source 1..1860: mol_type = other DNA
atggccttaccagtgaccgccttgctcctgccgctggccttgctgctccacgccgccaggccggacatccagatgacacagagccctagcagcctgtctgccagcgtgggagacagagtgaccatcacatgcaagagcagccagagcctgctggactccgatggcaagacctacctgaactggtatcagcagaagcccggcaaggcccctaagctgctgatctacctggtgtccaagctggatagcggcgtgcccagcagattttctggcagcggcagcggaaccgacttcaccctgacaatatccagcctccagcctgaggacttcgccacctactactgcttccaaggcacccactttccattcaccttcggccagggcaccaaggtggaaatcaaaagactcgaggacctgaagaacgtgttcccacctgaggtggccgtgttcgagcctagcgaggccgagatcagccacacccagaaagccaccctcgtgtgcctggctaccggcttctaccccgaccatgtggaactgtcttggtgggtcaacggcaaagaggtgcacagcggcgtgtgtaccgacccccagccactgaaagaacagcccgccctgaacgacagccggtactgcctgagcagcagactgagagtgtccgccaccttctggcagaacccccggaaccacttcagatgccaggtgcagttctacggcctgagcgagaacgacgagtggacccaggacagagccaagcccgtgacccagatcgtgtctgccgaagcctggggcagagccgattgcgacgtgaagctggtggaaaagagcttcgagacagacaccaacctgaacttccagaacctgagcgtgatcggcttcagaatcctgctgctgaaagtggccggctttaacctgctgatgaccctgcggctgtggtccagcagggccaagcgatctggatctggagcaacaaacttctcactactcaaacaagcaggtgacgtggaggagaatcccgggcctactagtatggactggatttggcgcatccttttccttgtcggcgctgctaccggcgcgcattccttcgaagaagtgcagctggttgaatcaggcggaggactggttcagcctggcggatctctgagactgtcttgtgccgccagcggctacaccttcaccaactactggatgaactgggtccgacaggcccctggcaaaggactggaatgggtcggaatgatcgaccccagcgacagcgagacacactacaaccacatcttcaaggaccgcttcaccatcagcgccgacaccagcaagaataccgcctacctccagatgaactccctgagagccgaggacaccgccgtgtactactgcgccagaaacctgtatctgtggggccagggaaccctggtcacagtgtcatctacgcgtatccagaaccctgatcctgccgtgtaccagctgcgggatagcaagagcagcgacaagagcgtgtgtctgttcaccgacttcgacagccagaccaacgtgtcccagagcaaggactccgacgtgtacatcaccgataagtgcgtgctggacatgcggagcatggacttcaagagcaactccgccgtggcctggtccaacaagtccgatttcgcctgcgccaacgccttcaacaacagcattatccccgaggacacattcttcccaagccccgagagcagctgcggctttaccagcgagagctaccagcagggcgtgctgagcgccaccatcctgtacgagatcctgctgggcaaggccaccctgtacgccgtgctggtgtctgccctggtgctgatggctatggtcaagcggaaggacagccggggataa

SEQ ID NO: 37356 - DNA, 1860 bp, synthetic construct
  source 1..1860: mol_type = other DNA
atggccttaccagtgaccgccttgctcctgccgctggccttgctgctccacgccgccaggccggacatccagatgacacagagccctagcagcctgtctgccagcgtgggagacagagtgaccatcacatgcaagagcagccagagcctgctggactccgatggcaagacctacctgaactggtatcagcagaagcccggcaaggcccctaagctgctgatctacctggtgtccaagctggatagcggcgtgcccagcagattttctggcagcggcagcggaaccgacttcaccctgacaatatccagcctccagcctgaggacttcgccacctactactgcttccaaggcacccactttccattcaccttcggccagggcaccaaggtggaaatcaaaagactcgaggacctgaagaacgtgttcccacctgaggtggccgtgttcgagcctagcgaggccgagatcagccacacccagaaagccaccctcgtgtgcctggctaccggcttctaccccgaccatgtggaactgtcttggtgggtcaacggcaaagaggtgcacagcggcgtgtgtaccgacccccagccactgaaagaacagcccgccctgaacgacagccggtactgcctgagcagcagactgagagtgtccgccaccttctggcagaacccccggaaccacttcagatgccaggtgcagttctacggcctgagcgagaacgacgagtggacccaggacagagccaagcccgtgacccagatcgtgtctgccgaagcctggggcagagccgattgcggctttaccagcgagagctaccagcagggcgtgctgagcgccaccaacctgagcgtgatcggcttcagaatcctgctgctgaaagtggccggctttaacctgctgatgaccctgcggctgtggtccagcagggccaagcgatctggatctggagcaacaaacttctcactactcaaacaagcaggtgacgtggaggagaatcccgggcctactagtatggactggatttggcgcatccttttccttgtcggcgctgctaccggcgcgcattccttcgaagaagtgcagctggttgaatcaggcggaggactggttcagcctggcggatctctgagactgtcttgtgccgccagcggctacaccttcaccaactactggatgaactgggtccgacaggcccctggcaaaggactggaatgggtcggaatgatcgaccccagcgacagcgagacacactacaaccacatcttcaaggaccgcttcaccatcagcgccgacaccagcaagaataccgcctacctccagatgaactccctgagagccgaggacaccgccgtgtactactgcgccagaaacctgtatctgtggggccagggaaccctggtcacagtgtcatctacgcgtatccagaaccctgatcctgccgtgtaccagctgcgggatagcaagagcagcgacaagagcgtgtgtctgttcaccgacttcgacagccagaccaacgtgtcccagagcaaggactccgacgtgtacatcaccgataagtgcgtgctggacatgcggagcatggacttcaagagcaactccgccgtggcctggtccaacaagtccgatttcgcctgcgccaacgccttcaacaacagcattatccccgaggacacattcttcccaagccccgagagcagctgcgacgtgaagctggtggaaaagagcttcgagacagacaccaacctgaacttccagatcctgtacgagatcctgctgggcaaggccaccctgtacgccgtgctggtgtctgccctggtgctgatggctatggtcaagcggaaggacagccggggataa

SEQ ID NO: 37357 - DNA, 1860 bp, synthetic construct; identical to SEQ ID NO: 37355
  source 1..1860: mol_type = other DNA

SEQ ID NO: 37358 - DNA, 1860 bp, synthetic construct; identical to SEQ ID NO: 37356
  source 1..1860: mol_type = other DNA

SEQ ID NO: 37359 - DNA, 1857 bp, synthetic construct
  source 1..1857: mol_type = other DNA
atggccttaccagtgaccgccttgctcctgccgctggccttgctgctccacgccgccaggccggacatccagatgacacagagccctagcagcctgtctgccagcgtgggagacagagtgaccatcacatgcaagagcagccagagcctgctggactccgatggcaagacctacctgaactggtatcagcagaagcccggcaaggcccctaagctgctgatctacctggtgtccaagctggatagcggcgtgcccagcagattttctggcagcggcagcggaaccgacttcaccctgacaatatccagcctccagcctgaggacttcgccacctactactgcttccaaggcacccactttccattcaccttcggccagggcaccaaggtggaaatcaaaagactcgaggacctgaagaacgtgttcccacctgaggtggccgtgttcgagcctagcgaggccgagatcagccacacccagaaagccaccctcgtgtgcctggctaccggcttctaccccgaccatgtggaactgtcttggtgggtcaacggcaaagaggtgcacagcggcgtgtgtaccgacccccagccactgaaagaacagcccgccctgaacgacagccggtactgcctgagcagcagactgagagtgtccgccaccttctggcagaacccccggaaccacttcagatgccaggtgcagttctacggcctgagcgagaacgacgagtggacccaggacagagccaagcccgtgacccagatcgtgtctgccgaagcctggggcagagccgattgcgacgtgaagctggtggaaaagagcttcgagacagacaccaacctgaacttccagaacctgagcgtgatcggcttcagaatcctgctgctgaaagtggccggctttaacctgctgatgaccctgcggctgtggtccagcagggccaagcgatctggatctggagcaacaaacttctcactactcaaacaagcaggtgacgtggaggagaatcccgggcctactagtatggactggatttggcgcatccttttccttgtcggcgctgctaccggcgcgcattccttcgaagaagtgcagctggttgaatcaggcggaggactggttcagcctggcggatctctgagactgtcttgtgccgccagcggctacaccttcaccaactactggatgaactgggtccgacaggcccctggcaaaggactggaatgggtcggaatgatcgaccccagcgacagcgagacacactacaaccacatcttcaaggaccgcttcaccatcagcgccgacaccagcaagaataccgcctacctccagatgaactccctgagagccgaggacaccgccgtgtactactgcgccagaaacctgtatctgtggggccagggaaccctggtcacagtgtcatctacgcgtatccagaaccctgatcctgccgtgtaccagctgcgggatagcaagagcagcgacaagagcgtgtgtctgttcaccgacttcgacagccagaccaacgtgtcccagagcaaggactccgacgtgtacatcaccgataagtgcgtgctggacatgcggagcatggacttcaagagcaactccgccgtggcctggtccaacaagtccgatttcgcctgcgccaacgccttcaacaacagcattatccccgaggacacattcttcccaagccccgagagcagctgcggctttaccagcgagagctaccagcagggcgtgctgagcgccaccatcctgtacgagatcctgctgggcaaggccaccctgtacgccgtgctggtgtctgccctggtgctgatggctatggtcaagcggaaggacagccgggga

SEQ ID NO: 37360 - DNA, 1869 bp, synthetic construct
  source 1..1869: mol_type = other DNA
atggccttaccagtgaccgccttgctcctgccgctggccttgctgctccacgccgccaggccggacatccagatgacacagagccctagcagcctgtctgccagcgtgggagacagagtgaccatcacatgcaagagcagccagagcctgctggactccgatggcaagacctacctgaactggtatcagcagaagcccggcaaggcccctaagctgctgatctacctggtgtccaagctggatagcggcgtgcccagcagattttctggcagcggcagcggaaccgacttcaccctgacaatatccagcctccagcctgaggacttcgccacctactactgcttccaaggcacccactttccattcaccttcggccagggcaccaaggtggaaatcaaaagactcgaggccgacgtgtcccccaagcctaccatcttcctgccctctatcgccgagacaaagctccagaaggccggcacctacctgtgcctgctggaaaagttcttcccagatgtgattaagatccactggcaggaaaagaagtccaacaccatcctgggcagccaggaaggcaacaccatgaagaccaacgacacctacatgaagttcagctggctgaccgtgcccgagaagtccctggacaaagaacacagatgcatcgtgcggcacgaaaacaacaagaacggcgtggaccaggaaatcatcttcccacccatcaagaccgatgtgattacaatggaccccaaggacaactgctccaaggacgccaacgataccctgctgctccagctgaccaacaccagcgcctactacatgtacttgttgctgctgctgaagtccgtggtgtacttcgccatcatcacatgctgcctgctgcggagaaccgccttctgctgcaacggcgagaagtctagggccaagcgatctggatctggagcaacaaacttctcactactcaaacaagcaggtgacgtggaggagaatcccgggcctactagtatggactggatttggcgcatccttttccttgtcggcgctgctaccggcgcgcattccttcgaagaagtgcagctggttgaatcaggcggaggactggttcagcctggcggatctctgagactgtcttgtgccgccagcggctacaccttcaccaactactggatgaactgggtccgacaggcccctggcaaaggactggaatgggtcggaatgatcgaccccagcgacagcgagacacactacaaccacatcttcaaggaccgcttcaccatcagcgccgacaccagcaagaataccgcctacctccagatgaactccctgagagccgaggacaccgccgtgtactactgcgccagaaacctgtatctgtggggccagggaaccctggtcacagtgtcatctacgcgtagccagcctcacaccaagcccagcgtgttcgtgatgaagaacggcaccaacgtggcctgcctcgtgaaagagttctaccccaaggacatcaggatcaacctggtgtccagcaagaagatcaccgagttcgaccccgccatcgtgatctcccccagcggcaagtacaacgccgtgaagctggggaagtatgaggacagcaacagcgtgacctgctccgtgcagcacgacaacaagaccgtgcacagcaccgactttgaagtgaaaaccgactccaccgaccacgtgaagcccaaagagacagagaacaccaagcagcccagcaagagctgccacaagcccaaggccatcgtgcacaccgagaaagtgaacatgatgagcctgaccgtgatcggcttcagaatcctgctgctgaaagtggccggctttaacctgctgatgaccctgcggctgtggtccagctaa

SEQ ID NO: 37361 - DNA, 1869 bp, synthetic construct
  source 1..1869: mol_type = other DNA
atggccttaccagtgaccgccttgctcctgccgctggccttgctgctccacgccgccaggccggacatccagatgacacagagccctagcagcctgtctgccagcgtgggagacagagtgaccatcacatgcaagagcagccagagcctgctggactccgatggcaagacctacctgaactggtatcagcagaagcccggcaaggcccctaagctgctgatctacctggtgtccaagctggatagcggcgtgcccagcagattttctggcagcggcagcggaaccgacttcaccctgacaatatccagcctccagcctgaggacttcgccacctactactgcttccaaggcacccactttccattcaccttcggccagggcaccaaggtggaaatcaaaagactcgaggccgacgtgtcccccaagcctaccatcttcctgccctctatcgccgagacaaagctccagaaggccggcacctacctgtgcctgctggaaaagttcttcccagatgtgattaagatccactggcaggaaaagaagtccaacaccatcctgggcagccaggaaggcaacaccatgaagaccaacgacacctacatgaagttcagctggctgaccgtgcccgagaagtccctggacaaagaacacagatgcatcgtgcggcacgaaaacaacaagaacggcgtggaccaggaaatcatcttcccacccatcaagaccgatgtgattacaatggaccccaaggacaactgctccaaggacgccaacgataccctgctgctccagctgaccaacaccagcgcctactacatgtacttgttgctgctgctgaagtccgtggtgtacttcgccatcatcacatgctgcctgctgcggagaaccgccttctgctgcaacggcgagaagtctagggccaagcgatctggatctggagcaacaaacttctcactactcaaacaagcaggtgacgtggaggagaatcccgggcctactagtatggactggatttggcgcatccttttccttgtcggcgctgctaccggcgcgcattccttcgaagaagtgcagctggttgaatcaggcggaggactggttcagcctggcggatctctgagactgtcttgtgccgccagcggctacaccttcaccaactactggatgaactgggtccgacaggcccctggcaaaggactggaatgggtcggaatgatcgaccccagcgacagcgagacacactacaaccacatcttcaaggaccgcttcaccatcagcgccgacaccagcaagaataccgcctacctccagatgaactccctgagagccgaggacaccgccgtgtactactgcgccagaaacctgtatctgtggggccagggaaccctggtcacagtgtcatctacgcgtagccagcctcacaccaagcccagcgtgttcgtgatgaagaacggcaccaacgtggcctgcctcgtgaaagagttctaccccaaggacatcaggatcaacctggtgtccagcaagaagatcaccgagttcgaccccgccatcgtgatctcccccagcggcaagtacaacgccgtgaagctggggaagtacgaggacagcaacagcgtgacctgctccgtgcagcacgacaacaagaccgtgcacagcaccgactttgaagtgaaaaccgactccaccgaccacgtgaagcccaaagagacagagaacaccaagcagcccagcaagagctgccacaagcccaaggccatcgtgcacaccgagaaagtgaacatgatgagcctgaccgtgctgggcttcagaatcctgctgctgaaagtggccggctttaacctgctgatgaccctgcggctgtggtccagctaa

SEQ ID NO: 37362 - DNA, 1857 bp, synthetic construct; identical to SEQ ID NO: 37359
  source 1..1857: mol_type = other DNA

SEQ ID NO: 37363 - DNA, 1869 bp, synthetic construct
  source 1..1869: mol_type = other DNA
atggccttaccagtgaccgccttgctcctgccgctggccttgctgctccacgccgccaggccggacatccagatgacacagagccctagcagcctgtctgccagcgtgggagacagagtgaccatcacatgcaagagcagccagagcctgctggactccgatggcaagacctacctgaactggtatcagcagaagcccggcaaggcccctaagctgctgatctacctggtgtccaagctggatagcggcgtgcccagcagattttctggcagcggcagcggaaccgacttcaccctgacaatatccagcctccagcctgaggacttcgccacctactactgcttccaaggcacccactttccattcaccttcggccagggcaccaaggtggaaatcaaaagactcgagatccagaaccctgatcctgccgtgtaccagctgcgggatagcaagagcagcgacaagagcgtgtgtctgttcaccgacttcgacagccagaccaacgtgtcccagagcaaggactccgacgtgtacatcaccgataagtgcgtgctggacatgcggagcatggacttcaagagcaactccgccgtggcctggtccaacaagtccgatttcgcctgcgccaacgccttcaacaacagcattatccccgaggacacattcttcccaagccccgagagcagctgcggctttaccagcgagagctaccagcagggcgtgctgagcgccaccatcctgtacgagatcctgctgggcaaggccaccctgtacgccgtgctggtgtctgccctggtgctgatggctatggtcaagcggaaggacagccggggacgcgccaagagaagcggatctggcgtgaagcagaccctgaatttcgacctgctgaagctggctggcgacgtggaatccaacccaggccctactagtatggactggatttggcgcatccttttccttgtcggcgctgctaccggcgcgcattccttcgaagaagtgcagctggttgaatcaggcggaggactggttcagcctggcggatctctgagactgtcttgtgccgccagcggctacaccttcaccaactactggatgaactgggtccgacaggcccctggcaaaggactggaatgggtcggaatgatcgaccccagcgacagcgagacacactacaaccacatcttcaaggaccgcttcaccatcagcgccgacaccagcaagaataccgcctacctccagatgaactccctgagagccgaggacaccgccgtgtactactgcgccagaaacctgtatctgtggggccagggaaccctggtcacagtgtcatctacgcgtgaggacctgaagaacgtgttcccacctgaggtggccgtgttcgagcctagcgaggccgagatcagccacacccagaaagccaccctcgtgtgcctggctaccggcttctaccccgaccatgtggaactgtcttggtgggtcaacggcaaagaggtgcacagcggcgtgtgtaccgacccccagccactgaaagaacagcccgccctgaacgacagccggtactgcctgagcagcagactgagagtgtccgccaccttctggcagaacccccggaaccacttcagatgccaggtgcagttctacggcctgagcgagaacgacgagtggacccaggacagagccaagcccgtgacccagatcgtgtctgccgaagcctggggcagagccgattgcgacgtgaagctggtggaaaagagcttcgagacagacaccaacctgaacttccagaacctgagcgtgatcggcttcagaatcctgctgctgaaagtggccggctttaacctgctgatgaccctgcggctgtggtccagc

SEQ ID NO: 37364 - DNA, 2262 bp, synthetic construct
  source 1..2262: mol_type = other DNA
atggccttaccagtgaccgccttgctcctgccgctggccttgctgctccacgccgccaggccggaagtgcagctggttgaatctggcggaggactggttcagcctggcggatctctgagactgtcttgtgccgccagcggcttcagcttcagcgacttttggatgagctgggtccgacaggcccctggcaaaggacttgaatgggtcgccacaatcagccaggccggcagcgagaaggactacgtggactctgtgaagggcagattcaccatcagccgggacaacgccaagaagtccctgtacctccagatgaacagcctgagagccgaggacaccgccgtgtactattgtgcctctggcgtgtacagcttcgactacagaggccagggcaccctggtcacagtctcttctggtaccggcggaggcggatctggcggcggaggtagcggtggcggaggatctgaattcgacatccagatgacacagagccctagcagcctgtctgccagcgtgggagacagagtgaccatcacatgcaagagcagccagagcctgctggactccgatggcaagacctacctgaactggtatcagcagaagcccggcaaggcccctaagctgctgatctacctggtgtccaagctggatagcggcgtgcccagcagattttctggcagcggcagcggaaccgacttcaccctgacaatatccagcctccagcctgaggacttcgccacctactactgcttccaaggcacccactttccattcaccttcggccagggcaccaaggtggaaatcaaaagactcgaggacctgaagaacgtgttcccacctgaggtggccgtgttcgagcctagcgaggccgagatcagccacacccagaaagccaccctcgtgtgcctggctaccggcttctaccccgaccatgtggaactgtcttggtgggtcaacggcaaagaggtgcacagcggcgtgtgtaccgacccccagccactgaaagaacagcccgccctgaacgacagccggtactgcctgagcagcagactgagagtgtccgccaccttctggcagaacccccggaaccacttcagatgccaggtgcagttctacggcctgagcgagaacgacgagtggacccaggacagagccaagcccgtgacccagatcgtgtctgccgaagcctggggcagagccgattgcgacgtgaagctggtggaaaagagcttcgagacagacaccaacctgaacttccagaacctgagcgtgatcggcttcagaatcctgctgctgaaagtggccggctttaacctgctgatgaccctgcggctgtggtccagcagggccaagcgatctggatctggagcaacaaacttctcactactcaaacaagcaggtgacgtggaggagaatcccgggcctactagtatggactggatttggcgcatccttttccttgtcggcgctgctaccggcgcgcattccttcgaagaagtgcagctggttgaatcaggcggaggactggttcagcctggcggatctctgagactgtcttgtgccgccagcggctacaccttcaccaactactggatgaactgggtccgacaggcccctggcaaaggactggaatgggtcggaatgatcgaccccagcgacagcgagacacactacaaccacatcttcaaggaccgcttcaccatcagcgccgacaccagcaagaataccgcctacctccagatgaactccctgagagccgaggacaccgccgtgtactactgcgccagaaacctgtatctgtggggccagggaaccctggtcacagtgtcatctacgcgtatccagaaccctgatcctgccgtgtaccagctgcgggatagcaagagcagcgacaagagcgtgtgtctgttcaccgacttcgacagccagaccaacgtgtcccagagcaaggactccgacgtgtacatcaccgataagtgcgtgctggacatgcggagcatggacttcaagagcaactccgccgtggcctggtccaacaagtccgatttcgcctgcgccaacgccttcaacaacagcattatccccgaggacacattcttcccaagccccgagagcagctgcggctttaccagcgagagctaccagcagggcgtgctgagcgccaccatcctgtacgagatcctgctgggcaaggccaccctgtacgccgtgctggtgtctgccctggtgctgatggctatggtcaagcggaaggacagccgggga

SEQ ID NO: 37365 - DNA, 2274 bp, synthetic construct
  source 1..2274: mol_type = other DNA
atggccttaccagtgaccgccttgctcctgccgctggccttgctgctccacgccgccaggccggaagtgcagctggttgaatctggcggaggactggttcagcctggcggatctctgagactgtcttgtgccgccagcggcttcagcttcagcgacttttggatgagctgggtccgacaggcccctggcaaaggacttgaatgggtcgccacaatcagccaggccggcagcgagaaggactacgtggactctgtgaagggcagattcaccatcagccgggacaacgccaagaagtccctgtacctccagatgaacagcctgagagccgaggacaccgccgtgtactattgtgcctctggcgtgtacagcttcgactacagaggccagggcaccctggtcacagtctcttctggtaccggcggaggcggatctggcggcggaggtagcggtggcggaggatctgaattcgacatccagatgacacagagccctagcagcctgtctgccagcgtgggagacagagtgaccatcacatgcaagagcagccagagcctgctggactccgatggcaagacctacctgaactggtatcagcagaagcccggcaaggcccctaagctgctgatctacctggtgtccaagctggatagcggcgtgcccagcagattttctggcagcggcagcggaaccgacttcaccctgacaatatccagcctccagcctgaggacttcgccacctactactgcttccaaggcacccactttccattcaccttcggccagggcaccaaggtggaaatcaaaagactcgagatccagaaccctgatcctgccgtgtaccagctgcgggatagcaagagcagcgacaagagcgtgtgtctgttcaccgacttcgacagccagaccaacgtgtcccagagcaaggactccgacgtgtacatcaccgataagtgcgtgctggacatgcggagcatggacttcaagagcaactccgccgtggcctggtccaacaagtccgatttcgcctgcgccaacgccttcaacaacagcattatccccgaggacacattcttcccaagccccgagagcagctgcggctttaccagcgagagctaccagcagggcgtgctgagcgccaccatcctgtacgagatcctgctgggcaaggccaccctgtacgccgtgctggtgtctgccctggtgctgatggctatggtcaagcggaaggacagccggggacgcgccaagagaagcggatctggcgtgaagcagaccctgaatttcgacctgctgaagctggctggcgacgtggaatccaacccaggccctactagtatggactggatttggcgcatccttttccttgtcggcgctgctaccggcgcgcattccttcgaagaagtgcagctggttgaatcaggcggaggactggttcagcctggcggatctctgagactgtcttgtgccgccagcggctacaccttcaccaactactggatgaactgggtccgacaggcccctggcaaaggactggaatgggtcggaatgatcgaccccagcgacagcgagacacactacaaccacatcttcaaggaccgcttcaccatcagcgccgacaccagcaagaataccgcctacctccagatgaactccctgagagccgaggacaccgccgtgtactactgcgccagaaacctgtatctgtggggccagggaaccctggtcacagtgtcatctacgcgtgaggacctgaagaacgtgttcccacctgaggtggccgtgttcgagcctagcgaggccgagatcagccacacccagaaagccaccctcgtgtgcctggctaccggcttctaccccgaccatgtggaactgtcttggtgggtcaacggcaaagaggtgcacagcggcgtgtgtaccgacccccagccactgaaagaacagcccgccctgaacgacagccggtactgcctgagcagcagactgagagtgtccgccaccttctggcagaacccccggaaccacttcagatgccaggtgcagttctacggcctgagcgagaacgacgagtggacccaggacagagccaagcccgtgacccagatcgtgtctgccgaagcctggggcagagccgattgcgacgtgaagctggtggaaaagagcttcgagacagacaccaacctgaacttccagaacctgagcgtgatcggcttcagaatcctgctgctgaaagtggccggctttaacctgctgatgaccctgcggctgtggtccagc

SEQ ID NO: 37366 - DNA, 2673 bp, synthetic construct
  source 1..2673: mol_type = other DNA
atggccttaccagtgaccgccttgctcctgccgctggccttgctgctccacgccgccaggccggaagtgcagctggttgaatctggcggaggactggttcagcctggcggatctctgagactgtcttgtgccgccagcggcttcagcttcagcgacttttggatgagctgggtccgacaggcccctggcaaaggacttgaatgggtcgccacaatcagccaggccggcagcgagaaggactacgtggactctgtgaagggcagattcaccatcagccgggacaacgccaagaagtccctgtacctccagatgaacagcctgagagccgaggacaccgccgtgtactattgtgcctctggcgtgtacagcttcgactacagaggccagggcaccctggtcacagtctcttctggtaccggcggaggcggatctggcggcggaggtagcggtggcggaggatctgaattcgacatccagatgacacagagccctagcagcctgtctgccagcgtgggagacagagtgaccatcacatgcaagagcagccagagcctgctggactccgatggcaagacctacctgaactggtatcagcagaagcccggcaaggcccctaagctgctgatctacctggtgtccaagctggatagcggcgtgcccagcagattttctggcagcggcagcggaaccgacttcaccctgacaatatccagcctccagcctgaggacttcgccacctactactgcttccaaggcacccactttccattcaccttcggccagggcaccaaggtggaaatcaaaagactcgaggacctgaagaacgtgttcccacctgaggtggccgtgttcgagcctagcgaggccgagatcagccacacccagaaagccaccctcgtgtgcctggctaccggcttctaccccgaccatgtggaactgtcttggtgggtcaacggcaaagaggtgcacagcggcgtgtgtaccgacccccagccactgaaagaacagcccgccctgaacgacagccggtactgcctgagcagcagactgagagtgtccgccaccttctggcagaacccccggaaccacttcagatgccaggtgcagttctacggcctgagcgagaacgacgagtggacccaggacagagccaagcccgtgacccagatcgtgtctgccgaagcctggggcagagccgattgcgacgtgaagctggtggaaaagagcttcgagacagacaccaacctgaacttccagaacctgagcgtgatcggcttcagaatcctgctgctgaaagtggccggctttaacctgctgatgaccctgcggctgtggtccagcagggccaagcgatctggatctggagcaacaaacttctcactactcaaacaagcaggtgacgtggaggagaatcccgggcctactagtatggactggatttggcgcatccttttccttgtcggcgctgctaccggcgcgcattccgggccccagctccagctgcaagagtctggacctggcctggtcaagcctagcgagacactgagcctgacctgtaccgtgtccggcgatagcatcagcagcggcgattactactggggctggatcagacagcctcctggcaaaggactggaatggatcggccacatctactacagcggcgtgacctactacaaccccagcctgaagtccagagtgaccatcagcgtggacaccagccggaaccagttctccctgaagctgtctagcgtgacagccgccgataccgccgtgtactactgcaccagagaggacagcagcaactggcggagtagaggccagggaacactggtcacagttagctctggatccggcggaggcggaagtggaggcggaggatctggcggcggaggctctttcgaagaagtgcagctggttgaatcaggcggaggactggttcagcctggcggatctctgagactgtcttgtgccgccagcggctacaccttcaccaactactggatgaactgggtccgacaggcccctggcaaaggactggaatgggtcggaatgatcgaccccagcgacagcgagacacactacaaccacatcttcaaggaccgcttcaccatcagcgccgacaccagcaagaataccgcctacctccagatgaactccctgagagccgaggacaccgccgtgtactactgcgccagaaacctgtatctgtggggccagggaaccctggtcacagtgtcatctacgcgtatccagaaccctgatcctgccgtgtaccagctgcgggatagcaagagcagcgacaagagcgtgtgtctgttcaccgacttcgacagccagaccaacgtgtcccagagcaaggactccgacgtgtacatcaccgataagtgcgtgctggacatgcggagcatggacttcaagagcaactccgccgtggcctggtccaacaagtccgatttcgcctgcgccaacgccttcaacaacagcattatccccgaggacacattcttcccaagccccgagagcagctgcggctttaccagcgagagctaccagcagggcgtgctgagcgccaccatcctgtacgagatcctgctgggcaaggccaccctgtacgccgtgctggtgtctgccctggtgctgatggctatggtcaagcggaaggacagccgggga

SEQ ID NO: 37367 - DNA, 2685 bp, synthetic construct
  source 1..2685: mol_type = other DNA
atggccttaccagtgaccgccttgctcctgccgctggccttgctgctccacgccgccaggccggaagtgcagctggttgaatctggcggaggactggttcagcctggcggatctctgagactgtcttgtgccgccagcggcttcagcttcagcgacttttggatgagctgggtccgacaggcccctggcaaaggacttgaatgggtcgccacaatcagccaggccggcagcgagaaggactacgtggactctgtgaagggcagattcaccatcagccgggacaacgccaagaagtccctgtacctccagatgaacagcctgagagccgaggacaccgccgtgtactattgtgcctctggcgtgtacagcttcgactacagaggccagggcaccctggtcacagtctcttctggtaccggcggaggcggatctggcggcggaggtagcggtggcggaggatctgaattcgacatccagatgacacagagccctagcagcctgtctgccagcgtgggagacagagtgaccatcacatgcaagagcagccagagcctgctggactccgatggcaagacctacctgaactggtatcagcagaagcccggcaaggcccctaagctgctgatctacctggtgtccaagctggatagcggcgtgcccagcagattttctggcagcggcagcggaaccgacttcaccctgacaatatccagcctccagcctgaggacttcgccacctactactgcttccaaggcacccactttccattcaccttcggccagggcaccaaggtggaaatcaaaagactcgagatccagaaccctgatcctgccgtgtaccagctgcgggatagcaagagcagcgacaagagcgtgtgtctgttcaccgacttcgacagccagaccaacgtgtcccagagcaaggactccgacgtgtacatcaccgataagtgcgtgctggacatgcggagcatggacttcaagagcaactccgccgtggcctggtccaacaagtccgatttcgcctgcgccaacgccttcaacaacagcattatccccgaggacacattcttcccaagccccgagagcagctgcggctttaccagcgagagctaccagcagggcgtgctgagcgccaccatcctgtacgagatcctgctgggcaaggccaccctgtacgccgtgctggtgtctgccctggtgctgatggctatggtcaagcggaaggacagccggggacgcgccaagagaagcggatctggcgtgaagcagaccctgaatttcgacctgctgaagctggctggcgacgtggaatccaacccaggccctactagtatggactggatttggcgcatccttttccttgtcggcgctgctaccggcgcgcattccgggccccagctccagctgcaagagtctggacctggcctggtcaagcctagcgagacactgagcctgacctgtaccgtgtccggcgatagcatcagcagcggcgattactactggggctggatcagacagcctcctggcaaaggactggaatggatcggccacatctactacagcggcgtgacctactacaaccccagcctgaagtccagagtgaccatcagcgtggacaccagccggaaccagttctccctgaagctgtctagcgtgacagccgccgataccgccgtgtactactgcaccagagaggacagcagcaactggcggagtagaggccagggaacactggtcacagttagctctggatccggcggaggcggaagtggaggcggaggatctggcggcggaggctctttcgaagaagtgcagctggttgaatcaggcggaggactggttcagcctggcggatctctgagactgtcttgtgccgccagcggctacaccttcaccaactactggatgaactgggtccgacaggcccctggcaaaggactggaatgggtcggaatgatcgaccccagcgacagcgagacacactacaaccacatcttcaaggaccgcttcaccatcagcgccgacaccagcaagaataccgcctacctccagatgaactccctgagagccgaggacaccgccgtgtactactgcgccagaaacctgtatctgtggggccagggaaccctggtcacagtgtcatctacgcgtgaggacctgaagaacgtgttcccacctgaggtggccgtgttcgagcctagcgaggccgagatcagccacacccagaaagccaccctcgtgtgcctggctaccggcttctaccccgaccatgtggaactgtcttggtgggtcaacggcaaagaggtgcacagcggcgtgtgtaccgacccccagccactgaaagaacagcccgccctgaacgacagccggtactgcctgagcagcagactgagagtgtccgccaccttctggcagaacccccggaaccacttcagatgccaggtgcagttctacggcctgagcgagaacgacgagtggacccaggacagagccaagcccgtgacccagatcgtgtctgccgaagcctggggcagagccgattgcgacgtgaagctggtggaaaagagcttcgagacagacaccaacctgaacttccagaacctgagcgtgatcggcttcagaatcctgctgctgaaagtggccggctttaacctgctgatgaccctgcggctgtggtccagc

SEQ ID NO: 37368 - DNA, 2067 bp, synthetic construct
  source 1..2067: mol_type = other DNA
atggccttaccagtgaccgccttgctcctgccgctggccttgctgctccacgccgccaggccggacatccagatgacacagagccctagcagcctgtctgccagcgtgggagacagagtgaccatcacatgcaagagcagccagagcctgctggactccgatggcaagacctacctgaactggtatcagcagaagcccggcaaggcccctaagctgctgatctacctggtgtccaagctggatagcggcgtgcccagcagattttctggcagcggcagcggaaccgacttcaccctgacaatatccagcctccagcctgaggacttcgccacctactactgcttccaaggcacccactttccattcaccttcggccagggcaccaaggtggaaatcaaaagactcgaggacctgaagaacgtgttcccacctgaggtggccgtgttcgagcctagcgaggccgagatcagccacacccagaaagccaccctcgtgtgcctggctaccggcttctaccccgaccatgtggaactgtcttggtgggtcaacggcaaagaggtgcacagcggcgtgtgtaccgacccccagccactgaaagaacagcccgccctgaacgacagccggtactgcctgagcagcagactgagagtgtccgccaccttctggcagaacccccggaaccacttcagatgccaggtgcagttctacggcctgagcgagaacgacgagtggacccaggacagagccaagcccgtgacccagatcgtgtctgccgaagcctggggcagagccgattgcgacgtgaagctggtggaaaagagcttcgagacagacaccaacctgaacttccagaacctgagcgtgatcggcttcagaatcctgctgctgaaagtggccggctttaacctgctgatgaccctgcggctgtggtccagcagggccaagcgatctggatctggagcaacaaacttctcactactcaaacaagcaggtgacgtggaggagaatcccgggcctactagtatggactggatttggcgcatccttttccttgtcggcgctgctaccggcgcccattccgggcccatggaccccgacctggaaatcagagccgccttcctgcggcagagaaacacagccctgagaacagaggtggccgagctggaacaagaggtgcagcggctggaaaacgaggtgtcccagtacgagacaagatacggccctctcggaggcggaaaaggatccggcggcggaggatctggcggaggcggatctgggggcggaggctctttcgaagaagtgcagctggttgaatcaggcggaggactggttcagcctggcggatctctgagactgtcttgtgccgccagcggctacaccttcaccaactactggatgaactgggtccgacaggcccctggcaaaggactggaatgggtcggaatgatcgaccccagcgacagcgagacacactacaaccacatcttcaaggaccgcttcaccatcagcgccgacaccagcaagaataccgcctacctccagatgaactccctgagagccgaggacaccgccgtgtactactgcgccagaaacctgtatctgtggggccagggaaccctggtcacagtgtcatctacgcgtatccagaaccctgatcctgccgtgtaccagctgcgggatagcaagagcagcgacaagagcgtgtgtctgttcaccgacttcgacagccagaccaacgtgtcccagagcaaggactccgacgtgtacatcaccgataagtgcgtgctggacatgcggagcatggacttcaagagcaactccgccgtggcctggtccaacaagtccgatttcgcctgcgccaacgccttcaacaacagcattatccccgaggacacattcttcccaagccccgagagcagctgcggctttaccagcgagagctaccagcagggcgtgctgagcgccaccatcctgtacgagatcctgctgggcaaggccaccctgtacgccgtgctggtgtctgccctggtgctgatggctatggtcaagcggaaggacagccgggga

SEQ ID NO: 37369 - DNA, 2079 bp, synthetic construct
  source 1..2079: mol_type = other DNA
atggccttaccagtgaccgccttgctcctgccgctggccttgctgctccacgccgccaggccggacatccagatgacacagagccctagcagcctgtctgccagcgtgggagacagagtgaccatcacatgcaagagcagccagagcctgctggactccgatggcaagacctacctgaactggtatcagcagaagcccggcaaggcccctaagctgctgatctacctggtgtccaagctggatagcggcgtgcccagcagattttctggcagcggcagcggaaccgacttcaccctgacaatatccagcctccagcctgaggacttcgccacctactactgcttccaaggcacccactttccattcaccttcggccagggcaccaaggtggaaatcaaaagactcgagatccagaaccctgatcctgccgtgtaccagctgcgggatagcaagagcagcgacaagagcgtgtgtctgttcaccgacttcgacagccagaccaacgtgtcccagagcaaggactccgacgtgtacatcaccgataagtgcgtgctggacatgcggagcatggacttcaagagcaactccgccgtggcctggtccaacaagtccgatttcgcctgcgccaacgccttcaacaacagcattatccccgaggacacattcttcccaagccccgagagcagctgcggctttaccagcgagagctaccagcagggcgtgctgagcgccaccatcctgtacgagatcctgctgggcaaggccaccctgtacgccgtgctggtgtctgccctggtgctgatggctatggtcaagcggaaggacagccggggacgcgccaagagaagcggatctggcgtgaagcagaccctgaatttcgacctgctgaagctggctggcgacgtggaatccaacccaggccctactagtatggactggatttggcgcatccttttccttgtcggcgctgctaccggcgcccattccgggcccatggaccccgacctggaaatcagagccgccttcctgcggcagagaaacacagccctgagaacagaggtggccgagctggaacaagaggtgcagcggctggaaaacgaggtgtcccagtacgagacaagatacggccctctcggaggcggaaaaggatccggcggcggaggatctggcggaggcggatctgggggcggaggctctttcgaagaagtgcagctggttgaatcaggcggaggactggttcagcctggcggatctctgagactgtcttgtgccgccagcggctacaccttcaccaactactggatgaactgggtccgacaggcccctggcaaaggactggaatgggtcggaatgatcgaccccagcgacagcgagacacactacaaccacatcttcaaggaccgcttcaccatcagcgccgacaccagcaagaataccgcctacctccagatgaactccctgagagccgaggacaccgccgtgtactactgcgccagaaacctgtatctgtggggccagggaaccctggtcacagtgtcatctacgcgtgaggacctgaagaacgtgttcccacctgaggtggccgtgttcgagcctagcgaggccgagatcagccacacccagaaagccaccctcgtgtgcctggctaccggcttctaccccgaccatgtggaactgtcttggtgggtcaacggcaaagaggtgcacagcggcgtgtgtaccgacccccagccactgaaagaacagcccgccctgaacgacagccggtactgcctgagcagcagactgagagtgtccgccaccttctggcagaacccccggaaccacttcagatgccaggtgcagttctacggcctgagcgagaacgacgagtggacccaggacagagccaagcccgtgacccagatcgtgtctgccgaagcctggggcagagccgattgcgacgtgaagctggtggaaaagagcttcgagacagacaccaacctgaacttccagaacctgagcgtgatcggcttcagaatcctgctgctgaaagtggccggctttaacctgctgatgaccctgcggctgtggtccagc

SEQ ID NO: 37370 - DNA, 1998 bp, synthetic construct
  source 1..1998: mol_type = other DNA
atggccttaccagtgaccgccttgctcctgccgctggccttgctgctccacgccgccaggccggacatccagatgacacagagccctagcagcctgtctgccagcgtgggagacagagtgaccatcacatgcaagagcagccagagcctgctggactccgatggcaagacctacctgaactggtatcagcagaagcccggcaaggcccctaagctgctgatctacctggtgtccaagctggatagcggcgtgcccagcagattttctggcagcggcagcggaaccgacttcaccctgacaatatccagcctccagcctgaggacttcgccacctactactgcttccaaggcacccactttccattcaccttcggccagggcaccaaggtggaaatcaaaagactcgaggacctgaagaacgtgttcccacctgaggtggccgtgttcgagcctagcgaggccgagatcagccacacccagaaagccaccctcgtgtgcctggctaccggcttctaccccgaccatgtggaactgtcttggtgggtcaacggcaaagaggtgcacagcggcgtgtgtaccgacccccagccactgaaagaacagcccgccctgaacgacagccggtactgcctgagcagcagactgagagtgtccgccaccttctggcagaacccccggaaccacttcagatgccaggtgcagttctacggcctgagcgagaacgacgagtggacccaggacagagccaagcccgtgacccagatcgtgtctgccgaagcctggggcagagccgattgcgacgtgaagctggtggaaaagagcttcgagacagacaccaacctgaacttccagaacctgagcgtgatcggcttcagaatcctgctgctgaaagtggccggctttaacctgctgatgaccctgcggctgtggtccagcagggccaagcgatctggatctggagcaacaaacttctcactactcaaacaagcaggtgacgtggaggagaatcccgggcctactagtatggactggatttggcgcatccttttccttgtcggcgctgctaccggcgcccattccgggcccgaagttgctgccctcgagaaggaggtagcagctttggaaaaagaagtcgcagcccttgagaaagaagttgcggctctggagaagggatccggcggcggaggatctggcggaggcggatctgggggcggaggctctttcgaagaagtgcagctggttgaatcaggcggaggactggttcagcctggcggatctctgagactgtcttgtgccgccagcggctacaccttcaccaactactggatgaactgggtccgacaggcccctggcaaaggactggaatgggtcggaatgatcgaccccagcgacagcgagacacactacaaccacatcttcaaggaccgcttcaccatcagcgccgacaccagcaagaataccgcctacctccagatgaactccctgagagccgaggacaccgccgtgtactactgcgccagaaacctgtatctgtggggccagggaaccctggtcacagtgtcatctacgcgtatccagaaccctgatcctgccgtgtaccagctgcgggatagcaagagcagcgacaagagcgtgtgtctgttcaccgacttcgacagccagaccaacgtgtcccagagcaaggactccgacgtgtacatcaccgataagtgcgtgctggacatgcggagcatggacttcaagagcaactccgccgtggcctggtccaacaagtccgatttcgcctgcgccaacgccttcaacaacagcattatccccgaggacacattcttcccaagccccgagagcagctgcggctttaccagcgagagctaccagcagggcgtgctgagcgccaccatcctgtacgagatcctgctgggcaaggccaccctgtacgccgtgctggtgtctgccctggtgctgatggctatggtcaagcggaaggacagccgggga

SEQ ID NO: 37371 - DNA, 2010 bp, synthetic construct
  source 1..2010: mol_type = other DNA
atggccttaccagtgaccgccttgctcctgccgctggccttgctgctccacgccgccaggccggacatccagatgacacagagccctagcagcctgtctgccagcgtgggagacagagtgaccatcacatgcaagagcagccagagcctgctggactccgatggcaagacctacctgaactggtatcagcagaagcccggcaaggcccctaagctgctgatctacctggtgtccaagctggatagcggcgtgcccagcagattttctggcagcggcagcggaaccgacttcaccctgacaatatccagcctccagcctgaggacttcgccacctactactgcttccaaggcacccactttccattcaccttcggccagggcaccaaggtggaaatcaaaagactcgagatccagaaccctgatcctgccgtgtaccagctgcgggatagcaagagcagcgacaagagcgtgtgtctgttcaccgacttcgacagccagaccaacgtgtcccagagcaaggactccgacgtgtacatcaccgataagtgcgtgctggacatgcggagcatggacttcaagagcaactccgccgtggcctggtccaacaagtccgatttcgcctgcgccaacgccttcaacaacagcattatccccgaggacacattcttcccaagccccgagagcagctgcggctttaccagcgagagctaccagcagggcgtgctgagcgccaccatcctgtacgagatcctgctgggcaaggccaccctgtacgccgtgctggtgtctgccctggtgctgatggctatggtcaagcggaaggacagccggggacgcgccaagagaagcggatctggcgtgaagcagaccctgaatttcgacctgctgaagctggctggcgacgtggaatccaacccaggccctactagtatggactggatttggcgcatccttttccttgtcggcgctgctaccggcgcccattccgggcccgaagttgctgccctcgagaaggaggtagcagctttggaaaaagaagtcgcagcccttgagaaagaagttgcggctctggagaagggatccggcggcggaggatctggcggaggcggatctgggggcggaggctctttcgaagaagtgcagctggttgaatcaggcggaggactggttcagcctggcggatctctgagactgtcttgtgccgccagcggctacaccttcaccaactactggatgaactgggtccgacaggcccctggcaaaggactggaatgggtcggaatgatcgaccccagcgacagcgagacacactacaaccacatcttcaaggaccgcttcaccatcagcgccgacaccagcaagaataccgcctacctccagatgaactccctgagagccgaggacaccgccgtgtactactgcgccagaaacctgtatctgtggggccagggaaccctggtcacagtgtcatctacgcgtgaggacctgaagaacgtgttcccacctgaggtggccgtgttcgagcctagcgaggccgagatcagccacacccagaaagccaccctcgtgtgcctggctaccggcttctaccccgaccatgtggaactgtcttggtgggtcaacggcaaagaggtgcacagcggcgtgtgtaccgacccccagccactgaaagaacagcccgccctgaacgacagccggtactgcctgagcagcagactgagagtgtccgccaccttctggcagaacccccggaaccacttcagatgccaggtgcagttctacggcctgagcgagaacgacgagtggacccaggacagagccaagcccgtgacccagatcgtgtctgccgaagcctggggcagagccgattgcgacgtgaagctggtggaaaagagcttcgagacagacaccaacctgaacttccagaacctgagcgtgatcggcttcagaatcctgctgctgaaagtggccggctttaacctgctgatgaccctgcggctgtggtccagc

SEQ ID NO: 37372 - DNA, 2268 bp, synthetic construct
  source 1..2268: mol_type = other DNA
atggccttaccagtgaccgccttgctcctgccgctggccttgctgctccacgccgccaggccggacatccagatgacacagagccctagcagcctgtctgccagcgtgggagacagagtgaccatcacatgcaagagcagccagagcctgctggactccgatggcaagacctacctgaactggtatcagcagaagcccggcaaggcccctaagctgctgatctacctggtgtccaagctggatagcggcgtgcccagcagattttctggcagcggcagcggaaccgacttcaccctgacaatatccagcctccagcctgaggacttcgccacctactactgcttccaaggcacccactttccattcaccttcggccagggcaccaaggtggaaatcaaaagactcgaggacctgaagaacgtgttcccacctgaggtggccgtgttcgagcctagcgaggccgagatcagccacacccagaaagccaccctcgtgtgcctggctaccggcttctaccccgaccatgtggaactgtcttggtgggtcaacggcaaagaggtgcacagcggcgtgtgtaccgacccccagccactgaaagaacagcccgccctgaacgacagccggtactgcctgagcagcagactgagagtgtccgccaccttctggcagaacccccggaaccacttcagatgccaggtgcagttctacggcctgagcgagaacgacgagtggacccaggacagagccaagcccgtgacccagatcgtgtctgccgaagcctggggcagagccgattgcgacgtgaagctggtggaaaagagcttcgagacagacaccaacctgaacttccagaacctgagcgtgatcggcttcagaatcctgctgctgaaagtggccggctttaacctgctgatgaccctgcggctgtggtccagcagggccaagcgatctggatctggagcaacaaacttctcactactcaaacaagcaggtgacgtggaggagaatcccgggcctactagtatggactggatttggcgcatccttttccttgtcggcgctgctaccggcgcccattccgggccccaggttcagctgcaagagtctggcggaggacttgctcaagctggcggaagcctgagactgtcttgtgccgcctctggcagaaccttcagcatgggctggtttagacaggcccctggcaaagagagagagttcgtcgccgccatcacatacagcggcggcagcccttactacgcctcttctgtcagaggccggttcaccatcagccgggacaacgccaagaacaccgtgtacctccagatgaacagcctgaagccagaggacaccgccgtgtactactgtgccgccaatccaacctacggcagcgactggaatgccgagaattggggccagggcacccaagtgacagtgtctagtggatccggcggcggaggatctggcggaggcggatctgggggcggaggctctttcgaagaagtgcagctggttgaatcaggcggaggactggttcagcctggcggatctctgagactgtcttgtgccgccagcggctacaccttcaccaactactggatgaactgggtccgacaggcccctggcaaaggactggaatgggtcggaatgatcgaccccagcgacagcgagacacactacaaccacatcttcaaggaccgcttcaccatcagcgccgacaccagcaagaataccgcctacctccagatgaactccctgagagccgaggacaccgccgtgtactactgcgccagaaacctgtatctgtggggccagggaaccctggtcacagtgtcatctacgcgtatccagaaccctgatcctgccgtgtaccagctgcgggatagcaagagcagcgacaagagcgtgtgtctgttcaccgacttcgacagccagaccaacgtgtcccagagcaaggactccgacgtgtacatcaccgataagtgcgtgctggacatgcggagcatggacttcaagagcaactccgccgtggcctggtccaacaagtccgatttcgcctgcgccaacgccttcaacaacagcattatccccgaggacacattcttcccaagccccgagagcagctgcggctttaccagcgagagctaccagcagggcgtgctgagcgccaccatcctgtacgagatcctgctgggcaaggccaccctgtacgccgtgctggtgtctgccctggtgctgatggctatggtcaagcggaaggacagccgggga

SEQ ID NO: 37373 - DNA, 2280 bp, synthetic construct
  source 1..2280: mol_type = other DNA
atggccttaccagtgaccgccttgctcctgccgctggccttgctgctccacgccgccaggccggacatccagatgacacagagccctagcagcctgtctgccagcgtgggagacagagtgaccatcacatgcaagagcagccagagcctgctggactccgatggcaagacctacctgaactggtatcagcagaagcccggcaaggcccctaagctgctgatctacctggtgtccaagctggatagcggcgtgcccagcagattttctggcagcggcagcggaaccgacttcaccctgacaatatccagcctccagcctgaggacttcgccacctactactgcttccaaggcacccactttccattcaccttcggccagggcaccaaggtggaaatcaaaagactcgagatccagaaccctgatcctgccgtgtaccagctgcgggatagcaagagcagcgacaagagcgtgtgtctgttcaccgacttcgacagccagaccaacgtgtcccagagcaaggactccgacgtgtacatcaccgataagtgcgtgctggacatgcggagcatggacttcaagagcaactccgccgtggcctggtccaacaagtccgatttcgcctgcgccaacgccttcaacaacagcattatccccgaggacacattcttcccaagccccgagagcagctgcggctttaccagcgagagctaccagcagggcgtgctgagcgccaccatcctgtacgagatcctgctgggcaaggccaccctgtacgccgtgctggtgtctgccctggtgctgatggctatggtcaagcggaaggacagccggggacgcgccaagagaagcggatctggcgtgaagcagaccctgaatttcgacctgctgaagctggctggcgacgtggaatccaacccaggccctactagtatggactggatttggcgcatccttttccttgtcggcgctgctaccggcgcccattccgggccccaggttcagctgcaagagtctggcggaggacttgctcaagctggcggaagcctgagactgtcttgtgccgcctctggcagaaccttcagcatgggctggtttagacaggcccctggcaaagagagagagttcgtcgccgccatcacatacagcggcggcagcccttactacgcctcttctgtcagaggccggttcaccatcagccgggacaacgccaagaacaccgtgtacctccagatgaacagcctgaagccagaggacaccgccgtgtactactgtgccgccaatccaacctacggcagcgactggaatgccgagaattggggccagggcacccaagtgacagtgtctagtggatccggcggcggaggatctggcggaggcggatctgggggcggaggctctttcgaagaagtgcagctggttgaatcaggcggaggactggttcagcctggcggatctctgagactgtcttgtgccgccagcggctacaccttcaccaactactggatgaactgggtccgacaggcccctggcaaaggactggaatgggtcggaatgatcgaccccagcgacagcgagacacactacaaccacatcttcaaggaccgcttcaccatcagcgccgacaccagcaagaataccgcctacctccagatgaactccctgagagccgaggacaccgccgtgtactactgcgccagaaacctgtatctgtggggccagggaaccctggtcacagtgtcatctacgcgtgaggacctgaagaacgtgttcccacctgaggtggccgtgttcgagcctagcgaggccgagatcagccacacccagaaagccaccctcgtgtgcctggctaccggcttctaccccgaccatgtggaactgtcttggtgggtcaacggcaaagaggtgcacagcggcgtgtgtaccgacccccagccactgaaagaacagcccgccctgaacgacagccggtactgcctgagcagcagactgagagtgtccgccaccttctggcagaacccccggaaccacttcagatgccaggtgcagttctacggcctgagcgagaacgacgagtggacccaggacagagccaagcccgtgacccagatcgtgtctgccgaagcctggggcagagccgattgcgacgtgaagctggtggaaaagagcttcgagacagacaccaacctgaacttccagaacctgagcgtgatcggcttcagaatcctgctgctgaaagtggccggctttaacctgctgatgaccctgcggctgtggtccagc

SEQ ID NO: 37374 - DNA, 2286 bp, synthetic construct
  source 1..2286: mol_type = other DNA
atggccttaccagtgaccgccttgctcctgccgctggccttgctgctccacgccgccaggccggaagtgcaactggtggaatctggaggctctctggtgcagccagggggaagcctgagactgtcttgtgccgcttccggcttcaccttcgacgactacgccatgagctgggtgcgccaggtgccaggcaaaggcctggaatgggtgtccagcatcaactggagcggcacccacaccgattacgccgactccgtgaaaggcagattcacaatcagcagaaacaacgccaacaataccctgtacctgcagatgaactccctgaagtctgaggatacagcagtgtattattgcgccaagaactggcgggacgccggcaccacttggtttgagaaaagcggctctgccggacagggaacccaagtgacagtgtcctccggtaccggcggaggcggatctggcggcggaggtagcggtggcggaggatctgaattcgacatccagatgacacagagccctagcagcctgtctgccagcgtgggagacagagtgaccatcacatgcaagagcagccagagcctgctggactccgatggcaagacctacctgaactggtatcagcagaagcccggcaaggcccctaagctgctgatctacctggtgtccaagctggatagcggcgtgcccagcagattttctggcagcggcagcggaaccgacttcaccctgacaatatccagcctccagcctgaggacttcgccacctactactgcttccaaggcacccactttccattcaccttcggccagggcaccaaggtggaaatcaaaagactcgaggacctgaagaacgtgttcccacctgaggtggccgtgttcgagcctagcgaggccgagatcagccacacccagaaagccaccctcgtgtgcctggctaccggcttctaccccgaccatgtggaactgtcttggtgggtcaacggcaaagaggtgcacagcggcgtgtgtaccgacccccagccactgaaagaacagcccgccctgaacgacagccggtactgcctgagcagcagactgagagtgtccgccaccttctggcagaacccccggaaccacttcagatgccaggtgcagttctacggcctgagcgagaacgacgagtggacccaggacagagccaagcccgtgacccagatcgtgtctgccgaagcctggggcagagccgattgcgacgtgaagctggtggaaaagagcttcgagacagacaccaacctgaacttccagaacctgagcgtgatcggcttcagaatcctgctgctgaaagtggccggctttaacctgctgatgaccctgcggctgtggtccagcagggccaagcgatctggatctggagcaacaaacttctcactactcaaacaagcaggtgacgtggaggagaatcccgggcctactagtatggactggatttggcgcatccttttccttgtcggcgctgctaccggcgcgcattccttcgaagaagtgcagctggttgaatcaggcggaggactggttcagcctggcggatctctgagactgtcttgtgccgccagcggctacaccttcaccaactactggatgaactgggtccgacaggcccctggcaaaggactggaatgggtcggaatgatcgaccccagcgacagcgagacacactacaaccacatcttcaaggaccgcttcaccatcagcgccgacaccagcaagaataccgcctacctccagatgaactccctgagagccgaggacaccgccgtgtactactgcgccagaaacctgtatctgtggggccagggaaccctggtcacagtgtcatctacgcgtatccagaaccctgatcctgccgtgtaccagctgcgggatagcaagagcagcgacaagagcgtgtgtctgttcaccgacttcgacagccagaccaacgtgtcccagagcaaggactccgacgtgtacatcaccgataagtgcgtgctggacatgcggagcatggacttcaagagcaactccgccgtggcctggtccaacaagtccgatttcgcctgcgccaacgccttcaacaacagcattatccccgaggacacattcttcccaagccccgagagcagctgcggctttaccagcgagagctaccagcagggcgtgctgagcgccaccatcctgtacgagatcctgctgggcaaggccaccctgtacgccgtgctggtgtctgccctggtgctgatggctatggtcaagcggaaggacagccgggga

SEQ ID NO: 37375 - DNA, 2298 bp, synthetic construct
  source 1..2298: mol_type = other DNA
atggccttaccagtgaccgccttgctcctgccgctggccttgctgctccacgccgccaggccggaagtgcaactggtggaatctggaggctctctggtgcagccagggggaagcctgagactgtcttgtgccgcttccggcttcaccttcgacgactacgccatgagctgggtgcgccaggtgccaggcaaaggcctggaatgggtgtccagcatcaactggagcggcacccacaccgattacgccgactccgtgaaaggcagattcacaatcagcagaaacaacgccaacaataccctgtacctgcagatgaactccctgaagtctgaggatacagcagtgtattattgcgccaagaactggcgggacgccggcaccacttggtttgagaaaagcggctctgccggacagggaacccaagtgacagtgtcctccggtaccggcggaggcggatctggcggcggaggtagcggtggcggaggatctgaattcgacatccagatgacacagagccctagcagcctgtctgccagcgtgggagacagagtgaccatcacatgcaagagcagccagagcctgctggactccgatggcaagacctacctgaactggtatcagcagaagcccggcaaggcccctaagctgctgatctacctggtgtccaagctggatagcggcgtgcccagcagattttctggcagcggcagcggaaccgacttcaccctgacaatatccagcctccagcctgaggacttcgccacctactactgcttccaaggcacccactttccattcaccttcggccagggcaccaaggtggaaatcaaaagactcgagatccagaaccctgatcctgccgtgtaccagctgcgggatagcaagagcagcgacaagagcgtgtgtctgttcaccgacttcgacagccagaccaacgtgtcccagagcaaggactccgacgtgtacatcaccgataagtgcgtgctggacatgcggagcatggacttcaagagcaactccgccgtggcctggtccaacaagtccgatttcgcctgcgccaacgccttcaacaacagcattatccccgaggacacattcttcccaagccccgagagcagctgcggctttaccagcgagagctaccagcagggcgtgctgagcgccaccatcctgtacgagatcctgctgggcaaggccaccctgtacgccgtgctggtgtctgccctggtgctgatggctatggtcaagcggaaggacagccggggacgcgccaagagaagcggatctggcgtgaagcagaccctgaatttcgacctgctgaagctggctggcgacgtggaatccaacccaggccctactagtatggactggatttggcgcatccttttccttgtcggcgctgctaccggcgcgcattccttcgaagaagtgcagctggttgaatcaggcggaggactggttcagcctggcggatctctgagactgtcttgtgccgccagcggctacaccttcaccaactactggatgaactgggtccgacaggcccctggcaaaggactggaatgggtcggaatgatcgaccccagcgacagcgagacacactacaaccacatcttcaaggaccgcttcaccatcagcgccgacaccagcaagaataccgcctacctccagatgaactccctgagagccgaggacaccgccgtgtactactgcgccagaaacctgtatctgtggggccagggaaccctggtcacagtgtcatctacgcgtgaggacctgaagaacgtgttcccacctgaggtggccgtgttcgagcctagcgaggccgagatcagccacacccagaaagccaccctcgtgtgcctggctaccggcttctaccccgaccatgtggaactgtcttggtgggtcaacggcaaagaggtgcacagcggcgtgtgtaccgacccccagccactgaaagaacagcccgccctgaacgacagccggtactgcctgagcagcagactgagagtgtccgccaccttctggcagaacccccggaaccacttcagatgccaggtgcagttctacggcctgagcgagaacgacgagtggacccaggacagagccaagcccgtgacccagatcgtgtctgccgaagcctggggcagagccgattgcgacgtgaagctggtggaaaagagcttcgagacagacaccaacctgaacttccagaacctgagcgtgatcggcttcagaatcctgctgctgaaagtggccggctttaacctgctgatgaccctgcggctgtggtccagc

SEQ ID NO: 37376 - DNA, 2280 bp, synthetic construct
  source 1..2280: mol_type = other DNA
atggccttaccagtgaccgccttgctcctgccgctggccttgctgctccacgccgccaggccggaagttcagctgcttgagtctggcggaggactggttcaacctggcggaagcctgagactgtcttgtgccgccagcggcttcatcttcagcagctacgccatgagctgggtccgacaggctcctggaaagggccaagaatgggtttccggcgttagcggcacaggcgtgaacacctactacgccgatagcgtgaagggcagattcaccatcagccgggacaacagcaagaacaccctgtacctccagatgaacagcctgagagccgaggacaccgccgtgtactattgtgcctctggcaaaggctgggacagcggctcttggtacgaggactatagaggccagggcaccctggtcacagtttcttcaggtaccggcggaggcggatctggcggcggaggtagcggtggcggaggatctgaattcgacatccagatgacacagagccctagcagcctgtctgccagcgtgggagacagagtgaccatcacatgcaagagcagccagagcctgctggactccgatggcaagacctacctgaactggtatcagcagaagcccggcaaggcccctaagctgctgatctacctggtgtccaagctggatagcggcgtgcccagcagattttctggcagcggcagcggaaccgacttcaccctgacaatatccagcctccagcctgaggacttcgccacctactactgcttccaaggcacccactttccattcaccttcggccagggcaccaaggtggaaatcaaaagactcgaggacctgaagaacgtgttcccacctgaggtggccgtgttcgagcctagcgaggccgagatcagccacacccagaaagccaccctcgtgtgcctggctaccggcttctaccccgaccatgtggaactgtcttggtgggtcaacggcaaagaggtgcacagcggcgtgtgtaccgacccccagccactgaaagaacagcccgccctgaacgacagccggtactgcctgagcagcagactgagagtgtccgccaccttctggcagaacccccggaaccacttcagatgccaggtgcagttctacggcctgagcgagaacgacgagtggacccaggacagagccaagcccgtgacccagatcgtgtctgccgaagcctggggcagagccgattgcgacgtgaagctggtggaaaagagcttcgagacagacaccaacctgaacttccagaacctgagcgtgatcggcttcagaatcctgctgctgaaagtggccggctttaacctgctgatgaccctgcggctgtggtccagcagggccaagcgatctggatctggagcaacaaacttctcactactcaaacaagcaggtgacgtggaggagaatcccgggcctactagtatggactggatttggcgcatccttttccttgtcggcgctgctaccggcgcgcattccttcgaagaagtgcagctggttgaatcaggcggaggactggttcagcctggcggatctctgagactgtcttgtgccgccagcggctacaccttcaccaactactggatgaactgggtccgacaggcccctggcaaaggactggaatgggtcggaatgatcgaccccagcgacagcgagacacactacaaccacatcttcaaggaccgcttcaccatcagcgccgacaccagcaagaataccgcctacctccagatgaactccctgagagccgaggacaccgccgtgtactactgcgccagaaacctgtatctgtggggccagggaaccctggtcacagtgtcatctacgcgtatccagaaccctgatcctgccgtgtaccagctgcgggatagcaagagcagcgacaagagcgtgtgtctgttcaccgacttcgacagccagaccaacgtgtcccagagcaaggactccgacgtgtacatcaccgataagtgcgtgctggacatgcggagcatggacttcaagagcaactccgccgtggcctggtccaacaagtccgatttcgcctgcgccaacgccttcaacaacagcattatccccgaggacacattcttcccaagccccgagagcagctgcggctttaccagcgagagctaccagcagggcgtgctgagcgccaccatcctgtacgagatcctgctgggcaaggccaccctgtacgccgtgctggtgtctgccctggtgctgatggctatggtcaagcggaaggacagccgggga

SEQ ID NO: 37377 - DNA, 2292 bp, synthetic construct
  source 1..2292: mol_type = other DNA
atggccttaccagtgaccgccttgctcctgccgctggccttgctgctccacgccgccaggccggaagttcagctgcttgagtctggcggaggactggttcaacctggcggaagcctgagactgtcttgtgccgccagcggcttcatcttcagcagctacgccatgagctgggtccgacaggctcctggaaagggccaagaatgggtttccggcgttagcggcacaggcgtgaacacctactacgccgatagcgtgaagggcagattcaccatcagccgggacaacagcaagaacaccctgtacctccagatgaacagcctgagagccgaggacaccgccgtgtactattgtgcctctggcaaaggctgggacagcggctcttggtacgaggactatagaggccagggcaccctggtcacagtttcttcaggtaccggcggaggcggatctggcggcggaggtagcggtggcggaggatctgaattcgacatccagatgacacagagccctagcagcctgtctgccagcgtgggagacagagtgaccatcacatgcaagagcagccagagcctgctggactccgatggcaagacctacctgaactggtatcagcagaagcccggcaaggcccctaagctgctgatctacctggtgtccaagctggatagcggcgtgcccagcagattttctggcagcggcagcggaaccgacttcaccctgacaatatccagcctccagcctgaggacttcgccacctactactgcttccaaggcacccactttccattcaccttcggccagggcaccaaggtggaaatcaaaagactcgagatccagaaccctgatcctgccgtgtaccagctgcgggatagcaagagcagcgacaagagcgtgtgtctgttcaccgacttcgacagccagaccaacgtgtcccagagcaaggactccgacgtgtacatcaccgataagtgcgtgctggacatgcggagcatggacttcaagagcaactccgccgtggcctggtccaacaagtccgatttcgcctgcgccaacgccttcaacaacagcattatccccgaggacacattcttcccaagccccgagagcagctgcggctttaccagcgagagctaccagcagggcgtgctgagcgccaccatcctgtacgagatcctgctgggcaaggccaccctgtacgccgtgctggtgtctgccctggtgctgatggctatggtcaagcggaaggacagccggggacgcgccaagagaagcggatctggcgtgaagcagaccctgaatttcgacctgctgaagctggctggcgacgtggaatccaacccaggccctactagtatggactggatttggcgcatccttttccttgtcggcgctgctaccggcgcgcattccttcgaagaagtgcagctggttgaatcaggcggaggactggttcagcctggcggatctctgagactgtcttgtgccgccagcggctacaccttcaccaactactggatgaactgggtccgacaggcccctggcaaaggactggaatgggtcggaatgatcgaccccagcgacagcgagacacactacaaccacatcttcaaggaccgcttcaccatcagcgccgacaccagcaagaataccgcctacctccagatgaactccctgagagccgaggacaccgccgtgtactactgcgccagaaacctgtatctgtggggccagggaaccctggtcacagtgtcatctacgcgtgaggacctgaagaacgtgttcccacctgaggtggccgtgttcgagcctagcgaggccgagatcagccacacccagaaagccaccctcgtgtgcctggctaccggcttctaccccgaccatgtggaactgtcttggtgggtcaacggcaaagaggtgcacagcggcgtgtgtaccgacccccagccactgaaagaacagcccgccctgaacgacagccggtactgcctgagcagcagactgagagtgtccgccaccttctggcagaacccccggaaccacttcagatgccaggtgcagttctacggcctgagcgagaacgacgagtggacccaggacagagccaagcccgtgacccagatcgtgtctgccgaagcctggggcagagccgattgcgacgtgaagctggtggaaaagagcttcgagacagacaccaacctgaacttccagaacctgagcgtgatcggcttcagaatcctgctgctgaaagtggccggctttaacctgctgatgaccctgcggctgtggtccagc

SEQ ID NO: 37378 - DNA, 2184 bp, synthetic construct
  source 1..2184: mol_type = other DNA
atggccttaccagtgaccgccttgctcctgccgctggccttgctgctccacgccgccaggccgatgctgcccgctcctaagaatctggtggtgtccagaatcaccgaggacagcgccagactgtcttggacagctcctgatgccgccttcgacagcttccccatccggtacatcgagacactgatctggggcgaagccatctggctggatgtgcctggaagcgagagaagctacgacctgaccggactgaagcctggcacagagtatgccgtggtcatcaccggcgtgaaaggcggcagattctctagccctctggtggcctctttcaccaccggtaccggcggaggcggatctggcggcggaggtagcggtggcggaggatctgaattcgacatccagatgacacagagccctagcagcctgtctgccagcgtgggagacagagtgaccatcacatgcaagagcagccagagcctgctggactccgatggcaagacctacctgaactggtatcagcagaagcccggcaaggcccctaagctgctgatctacctggtgtccaagctggatagcggcgtgcccagcagattttctggcagcggcagcggaaccgacttcaccctgacaatatccagcctccagcctgaggacttcgccacctactactgcttccaaggcacccactttccattcaccttcggccagggcaccaaggtggaaatcaaaagactcgaggacctgaagaacgtgttcccacctgaggtggccgtgttcgagcctagcgaggccgagatcagccacacccagaaagccaccctcgtgtgcctggctaccggcttctaccccgaccatgtggaactgtcttggtgggtcaacggcaaagaggtgcacagcggcgtgtgtaccgacccccagccactgaaagaacagcccgccctgaacgacagccggtactgcctgagcagcagactgagagtgtccgccaccttctggcagaacccccggaaccacttcagatgccaggtgcagttctacggcctgagcgagaacgacgagtggacccaggacagagccaagcccgtgacccagatcgtgtctgccgaagcctggggcagagccgattgcgacgtgaagctggtggaaaagagcttcgagacagacaccaacctgaacttccagaacctgagcgtgatcggcttcagaatcctgctgctgaaagtggccggctttaacctgctgatgaccctgcggctgtggtccagcagggccaagcgatctggatctggagcaacaaacttctcactactcaaacaagcaggtgacgtggaggagaatcccgggcctactagtatggactggatttggcgcatccttttccttgtcggcgctgctaccggcgcgcattccttcgaagaagtgcagctggttgaatcaggcggaggactggttcagcctggcggatctctgagactgtcttgtgccgccagcggctacaccttcaccaactactggatgaactgggtccgacaggcccctggcaaaggactggaatgggtcggaatgatcgaccccagcgacagcgagacacactacaaccacatcttcaaggaccgcttcaccatcagcgccgacaccagcaagaataccgcctacctccagatgaactccctgagagccgaggacaccgccgtgtactactgcgccagaaacctgtatctgtggggccagggaaccctggtcacagtgtcatctacgcgtatccagaaccctgatcctgccgtgtaccagctgcgggatagcaagagcagcgacaagagcgtgtgtctgttcaccgacttcgacagccagaccaacgtgtcccagagcaaggactccgacgtgtacatcaccgataagtgcgtgctggacatgcggagcatggacttcaagagcaactccgccgtggcctggtccaacaagtccgatttcgcctgcgccaacgccttcaacaacagcattatccccgaggacacattcttcccaagccccgagagcagctgcggctttaccagcgagagctaccagcagggcgtgctgagcgccaccatcctgtacgagatcctgctgggcaaggccaccctgtacgccgtgctggtgtctgccctggtgctgatggctatggtcaagcggaaggacagccgggga

SEQ ID NO: 37379 - DNA, 2196 bp, synthetic construct
  source 1..2196: mol_type = other DNA
atggccttaccagtgaccgccttgctcctgccgctggccttgctgctccacgccgccaggccgatgctgcccgctcctaagaatctggtggtgtccagaatcaccgaggacagcgccagactgtcttggacagctcctgatgccgccttcgacagcttccccatccggtacatcgagacactgatctggggcgaagccatctggctggatgtgcctggaagcgagagaagctacgacctgaccggactgaagcctggcacagagtatgccgtggtcatcaccggcgtgaaaggcggcagattctctagccctctggtggcctctttcaccaccggtaccggcggaggcggatctggcggcggaggtagcggtggcggaggatctgaattcgacatccagatgacacagagccctagcagcctgtctgccagcgtgggagacagagtgaccatcacatgcaagagcagccagagcctgctggactccgatggcaagacctacctgaactggtatcagcagaagcccggcaaggcccctaagctgctgatctacctggtgtccaagctggatagcggcgtgcccagcagattttctggcagcggcagcggaaccgacttcaccctgacaatatccagcctccagcctgaggacttcgccacctactactgcttccaaggcacccactttccattcaccttcggccagggcaccaaggtggaaatcaaaagactcgagatccagaaccctgatcctgccgtgtaccagctgcgggatagcaagagcagcgacaagagcgtgtgtctgttcaccgacttcgacagccagaccaacgtgtcccagagcaaggactccgacgtgtacatcaccgataagtgcgtgctggacatgcggagcatggacttcaagagcaactccgccgtggcctggtccaacaagtccgatttcgcctgcgccaacgccttcaacaacagcattatccccgaggacacattcttcccaagccccgagagcagctgcggctttaccagcgagagctaccagcagggcgtgctgagcgccaccatcctgtacgagatcctgctgggcaaggccaccctgtacgccgtgctggtgtctgccctggtgctgatggctatggtcaagcggaaggacagccggggacgcgccaagagaagcggatctggcgtgaagcagaccctgaatttcgacctgctgaagctggctggcgacgtggaatccaacccaggccctactagtatggactggatttggcgcatccttttccttgtcggcgctgctaccggcgcgcattccttcgaagaagtgcagctggttgaatcaggcggaggactggttcagcctggcggatctctgagactgtcttgtgccgccagcggctacaccttcaccaactactggatgaactgggtccgacaggcccctggcaaaggactggaatgggtcggaatgatcgaccccagcgacagcgagacacactacaaccacatcttcaaggaccgcttcaccatcagcgccgacaccagcaagaataccgcctacctccagatgaactccctgagagccgaggacaccgccgtgtactactgcgccagaaacctgtatctgtggggccagggaaccctggtcacagtgtcatctacgcgtgaggacctgaagaacgtgttcccacctgaggtggccgtgttcgagcctagcgaggccgagatcagccacacccagaaagccaccctcgtgtgcctggctaccggcttctaccccgaccatgtggaactgtcttggtgggtcaacggcaaagaggtgcacagcggcgtgtgtaccgacccccagccactgaaagaacagcccgccctgaacgacagccggtactgcctgagcagcagactgagagtgtccgccaccttctggcagaacccccggaaccacttcagatgccaggtgcagttctacggcctgagcgagaacgacgagtggacccaggacagagccaagcccgtgacccagatcgtgtctgccgaagcctggggcagagccgattgcgacgtgaagctggtggaaaagagcttcgagacagacaccaacctgaacttccagaacctgagcgtgatcggcttcagaatcctgctgctgaaagtggccggctttaacctgctgatgaccctgcggctgtggtccagc

SEQ ID NO: 37380 - DNA, 2271 bp, synthetic construct
  source 1..2271: mol_type = other DNA
atggccttaccagtgaccgccttgctcctgccgctggccttgctgctccacgccgccaggccggaggtgcagctggttgaatctggcggaggactggttcagcctggcggatctctgagactgtcttgtgccgccagcggcttcaacatcaaggatacctgtatcggctgggttcgcagagcccctggcaaagaggaagaactggtcgccaaaatctgcaagtacagcggccacaccagatacgccgacagcgtgaagggcagattcaccatcagcgccgacaccagcaagaacaccgcctacctccagatgaacagcctgagagccgaggacaccgccgtgtactattgtgccgctgtgtccgtcagagatgggcactacaattactggggccagggcaccaccgtgaccgtttcttcaggtaccggcggaggcggatctggcggcggaggtagcggtggcggaggatctgaattcgacatccagatgacacagagccctagcagcctgtctgccagcgtgggagacagagtgaccatcacatgcaagagcagccagagcctgctggactccgatggcaagacctacctgaactggtatcagcagaagcccggcaaggcccctaagctgctgatctacctggtgtccaagctggatagcggcgtgcccagcagattttctggcagcggcagcggaaccgacttcaccctgacaatatccagcctccagcctgaggacttcgccacctactactgcttccaaggcacccactttccattcaccttcggccagggcaccaaggtggaaatcaaaagactcgaggacctgaagaacgtgttcccacctgaggtggccgtgttcgagcctagcgaggccgagatcagccacacccagaaagccaccctcgtgtgcctggctaccggcttctaccccgaccatgtggaactgtcttggtgggtcaacggcaaagaggtgcacagcggcgtgtgtaccgacccccagccactgaaagaacagcccgccctgaacgacagccggtactgcctgagcagcagactgagagtgtccgccaccttctggcagaacccccggaaccacttcagatgccaggtgcagttctacggcctgagcgagaacgacgagtggacccaggacagagccaagcccgtgacccagatcgtgtctgccgaagcctggggcagagccgattgcgacgtgaagctggtggaaaagagcttcgagacagacaccaacctgaacttccagaacctgagcgtgatcggcttcagaatcctgctgctgaaagtggccggctttaacctgctgatgaccctgcggctgtggtccagcagggccaagcgatctggatctggagcaacaaacttctcactactcaaacaagcaggtgacgtggaggagaatcccgggcctactagtatggactggatttggcgcatccttttccttgtcggcgctgctaccggcgcgcattccttcgaagaagtgcagctggttgaatcaggcggaggactggttcagcctggcggatctctgagactgtcttgtgccgccagcggctacaccttcaccaactactggatgaactgggtccgacaggcccctggcaaaggactggaatgggtcggaatgatcgaccccagcgacagcgagacacactacaaccacatcttcaaggaccgcttcaccatcagcgccgacaccagcaagaataccgcctacctccagatgaactccctgagagccgaggacaccgccgtgtactactgcgccagaaacctgtatctgtggggccagggaaccctggtcacagtgtcatctacgcgtatccagaaccctgatcctgccgtgtaccagctgcgggatagcaagagcagcgacaagagcgtgtgtctgttcaccgacttcgacagccagaccaacgtgtcccagagcaaggactccgacgtgtacatcaccgataagtgcgtgctggacatgcggagcatggacttcaagagcaactccgccgtggcctggtccaacaagtccgatttcgcctgcgccaacgccttcaacaacagcattatccccgaggacacattcttcccaagccccgagagcagctgcggctttaccagcgagagctaccagcagggcgtgctgagcgccaccatcctgtacgagatcctgctgggcaaggccaccctgtacgccgtgctggtgtctgccctggtgctgatggctatggtcaagcggaaggacagccgggga

SEQ ID NO: 37381 - DNA, 2283 bp, synthetic construct
  source 1..2283: mol_type = other DNA
atggccttaccagtgaccgccttgctcctgccgctggccttgctgctccacgccgccaggccggaggtgcagctggttgaatctggcggaggactggttcagcctggcggatctctgagactgtcttgtgccgccagcggcttcaacatcaaggatacctgtatcggctgggttcgcagagcccctggcaaagaggaagaactggtcgccaaaatctgcaagtacagcggccacaccagatacgccgacagcgtgaagggcagattcaccatcagcgccgacaccagcaagaacaccgcctacctccagatgaacagcctgagagccgaggacaccgccgtgtactattgtgccgctgtgtccgtcagagatgggcactacaattactggggccagggcaccaccgtgaccgtttcttcaggtaccggcggaggcggatctggcggcggaggtagcggtggcggaggatctgaattcgacatccagatgacacagagccctagcagcctgtctgccagcgtgggagacagagtgaccatcacatgcaagagcagccagagcctgctggactccgatggcaagacctacctgaactggtatcagcagaagcccggcaaggcccctaagctgctgatctacctggtgtccaagctggatagcggcgtgcccagcagattttctggcagcggcagcggaaccgacttcaccctgacaatatccagcctccagcctgaggacttcgccacctactactgcttccaaggcacccactttccattcaccttcggccagggcaccaaggtggaaatcaaaagactcgagatccagaaccctgatcctgccgtgtaccagctgcgggatagcaagagcagcgacaagagcgtgtgtctgttcaccgacttcgacagccagaccaacgtgtcccagagcaaggactccgacgtgtacatcaccgataagtgcgtgctggacatgcggagcatggacttcaagagcaactccgccgtggcctggtccaacaagtccgatttcgcctgcgccaacgccttcaacaacagcattatccccgaggacacattcttcccaagccccgagagcagctgcggctttaccagcgagagctaccagcagggcgtgctgagcgccaccatcctgtacgagatcctgctgggcaaggccaccctgtacgccgtgctggtgtctgccctggtgctgatggctatggtcaagcggaaggacagccggggacgcgccaagagaagcggatctggcgtgaagcagaccctgaatttcgacctgctgaagctggctggcgacgtggaatccaacccaggccctactagtatggactggatttggcgcatccttttccttgtcggcgctgctaccggcgcgcattccttcgaagaagtgcagctggttgaatcaggcggaggactggttcagcctggcggatctctgagactgtcttgtgccgccagcggctacaccttcaccaactactggatgaactgggtccgacaggcccctggcaaaggactggaatgggtcggaatgatcgaccccagcgacagcgagacacactacaaccacatcttcaaggaccgcttcaccatcagcgccgacaccagcaagaataccgcctacctccagatgaactccctgagagccgaggacaccgccgtgtactactgcgccagaaacctgtatctgtggggccagggaaccctggtcacagtgtcatctacgcgtgaggacctgaagaacgtgttcccacctgaggtggccgtgttcgagcctagcgaggccgagatcagccacacccagaaagccaccctcgtgtgcctggctaccggcttctaccccgaccatgtggaactgtcttggtgggtcaacggcaaagaggtgcacagcggcgtgtgtaccgacccccagccactgaaagaacagcccgccctgaacgacagccggtactgcctgagcagcagactgagagtgtccgccaccttctggcagaacccccggaaccacttcagatgccaggtgcagttctacggcctgagcgagaacgacgagtggacccaggacagagccaagcccgtgacccagatcgtgtctgccgaagcctggggcagagccgattgcgacgtgaagctggtggaaaagagcttcgagacagacaccaacctgaacttccagaacctgagcgtgatcggcttcagaatcctgctgctgaaagtggccggctttaacctgctgatgaccctgcggctgtggtccagc

SEQ ID NO: 37382 - DNA, 3387 bp, synthetic construct
  source 1..3387: mol_type = other DNA
atggccttaccagtgaccgccttgctcctgccgctggccttgctgctccacgccgccaggccggaagtgcagctggttgaatctggcggaggactggttcaggctggcggatctctgagactgtcttgtgccgccagcggcagaacctttagcatgggctggtttagacaggcccctggcaaagagagagagttcgtcgccgccatcacatactctggcggcagcccttactacgccgactctgtgaagggcagattcaccatcagccgggacaacgccaagaacaccgtgtacctccagatgaacagcctgaagcctgaggacaccgccgtgtactactgcgccgccaatccaacatacggcagcgactggaacgccgagaattggggccagggaacccaagtgacagtgtctagcggtaccggcggaggcggatctggcggcggaggtagcggtggcggaggatctgaattcgacatccagatgacacagagccctagcagcctgtctgccagcgtgggagacagagtgaccatcacatgcaagagcagccagagcctgctggactccgatggcaagacctacctgaactggtatcagcagaagcccggcaaggcccctaagctgctgatctacctggtgtccaagctggatagcggcgtgcccagcagattttctggcagcggcagcggaaccgacttcaccctgacaatatccagcctccagcctgaggacttcgccacctactactgcttccaaggcacccactttccattcaccttcggccagggcaccaaggtggaaatcaaaagactcgaggacctgaagaacgtgttcccacctgaggtggccgtgttcgagcctagcgaggccgagatcagccacacccagaaagccaccctcgtgtgcctggctaccggcttctaccccgaccatgtggaactgtcttggtgggtcaacggcaaagaggtgcacagcggcgtgtgtaccgacccccagccactgaaagaacagcccgccctgaacgacagccggtactgcctgagcagcagactgagagtgtccgccaccttctggcagaacccccggaaccacttcagatgccaggtgcagttctacggcctgagcgagaacgacgagtggacccaggacagagccaagcccgtgacccagatcgtgtctgccgaagcctggggcagagccgattgcgacgtgaagctggtggaaaagagcttcgagacagacaccaacctgaacttccagaacctgagcgtgatcggcttcagaatcctgctgctgaaagtggccggctttaacctgctgatgaccctgcggctgtggtccagcagggccaagcgatctggatctggagcaacaaacttctcactactcaaacaagcaggtgacgtggaggagaatcccgggcctactagtgccaccatggactggatttggcgcatccttttccttgtcggcgctgctaccggcgcccattccgggcccgaagtgcaactggttgaatccggtggcggcctggtgcaagcaggcggatctctcagacttagctgtgccgcctccggcagaaccttcacaatgggatggtttaggcaggctccagggaaagagagagagttcgtcgccgccatctctctgtctcccacactggcctactacgccgactctgtgaaaggccggttcaccatctccagagataatgccaagaacaccgtggtgctgcaaatgaactctctgaaacccgaggatacagccctgtactattgtgccgctgaccggaagtccgtgatgagcatcagacccgattactggggacagggcacacaagtcacagtgtcctctggatccggcggcggaggatctggcggaggcggatctgggggcggaggctctttcgaagaagtgcagctggttgaatcaggcggaggactggttcagcctggcggatctctgagactgtcttgtgccgccagcggctacaccttcaccaactactggatgaactgggtccgacaggcccctggcaaaggactggaatgggtcggaatgatcgaccccagcgacagcgagacacactacaaccacatcttcaaggaccgcttcaccatcagcgccgacaccagcaagaataccgcctacctccagatgaactccctgagagccgaggacaccgccgtgtactactgcgccagaaacctgtatctgtggggccagggaaccctggtcacagtgtcatctacgcgtatccagaaccctgatcctgccgtgtaccagctgcgggatagcaagagcagcgacaagagcgtgtgtctgttcaccgacttcgacagccagaccaacgtgtcccagagcaaggactccgacgtgtacatcaccgataagtgcgtgctggacatgcggagcatggacttcaagagcaactccgccgtggcctggtccaacaagtccgatttcgcctgcgccaacgccttcaacaacagcattatccccgaggacacattcttcccaagccccgagagcagctgcggctttaccagcgagagctaccagcagggcgtgctgagcgccaccatcctgtacgagatcctgctgggcaaggccaccctgtacgccgtgctggtgtctgccctggtgctgatggctatggtcaagcggaaggacagccggggacgcgccaagagaagcggatctggcgtgaagcagaccctgaatttcgacctgctgaagctggctggcgacgtggaatccaacccaggcccttctagaggccatatgaccgagtacaagcccacggtgcgcctcgccacccgcgacgacgtccccagggccgtacgcaccctcgccgccgcgttcgccgactaccccgccacgcgccacaccgtcgatccggaccgccacatcgagcgggtcaccgagctgcaagaactcttcctcacgcgcgtcgggctcgacatcggcaaggtgtgggtcgcggacgacggcgccgcggtggcggtctggaccacgccggagagcgtcgaagcgggggcggtgttcgccgagatcggcccgcgcatggccgagttgagcggttcccggctggccgcgcagcaacagatggaaggcctcctggcgccgcaccggcccaaggagcccgcgtggttcctggccaccgtcggcgtctcgcccgaccaccagggcaagggtctgggcagcgccgtcgtgctccccggagtggaggcggccgagcgcgccggggtgcccgccttcctggagacctccgcgccccgcaacctccccttctacgagcggctcggcttcaccgtcaccgccgacgtcgaggtgcccgaaggaccgcgcacctggtgcatgacccgcaagcccggtgcctga

SEQ ID NO: 37383 - DNA, 2301 bp, synthetic construct
  source 1..2301: mol_type = other DNA
atggccttaccagtgaccgccttgctcctgccgctggccttgctgctccacgccgccaggccggaagtgcagctggttgaatctggcggaggactggttcagcctggcggatctctgagactgtcttgtgccgcctctggcttcgccagcgactactatatcatcggctggttcagacaggcccctggcaaagagagagagggcgtcagctgtatcagcagcagatacgccaacaccaactacgccgacagcgtgaagggcagattcaccatcagccgggacaacgccaagaacaccgtgtacctccagatgaacagcctgaagcctgaggacaccgccgtgtactactgtgccgccgacaccagaagatacacctgtcctgacattgccaccatgcaccggaacttcgattcttggggccagggcacactggtcaccgtttcttctggtaccggcggaggcggatctggcggcggaggtagcggtggcggaggatctgaattcgacatccagatgacacagagccctagcagcctgtctgccagcgtgggagacagagtgaccatcacatgcaagagcagccagagcctgctggactccgatggcaagacctacctgaactggtatcagcagaagcccggcaaggcccctaagctgctgatctacctggtgtccaagctggatagcggcgtgcccagcagattttctggcagcggcagcggaaccgacttcaccctgacaatatccagcctccagcctgaggacttcgccacctactactgcttccaaggcacccactttccattcaccttcggccagggcaccaaggtggaaatcaaaagactcgaggacctgaagaacgtgttcccacctgaggtggccgtgttcgagcctagcgaggccgagatcagccacacccagaaagccaccctcgtgtgcctggctaccggcttctaccccgaccatgtggaactgtcttggtgggtcaacggcaaagaggtgcacagcggcgtgtgtaccgacccccagccactgaaagaacagcccgccctgaacgacagccggtactgcctgagcagcagactgagagtgtccgccaccttctggcagaacccccggaaccacttcagatgccaggtgcagttctacggcctgagcgagaacgacgagtggacccaggacagagccaagcccgtgacccagatcgtgtctgccgaagcctggggcagagccgattgcgacgtgaagctggtggaaaagagcttcgagacagacaccaacctgaacttccagaacctgagcgtgatcggcttcagaatcctgctgctgaaagtggccggctttaacctgctgatgaccctgcggctgtggtccagcagggccaagcgatctggatctggagcaacaaacttctcactactcaaacaagcaggtgacgtggaggagaatcccgggcctactagtatggactggatttggcgcatccttttccttgtcggcgctgctaccggcgcgcattccttcgaagaagtgcagctggttgaatcaggcggaggactggttcagcctggcggatctctgagactgtcttgtgccgccagcggctacaccttcaccaactactggatgaactgggtccgacaggcccctggcaaaggactggaatgggtcggaatgatcgaccccagcgacagcgagacacactacaaccacatcttcaaggaccgcttcaccatcagcgccgacaccagcaagaataccgcctacctccagatgaactccctgagagccgaggacaccgccgtgtactactgcgccagaaacctgtatctgtggggccagggaaccctggtcacagtgtcatctacgcgtatccagaaccctgatcctgccgtgtaccagctgcgggatagcaagagcagcgacaagagcgtgtgtctgttcaccgacttcgacagccagaccaacgtgtcccagagcaaggactccgacgtgtacatcaccgataagtgcgtgctggacatgcggagcatggacttcaagagcaactccgccgtggcctggtccaacaagtccgatttcgcctgcgccaacgccttcaacaacagcattatccccgaggacacattcttcccaagccccgagagcagctgcggctttaccagcgagagctaccagcagggcgtgctgagcgccaccatcctgtacgagatcctgctgggcaaggccaccctgtacgccgtgctggtgtctgccctggtgctgatggctatggtcaagcggaaggacagccggggataa

SEQ ID NO: 37384 - DNA, 2301 bp, synthetic construct
  source 1..2301: mol_type = other DNA
atggccttaccagtgaccgccttgctcctgccgctggccttgctgctccacgccgccaggccggaagtgcagctggttgaatctggcggaggactggttcagcctggcggatctctgagactgagctgtgaagccagcggcttcgccagcgacgattacatcatcggctggttcagacaggcccctggcaaagagagagagggcgtcagctgcatcagctctaagtacgccaacaccgtgtacaccgacagcgtgaagggcagattcagactgagcagaggcaccgccaagaataccgtgtacctccagatgagcgccctgaagcctgaggataccgccgtgtactactgcgctatggacagccgcagagtgacatgccctgagatcagcaccatgcaccggaacttcgattcttggggccagggcacactggtcacagtgtcatctggtaccggcggaggcggatctggcggcggaggtagcggtggcggaggatctgaattcgacatccagatgacacagagccctagcagcctgtctgccagcgtgggagacagagtgaccatcacatgcaagagcagccagagcctgctggactccgatggcaagacctacctgaactggtatcagcagaagcccggcaaggcccctaagctgctgatctacctggtgtccaagctggatagcggcgtgcccagcagattttctggcagcggcagcggaaccgacttcaccctgacaatatccagcctccagcctgaggacttcgccacctactactgcttccaaggcacccactttccattcaccttcggccagggcaccaaggtggaaatcaaaagactcgaggacctgaagaacgtgttcccacctgaggtggccgtgttcgagcctagcgaggccgagatcagccacacccagaaagccaccctcgtgtgcctggctaccggcttctaccccgaccatgtggaactgtcttggtgggtcaacggcaaagaggtgcacagcggcgtgtgtaccgacccccagccactgaaagaacagcccgccctgaacgacagccggtactgcctgagcagcagactgagagtgtccgccaccttctggcagaacccccggaaccacttcagatgccaggtgcagttctacggcctgagcgagaacgacgagtggacccaggacagagccaagcccgtgacccagatcgtgtctgccgaagcctggggcagagccgattgcgacgtgaagctggtggaaaagagcttcgagacagacaccaacctgaacttccagaacctgagcgtgatcggcttcagaatcctgctgctgaaagtggccggctttaacctgctgatgaccctgcggctgtggtccagcagggccaagcgatctggatctggagcaacaaacttctcactactcaaacaagcaggtgacgtggaggagaatcccgggcctactagtatggactggatttggcgcatccttttccttgtcggcgctgctaccggcgcgcattccttcgaagaagtgcagctggttgaatcaggcggaggactggttcagcctggcggatctctgagactgtcttgtgccgccagcggctacaccttcaccaactactggatgaactgggtccgacaggcccctggcaaaggactggaatgggtcggaatgatcgaccccagcgacagcgagacacactacaaccacatcttcaaggaccgcttcaccatcagcgccgacaccagcaagaataccgcctacctccagatgaactccctgagagccgaggacaccgccgtgtactactgcgccagaaacctgtatctgtggggccagggaaccctggtcacagtgtcatctacgcgtatccagaaccctgatcctgccgtgtaccagctgcgggatagcaagagcagcgacaagagcgtgtgtctgttcaccgacttcgacagccagaccaacgtgtcccagagcaaggactccgacgtgtacatcaccgataagtgcgtgctggacatgcggagcatggacttcaagagcaactccgccgtggcctggtccaacaagtccgatttcgcctgcgccaacgccttcaacaacagcattatccccgaggacacattcttcccaagccccgagagcagctgcggctttaccagcgagagctaccagcagggcgtgctgagcgccaccatcctgtacgagatcctgctgggcaaggccaccctgtacgccgtgctggtgtctgccctggtgctgatggctatggtcaagcggaaggacagccggggataa

SEQ ID NO: 37385 - DNA, 2298 bp, synthetic construct
  source 1..2298: mol_type = other DNA
atggccttaccagtgaccgccttgctcctgccgctggccttgctgctccacgccgccaggccggaagtgcagctggttgaatctggcggaggactggttcagcctggcggatctctgagactgtcttgtgccgcctctggcttcgccagcgactactatatcatcggctggttcagacaggcccctggcaaagagagagagggcgtcagctgtatcagcagcagatacgccaacaccaactacgccgacagcgtgaagggcagattcaccatcagccgggacaacgccaagaacaccgtgtacctccagatgaacagcctgaagcctgaggacaccgccgtgtactactgtgccgccgacaccagaagatacacctgtcctgacattgccaccatgcaccggaacttcgattcttggggccagggcacactggtcaccgtttcttctggtaccggcggaggcggatctggcggcggaggtagcggtggcggaggatctgaattcgacatccagatgacacagagccctagcagcctgtctgccagcgtgggagacagagtgaccatcacatgcaagagcagccagagcctgctggactccgatggcaagacctacctgaactggtatcagcagaagcccggcaaggcccctaagctgctgatctacctggtgtccaagctggatagcggcgtgcccagcagattttctggcagcggcagcggaaccgacttcaccctgacaatatccagcctccagcctgaggacttcgccacctactactgcttccaaggcacccactttccattcaccttcggccagggcaccaaggtggaaatcaaaagactcgagatccagaaccctgatcctgccgtgtaccagctgcgggatagcaagagcagcgacaagagcgtgtgtctgttcaccgacttcgacagccagaccaacgtgtcccagagcaaggactccgacgtgtacatcaccgataagtgcgtgctggacatgcggagcatggacttcaagagcaactccgccgtggcctggtccaacaagtccgatttcgcctgcgccaacgccttcaacaacagcattatccccgaggacacattcttcccaagccccgagagcagctgcggctttaccagcgagagctaccagcagggcgtgctgagcgccaccatcctgtacgagatcctgctgggcaaggccaccctgtacgccgtgctggtgtctgccctggtgctgatggctatggtcaagcggaaggacagccggggaagggccaagcgatctggatctggagcaacaaacttctcactactcaaacaagcaggtgacgtggaggagaatcccgggcctactagtatggactggatttggcgcatccttttccttgtcggcgctgctaccggcgcgcattccttcgaagaagtgcagctggttgaatcaggcggaggactggttcagcctggcggatctctgagactgtcttgtgccgccagcggctacaccttcaccaactactggatgaactgggtccgacaggcccctggcaaaggactggaatgggtcggaatgatcgaccccagcgacagcgagacacactacaaccacatcttcaaggaccgcttcaccatcagcgccgacaccagcaagaataccgcctacctccagatgaactccctgagagccgaggacaccgccgtgtactactgcgccagaaacctgtatctgtggggccagggaaccctggtcacagtgtcatctacgcgtgacctgaagaacgtgttcccacctgaggtggccgtgttcgagcctagcgaggccgagatcagccacacccagaaagccaccctcgtgtgcctggctaccggcttctaccccgaccatgtggaactgtcttggtgggtcaacggcaaagaggtgcacagcggcgtgtgtaccgacccccagccactgaaagaacagcccgccctgaacgacagccggtactgcctgagcagcagactgagagtgtccgccaccttctggcagaacccccggaaccacttcagatgccaggtgcagttctacggcctgagcgagaacgacgagtggacccaggacagagccaagcccgtgacccagatcgtgtctgccgaagcctggggcagagccgattgcgacgtgaagctggtggaaaagagcttcgagacagacaccaacctgaacttccagaacctgagcgtgatcggcttcagaatcctgctgctgaaagtggccggctttaacctgctgatgaccctgcggctgtggtccagc

SEQ ID NO: 37386 - DNA, 2298 bp, synthetic construct
  source 1..2298: mol_type = other DNA
atggccttaccagtgaccgccttgctcctgccgctggccttgctgctccacgccgccaggccggaagtgcagctggttgaatctggcggaggactggttcagcctggcggatctctgagactgagctgtgaagccagcggcttcgccagcgacgattacatcatcggctggttcagacaggcccctggcaaagagagagagggcgtcagctgcatcagctctaagtacgccaacaccgtgtacaccgacagcgtgaagggcagattcagactgagcagaggcaccgccaagaataccgtgtacctccagatgagcgccctgaagcctgaggataccgccgtgtactactgcgctatggacagccgcagagtgacatgccctgagatcagcaccatgcaccggaacttcgattcttggggccagggcacactggtcacagtgtcatctggtaccggcggaggcggatctggcggcggaggtagcggtggcggaggatctgaattcgacatccagatgacacagagccctagcagcctgtctgccagcgtgggagacagagtgaccatcacatgcaagagcagccagagcctgctggactccgatggcaagacctacctgaactggtatcagcagaagcccggcaaggcccctaagctgctgatctacctggtgtccaagctggatagcggcgtgcccagcagattttctggcagcggcagcggaaccgacttcaccctgacaatatccagcctccagcctgaggacttcgccacctactactgcttccaaggcacccactttccattcaccttcggccagggcaccaaggtggaaatcaaaagactcgagatccagaaccctgatcctgccgtgtaccagctgcgggatagcaagagcagcgacaagagcgtgtgtctgttcaccgacttcgacagccagaccaacgtgtcccagagcaaggactccgacgtgtacatcaccgataagtgcgtgctggacatgcggagcatggacttcaagagcaactccgccgtggcctggtccaacaagtccgatttcgcctgcgccaacgccttcaacaacagcattatccccgaggacacattcttcccaagccccgagagcagctgcggctttaccagcgagagctaccagcagggcgtgctgagcgccaccatcctgtacgagatcctgctgggcaaggccaccctgtacgccgtgctggtgtctgccctggtgctgatggctatggtcaagcggaaggacagccggggaagggccaagcgatctggatctggagcaacaaacttctcactactcaaacaagcaggtgacgtggaggagaatcccgggcctactagtatggactggatttggcgcatccttttccttgtcggcgctgctaccggcgcgcattccttcgaagaagtgcagctggttgaatcaggcggaggactggttcagcctggcggatctctgagactgtcttgtgccgccagcggctacaccttcaccaactactggatgaactgggtccgacaggcccctggcaaaggactggaatgggtcggaatgatcgaccccagcgacagcgagacacactacaaccacatcttcaaggaccgcttcaccatcagcgccgacaccagcaagaataccgcctacctccagatgaactccctgagagccgaggacaccgccgtgtactactgcgccagaaacctgtatctgtggggccagggaaccctggtcacagtgtcatctacgcgtgacctgaagaacgtgttcccacctgaggtggccgtgttcgagcctagcgaggccgagatcagccacacccagaaagccaccctcgtgtgcctggctaccggcttctaccccgaccatgtggaactgtcttggtgggtcaacggcaaagaggtgcacagcggcgtgtgtaccgacccccagccactgaaagaacagcccgccctgaacgacagccggtactgcctgagcagcagactgagagtgtccgccaccttctggcagaacccccggaaccacttcagatgccaggtgcagttctacggcctgagcgagaacgacgagtggacccaggacagagccaagcccgtgacccagatcgtgtctgccgaagcctggggcagagccgattgcgacgtgaagctggtggaaaagagcttcgagacagacaccaacctgaacttccagaacctgagcgtgatcggcttcagaatcctgctgctgaaagtggccggctttaacctgctgatgaccctgcggctgtggtccagc

SEQ ID NO: 37387 - DNA, 2271 bp, synthetic construct
  source 1..2271: mol_type = other DNA
atggccttaccagtgaccgccttgctcctgccgctggccttgctgctccacgccgccaggccgcaagtcaaactggaagaaagcggtggcggcctggtgcaacctggcgaatctctgagactgagctgtagcgccagcggctccatcttcaaggtgttcagagtgttcgccatgagctggtacaggcaaggccctggcaagcagagagagctggtcgcctctatcagcagcggcgagacaaccacatacgccgaatctgtgaaaggccggttcaccatcagccgggataatgccaagaataccgcctatctccagatggactccctgaagcctgaagatacagctgtgtactactgcaacgccgaccataccttcaccggcgatttttggggccagggaacccaagtgaccgtgtctagtggtaccggcggaggcggatctggcggcggaggtagcggtggcggaggatctgaattcgacatccagatgacacagagccctagcagcctgtctgccagcgtgggagacagagtgaccatcacatgcaagagcagccagagcctgctggactccgatggcaagacctacctgaactggtatcagcagaagcccggcaaggcccctaagctgctgatctacctggtgtccaagctggatagcggcgtgcccagcagattttctggcagcggcagcggaaccgacttcaccctgacaatatccagcctccagcctgaggacttcgccacctactactgcttccaaggcacccactttccattcaccttcggccagggcaccaaggtggaaatcaaaagactcgagatccagaaccctgatcctgccgtgtaccagctgcgggatagcaagagcagcgacaagagcgtgtgtctgttcaccgacttcgacagccagaccaacgtgtcccagagcaaggactccgacgtgtacatcaccgataagtgcgtgctggacatgcggagcatggacttcaagagcaactccgccgtggcctggtccaacaagtccgatttcgcctgcgccaacgccttcaacaacagcattatccccgaggacacattcttcccaagccccgagagcagctgcggctttaccagcgagagctaccagcagggcgtgctgagcgccaccatcctgtacgagatcctgctgggcaaggccaccctgtacgccgtgctggtgtctgccctggtgctgatggctatggtcaagcggaaggacagccggggaagggccaagcgatctggatctggagcaacaaacttctcactactcaaacaagcaggtgacgtggaggagaatcccgggcctactagtatggactggatttggcgcatccttttccttgtcggcgctgctaccggcgcgcattccttcgaagaagtgcagctggttgaatcaggcggaggactggttcagcctggcggatctctgagactgtcttgtgccgccagcggctacaccttcaccaactactggatgaactgggtccgacaggcccctggcaaaggactggaatgggtcggaatgatcgaccccagcgacagcgagacacactacaaccacatcttcaaggaccgcttcaccatcagcgccgacaccagcaagaataccgcctacctccagatgaactccctgagagccgaggacaccgccgtgtactactgcgccagaaacctgtatctgtggggccagggaaccctggtcacagtgtcatctacgcgtgacctgaagaacgtgttcccacctgaggtggccgtgttcgagcctagcgaggccgagatcagccacacccagaaagccaccctcgtgtgcctggctaccggcttctaccccgaccatgtggaactgtcttggtgggtcaacggcaaagaggtgcacagcggcgtgtgtaccgacccccagccactgaaagaacagcccgccctgaacgacagccggtactgcctgagcagcagactgagagtgtccgccaccttctggcagaacccccggaaccacttcagatgccaggtgcagttctacggcctgagcgagaacgacgagtggacccaggacagagccaagcccgtgacccagatcgtgtctgccgaagcctggggcagagccgattgcgacgtgaagctggtggaaaagagcttcgagacagacaccaacctgaacttccagaacctgagcgtgatcggcttcagaatcctgctgctgaaagtggccggctttaacctgctgatgaccctgcggctgtggtccagc

SEQ ID NO: 37388 - DNA, 2277 bp, synthetic construct
  source 1..2277: mol_type = other DNA
atggccttaccagtgaccgccttgctcctgccgctggccttgctgctccacgccgccaggccggacatccagatgacacagagccctagcagcctgtctgccagcgtgggagacagagtgaccatcacatgcaagagcagccagagcctgctggactccgatggcaagacctacctgaactggtatcagcagaagcccggcaaggcccctaagctgctgatctacctggtgtccaagctggatagcggcgtgcccagcagattttctggcagcggcagcggaaccgacttcaccctgacaatatccagcctccagcctgaggacttcgccacctactactgcttccaaggcacccactttccattcaccttcggccagggcaccaaggtggaaatcaaaagactcgaggacctgaagaacgtgttcccacctgaggtggccgtgttcgagcctagcgaggccgagatcagccacacccagaaagccaccctcgtgtgcctggctaccggcttctaccccgaccatgtggaactgtcttggtgggtcaacggcaaagaggtgcacagcggcgtgtgtaccgacccccagccactgaaagaacagcccgccctgaacgacagccggtactgcctgagcagcagactgagagtgtccgccaccttctggcagaacccccggaaccacttcagatgccaggtgcagttctacggcctgagcgagaacgacgagtggacccaggacagagccaagcccgtgacccagatcgtgtctgccgaagcctggggcagagccgattgcgacgtgaagctggtggaaaagagcttcgagacagacaccaacctgaacttccagaacctgagcgtgatcggcttcagaatcctgctgctgaaagtggccggctttaacctgctgatgaccctgcggctgtggtccagcagggccaagcgatctggatctggagcaacaaacttctcactactcaaacaagcaggtgacgtggaggagaatcccgggcctactagtgccaccatggactggatttggcgcatccttttccttgtcggcgctgctaccggcgcccattccgggcccgaagtgcagctggttgaatctggcggaggactggttcaggctggcggatctctgagactgtcttgtgccgccagcggcagaacctttagcatgggctggtttagacaggcccctggcaaagagagagagttcgtcgccgccatcacatactctggcggcagcccttactacgccgactctgtgaagggcagattcaccatcagccgggacaacgccaagaacaccgtgtacctccagatgaacagcctgaagcctgaggacaccgccgtgtactactgcgccgccaatccaacatacggcagcgactggaacgccgagaattggggccagggaacccaagtgacagtgtctagcggatccggcggcggaggatctggcggaggcggatctgggggcggaggctctttcgaagaagtgcagctggttgaatcaggcggaggactggttcagcctggcggatctctgagactgtcttgtgccgccagcggctacaccttcaccaactactggatgaactgggtccgacaggcccctggcaaaggactggaatgggtcggaatgatcgaccccagcgacagcgagacacactacaaccacatcttcaaggaccgcttcaccatcagcgccgacaccagcaagaataccgcctacctccagatgaactccctgagagccgaggacaccgccgtgtactactgcgccagaaacctgtatctgtggggccagggaaccctggtcacagtgtcatctacgcgtatccagaaccctgatcctgccgtgtaccagctgcgggatagcaagagcagcgacaagagcgtgtgtctgttcaccgacttcgacagccagaccaacgtgtcccagagcaaggactccgacgtgtacatcaccgataagtgcgtgctggacatgcggagcatggacttcaagagcaactccgccgtggcctggtccaacaagtccgatttcgcctgcgccaacgccttcaacaacagcattatccccgaggacacattcttcccaagccccgagagcagctgcggctttaccagcgagagctaccagcagggcgtgctgagcgccaccatcctgtacgagatcctgctgggcaaggccaccctgtacgccgtgctggtgtctgccctggtgctgatggctatggtcaagcggaaggacagccggggataa

SEQ ID NO: 37389 - DNA, 2280 bp, synthetic construct
  source 1..2280: mol_type = other DNA
atggccttaccagtgaccgccttgctcctgccgctggccttgctgctccacgccgccaggccggacatccagatgacacagagccctagcagcctgtctgccagcgtgggagacagagtgaccatcacatgcaagagcagccagagcctgctggactccgatggcaagacctacctgaactggtatcagcagaagcccggcaaggcccctaagctgctgatctacctggtgtccaagctggatagcggcgtgcccagcagattttctggcagcggcagcggaaccgacttcaccctgacaatatccagcctccagcctgaggacttcgccacctactactgcttccaaggcacccactttccattcaccttcggccagggcaccaaggtggaaatcaaaagactcgaggacctgaagaacgtgttcccacctgaggtggccgtgttcgagcctagcgaggccgagatcagccacacccagaaagccaccctcgtgtgcctggctaccggcttctaccccgaccatgtggaactgtcttggtgggtcaacggcaaagaggtgcacagcggcgtgtgtaccgacccccagccactgaaagaacagcccgccctgaacgacagccggtactgcctgagcagcagactgagagtgtccgccaccttctggcagaacccccggaaccacttcagatgccaggtgcagttctacggcctgagcgagaacgacgagtggacccaggacagagccaagcccgtgacccagatcgtgtctgccgaagcctggggcagagccgattgcgacgtgaagctggtggaaaagagcttcgagacagacaccaacctgaacttccagaacctgagcgtgatcggcttcagaatcctgctgctgaaagtggccggctttaacctgctgatgaccctgcggctgtggtccagcagggccaagcgatctggatctggagcaacaaacttctcactactcaaacaagcaggtgacgtggaggagaatcccgggcctactagtgccaccatggactggatttggcgcatccttttccttgtcggcgctgctaccggcgcccattccgggcccgaagtgcaactggtggaatctgggggcggactggtgcagccaggcggaagtctgaggctgtcttgtgccgcctccggcagcatcttcggcttcaacgacatggcctggtatcggcaggctcccggaaaacagcgcgagctggtggctctgattagcagagtgggcgtgaccagcagcgccgactctgtgaagggcagattcacaatctccagagtgaacgccaaggatacagtgtacctccagatgaactctctgaaacctgaggatacagcagtgtactattgctacatggaccagcggctggacggcagcacactggcctactggggacagggaactcaagtgacagtgtctagcggatccggcggcggaggatctggcggaggcggatctgggggcggaggctctttcgaagaagtgcagctggttgaatcaggcggaggactggttcagcctggcggatctctgagactgtcttgtgccgccagcggctacaccttcaccaactactggatgaactgggtccgacaggcccctggcaaaggactggaatgggtcggaatgatcgaccccagcgacagcgagacacactacaaccacatcttcaaggaccgcttcaccatcagcgccgacaccagcaagaataccgcctacctccagatgaactccctgagagccgaggacaccgccgtgtactactgcgccagaaacctgtatctgtggggccagggaaccctggtcacagtgtcatctacgcgtatccagaaccctgatcctgccgtgtaccagctgcgggatagcaagagcagcgacaagagcgtgtgtctgttcaccgacttcgacagccagaccaacgtgtcccagagcaaggactccgacgtgtacatcaccgataagtgcgtgctggacatgcggagcatggacttcaagagcaactccgccgtggcctggtccaacaagtccgatttcgcctgcgccaacgccttcaacaacagcattatccccgaggacacattcttcccaagccccgagagcagctgcggctttaccagcgagagctaccagcagggcgtgctgagcgccaccatcctgtacgagatcctgctgggcaaggccaccctgtacgccgtgctggtgtctgccctggtgctgatggctatggtcaagcggaaggacagccggggataa

SEQ ID NO: 37390 - DNA, 2268 bp, synthetic construct
  source 1..2268: mol_type = other DNA
atggccttaccagtgaccgccttgctcctgccgctggccttgctgctccacgccgccaggccggacatccagatgacacagagccctagcagcctgtctgccagcgtgggagacagagtgaccatcacatgcaagagcagccagagcctgctggactccgatggcaagacctacctgaactggtatcagcagaagcccggcaaggcccctaagctgctgatctacctggtgtccaagctggatagcggcgtgcccagcagattttctggcagcggcagcggaaccgacttcaccctgacaatatccagcctccagcctgaggacttcgccacctactactgcttccaaggcacccactttccattcaccttcggccagggcaccaaggtggaaatcaaaagactcgaggacctgaagaacgtgttcccacctgaggtggccgtgttcgagcctagcgaggccgagatcagccacacccagaaagccaccctcgtgtgcctggctaccggcttctaccccgaccatgtggaactgtcttggtgggtcaacggcaaagaggtgcacagcggcgtgtgtaccgacccccagccactgaaagaacagcccgccctgaacgacagccggtactgcctgagcagcagactgagagtgtccgccaccttctggcagaacccccggaaccacttcagatgccaggtgcagttctacggcctgagcgagaacgacgagtggacccaggacagagccaagcccgtgacccagatcgtgtctgccgaagcctggggcagagccgattgcgacgtgaagctggtggaaaagagcttcgagacagacaccaacctgaacttccagaacctgagcgtgatcggcttcagaatcctgctgctgaaagtggccggctttaacctgctgatgaccctgcggctgtggtccagcagggccaagcgatctggatctggagcaacaaacttctcactactcaaacaagcaggtgacgtggaggagaatcccgggcctactagtgccaccatggactggatttggcgcatccttttccttgtcggcgctgctaccggcgcccattccgggcccgaggtgcagctggttgaatctggcggaggactggttcaggctggcggatctctgagactgtcttgtgccgccagcggctctgtgttcagcggcaatgtgatgggctggtacagacaggcccctggcaaagaaagagagtgggttgccgccattgccagcggcggcagcatctactacagagactctgtgaagggcagattcaccatcagccgggacaacgccaagaacaccgtgtacctccagatgaacagcctgaagcctgaggacaccgccgtgtactactgcaactctcaccctcctacactgccctattggggcctgggaacccaagtgacagtgtcctctggatccggcggcggaggatctggcggaggcggatctgggggcggaggctctttcgaagaagtgcagctggttgaatcaggcggaggactggttcagcctggcggatctctgagactgtcttgtgccgccagcggctacaccttcaccaactactggatgaactgggtccgacaggcccctggcaaaggactggaatgggtcggaatgatcgaccccagcgacagcgagacacactacaaccacatcttcaaggaccgcttcaccatcagcgccgacaccagcaagaataccgcctacctccagatgaactccctgagagccgaggacaccgccgtgtactactgcgccagaaacctgtatctgtggggccagggaaccctggtcacagtgtcatctacgcgtatccagaaccctgatcctgccgtgtaccagctgcgggatagcaagagcagcgacaagagcgtgtgtctgttcaccgacttcgacagccagaccaacgtgtcccagagcaaggactccgacgtgtacatcaccgataagtgcgtgctggacatgcggagcatggacttcaagagcaactccgccgtggcctggtccaacaagtccgatttcgcctgcgccaacgccttcaacaacagcattatccccgaggacacattcttcccaagccccgagagcagctgcggctttaccagcgagagctaccagcagggcgtgctgagcgccaccatcctgtacgagatcctgctgggcaaggccaccctgtacgccgtgctggtgtctgccctggtgctgatggctatggtcaagcggaaggacagccggggataa

SEQ ID NO: 37391 - DNA, 2262 bp, synthetic construct
  source 1..2262: mol_type = other DNA
atggccttaccagtgaccgccttgctcctgccgctggccttgctgctccacgccgccaggccggacatccagatgacacagagccctagcagcctgtctgccagcgtgggagacagagtgaccatcacatgcaagagcagccagagcctgctggactccgatggcaagacctacctgaactggtatcagcagaagcccggcaaggcccctaagctgctgatctacctggtgtccaagctggatagcggcgtgcccagcagattttctggcagcggcagcggaaccgacttcaccctgacaatatccagcctccagcctgaggacttcgccacctactactgcttccaaggcacccactttccattcaccttcggccagggcaccaaggtggaaatcaaaagactcgaggacctgaagaacgtgttcccacctgaggtggccgtgttcgagcctagcgaggccgagatcagccacacccagaaagccaccctcgtgtgcctggctaccggcttctaccccgaccatgtggaactgtcttggtgggtcaacggcaaagaggtgcacagcggcgtgtgtaccgacccccagccactgaaagaacagcccgccctgaacgacagccggtactgcctgagcagcagactgagagtgtccgccaccttctggcagaacccccggaaccacttcagatgccaggtgcagttctacggcctgagcgagaacgacgagtggacccaggacagagccaagcccgtgacccagatcgtgtctgccgaagcctggggcagagccgattgcgacgtgaagctggtggaaaagagcttcgagacagacaccaacctgaacttccagaacctgagcgtgatcggcttcagaatcctgctgctgaaagtggccggctttaacctgctgatgaccctgcggctgtggtccagcagggccaagcgatctggatctggagcaacaaacttctcactactcaaacaagcaggtgacgtggaggagaatcccgggcctactagtgccaccatggactggatttggcgcatccttttccttgtcggcgctgctaccggcgcccattccgggcccgaagttcagctgctggaatctggcggaggactcgttcaacctggcggctctctgagactgagctgtgccgcttctggcttcagcttctctagctacgccctgagctgggttcgacaagctcccggaaagggccttgaatgggtgtccagcatcggcgagaatgacggcaccacagactatgccgatgccgtgaaaggccggtttaccatcagcagagacaattccaagaacacgctctatctgcaaatgaactccctgcgcgtggaagatacagccgtgtattattgcgtgaaggacggcatccactggggacagggaaccctggttacagtgtctagcggatccggcggcggaggatctggcggaggcggatctgggggcggaggctctttcgaagaagtgcagctggttgaatcaggcggaggactggttcagcctggcggatctctgagactgtcttgtgccgccagcggctacaccttcaccaactactggatgaactgggtccgacaggcccctggcaaaggactggaatgggtcggaatgatcgaccccagcgacagcgagacacactacaaccacatcttcaaggaccgcttcaccatcagcgccgacaccagcaagaataccgcctacctccagatgaactccctgagagccgaggacaccgccgtgtactactgcgccagaaacctgtatctgtggggccagggaaccctggtcacagtgtcatctacgcgtatccagaaccctgatcctgccgtgtaccagctgcgggatagcaagagcagcgacaagagcgtgtgtctgttcaccgacttcgacagccagaccaacgtgtcccagagcaaggactccgacgtgtacatcaccgataagtgcgtgctggacatgcggagcatggacttcaagagcaactccgccgtggcctggtccaacaagtccgatttcgcctgcgccaacgccttcaacaacagcattatccccgaggacacattcttcccaagccccgagagcagctgcggctttaccagcgagagctaccagcagggcgtgctgagcgccaccatcctgtacgagatcctgctgggcaaggccaccctgtacgccgtgctggtgtctgccctggtgctgatggctatggtcaagcggaaggacagccggggataa

SEQ ID NO: 37392 - DNA, 3369 bp, synthetic construct
  source 1..3369: mol_type = other DNA
atgggacccagactgctgttttgggctctgctgtgtctgctcggcacaggacctgttgaagctggcgtgacacagagccccacacacctgattaagaccagaggccagcaggccacactgagatgcagccctatcagcggccacaccagcgtgtactggtatcagcaggctctcggactgggcctccagttcctgctttggtacgacgagggcgaagagagaaaccggggcaacttccctcctcggttttccggcagacagttccccaactacagcagcgagctgaacgtgaacgccctggaactggaagatagcgccctgtacctgtgtgcctcttctcttggtggacctcgcggactggctggactgagaggggatgagcagtttttcggccctggcaccagactgaccgtgctggaaggtaccggcggaggcggatctggcggcggagaattcgacatccagatgacacagagccctagcagcctgtctgccagcgtgggagacagagtgaccatcacatgcaagagcagccagagcctgctggactccgatggcaagacctacctgaactggtatcagcagaagcccggcaaggcccctaagctgctgatctacctggtgtccaagctggatagcggcgtgcccagcagattttctggcagcggcagcggaaccgacttcaccctgacaatatccagcctccagcctgaggacttcgccacctactactgcttccaaggcacccactttccattcaccttcggccagggcaccaaggtggaaatcaaaagactcgaggacctgaagaacgtgttcccacctgaggtggccgtgttcgagcctagcgaggccgagatcagccacacccagaaagccaccctcgtgtgcctggctaccggcttctaccccgaccatgtggaactgtcttggtgggtcaacggcaaagaggtgcacagcggcgtgtgtaccgacccccagccactgaaagaacagcccgccctgaacgacagccggtactgcctgagcagcagactgagagtgtccgccaccttctggcagaacccccggaaccacttcagatgccaggtgcagttctacggcctgagcgagaacgacgagtggacccaggacagagccaagcccgtgacccagatcgtgtctgccgaagcctggggcagagccgattgcgacgtgaagctggtggaaaagagcttcgagacagacaccaacctgaacttccagaacctgagcgtgatcggcttcagaatcctgctgctgaaagtggccggctttaacctgctgatgaccctgcggctgtggtccagcagggccaagcgatctggatctggagcaacaaacttctcactactcaaacaagcaggtgacgtggaggagaatcccgggcctactagtgccaccatggactggatttggcgcatccttttccttgtcggcgctgctaccggcgcccattccgggcccgaagtgcagctggttgaatctggcggaggactggttcaggctggcggatctctgagactgtcttgtgccgccagcggcagaacctttagcatgggctggtttagacaggcccctggcaaagagagagagttcgtcgccgccatcacatactctggcggcagcccttactacgccgactctgtgaagggcagattcaccatcagccgggacaacgccaagaacaccgtgtacctccagatgaacagcctgaagcctgaggacaccgccgtgtactactgcgccgccaatccaacatacggcagcgactggaacgccgagaattggggccagggaacccaagtgacagtgtctagcggatccggcggcggaggatctggcggaggcggatctgggggcggaggctctttcgaagaagtgcagctggttgaatcaggcggaggactggttcagcctggcggatctctgagactgtcttgtgccgccagcggctacaccttcaccaactactggatgaactgggtccgacaggcccctggcaaaggactggaatgggtcggaatgatcgaccccagcgacagcgagacacactacaaccacatcttcaaggaccgcttcaccatcagcgccgacaccagcaagaataccgcctacctccagatgaactccctgagagccgaggacaccgccgtgtactactgcgccagaaacctgtatctgtggggccagggaaccctggtcacagtgtcatctacgcgtatccagaaccctgatcctgccgtgtaccagctgcgggatagcaagagcagcgacaagagcgtgtgtctgttcaccgacttcgacagccagaccaacgtgtcccagagcaaggactccgacgtgtacatcaccgataagtgcgtgctggacatgcggagcatggacttcaagagcaactccgccgtggcctggtccaacaagtccgatttcgcctgcgccaacgccttcaacaacagcattatccccgaggacacattcttcccaagccccgagagcagctgcggctttaccagcgagagctaccagcagggcgtgctgagcgccaccatcctgtacgagatcctgctgggcaaggccaccctgtacgccgtgctggtgtctgccctggtgctgatggctatggtcaagcggaaggacagccggggacgcgccaagagaagcggatctggcgtgaagcagaccctgaatttcgacctgctgaagctggctggcgacgtggaatccaacccaggcccttctagaggccatatgaccgagtacaagcccacggtgcgcctcgccacccgcgacgacgtccccagggccgtacgcaccctcgccgccgcgttcgccgactaccccgccacgcgccacaccgtcgatccggaccgccacatcgagcgggtcaccgagctgcaagaactcttcctcacgcgcgtcgggctcgacatcggcaaggtgtgggtcgcggacgacggcgccgcggtggcggtctggaccacgccggagagcgtcgaagcgggggcggtgttcgccgagatcggcccgcgcatggccgagttgagcggttcccggctggccgcgcagcaacagatggaaggcctcctggcgccgcaccggcccaaggagcccgcgtggttcctggccaccgtcggcgtctcgcccgaccaccagggcaagggtctgggcagcgccgtcgtgctccccggagtggaggcggccgagcgcgccggggtgcccgccttcctggagacctccgcgccccgcaacctccccttctacgagcggctcggcttcaccgtcaccgccgacgtcgaggtgcccgaaggaccgcgcacctggtgcatgacccgcaagcccggtgcctga

SEQ ID NO: 37393 - DNA, 3366 bp, synthetic construct
  source 1..3366: mol_type = other DNA
atgggacccagactgctgttttgggctctgctgtgtctgctcggcacaggacctgttgaagctggcgtgacacagagccccacacacctgattaagaccagaggccagcaggccacactgagatgcagccctatcagcggccacaccagcgtgtactggtatcagcaggctctcggactgggcctccagttcctgctttggtacgacgagggcgaagagagaaaccggggcaacttccctcctcggttttccggcagacagttccccaactacagcagcgagctgaacgtgaacgccctggaactggaagatagcgccctgtacctgtgtgccagctctctcggcggagatgaactgggagccgatggcaacgagcagttctttggccctggcaccagactgaccgtgctggaaggtaccggcggaggcggatctggcggcggaagcgaattcgacatccagatgacacagagccctagcagcctgtctgccagcgtgggagacagagtgaccatcacatgcaagagcagccagagcctgctggactccgatggcaagacctacctgaactggtatcagcagaagcccggcaaggcccctaagctgctgatctacctggtgtccaagctggatagcggcgtgcccagcagattttctggcagcggcagcggaaccgacttcaccctgacaatatccagcctccagcctgaggacttcgccacctactactgcttccaaggcacccactttccattcaccttcggccagggcaccaaggtggaaatcaaaagactcgaggacctgaagaacgtgttcccacctgaggtggccgtgttcgagcctagcgaggccgagatcagccacacccagaaagccaccctcgtgtgcctggctaccggcttctaccccgaccatgtggaactgtcttggtgggtcaacggcaaagaggtgcacagcggcgtgtgtaccgacccccagccactgaaagaacagcccgccctgaacgacagccggtactgcctgagcagcagactgagagtgtccgccaccttctggcagaacccccggaaccacttcagatgccaggtgcagttctacggcctgagcgagaacgacgagtggacccaggacagagccaagcccgtgacccagatcgtgtctgccgaagcctggggcagagccgattgcgacgtgaagctggtggaaaagagcttcgagacagacaccaacctgaacttccagaacctgagcgtgatcggcttcagaatcctgctgctgaaagtggccggctttaacctgctgatgaccctgcggctgtggtccagcagggccaagcgatctggatctggagcaacaaacttctcactactcaaacaagcaggtgacgtggaggagaatcccgggcctactagtgccaccatggactggatttggcgcatccttttccttgtcggcgctgctaccggcgcccattccgggcccgaagtgcagctggttgaatctggcggaggactggttcaggctggcggatctctgagactgtcttgtgccgccagcggcagaacctttagcatgggctggtttagacaggcccctggcaaagagagagagttcgtcgccgccatcacatactctggcggcagcccttactacgccgactctgtgaagggcagattcaccatcagccgggacaacgccaagaacaccgtgtacctccagatgaacagcctgaagcctgaggacaccgccgtgtactactgcgccgccaatccaacatacggcagcgactggaacgccgagaattggggccagggaacccaagtgacagtgtctagcggatccggcggcggaggatctggcggaggcggatctgggggcggaggctctttcgaagaagtgcagctggttgaatcaggcggaggactggttcagcctggcggatctctgagactgtcttgtgccgccagcggctacaccttcaccaactactggatgaactgggtccgacaggcccctggcaaaggactggaatgggtcggaatgatcgaccccagcgacagcgagacacactacaaccacatcttcaaggaccgcttcaccatcagcgccgacaccagcaagaataccgcctacctccagatgaactccctgagagccgaggacaccgccgtgtactactgcgccagaaacctgtatctgtggggccagggaaccctggtcacagtgtcatctacgcgtatccagaaccctgatcctgccgtgtaccagctgcgggatagcaagagcagcgacaagagcgtgtgtctgttcaccgacttcgacagccagaccaacgtgtcccagagcaaggactccgacgtgtacatcaccgataagtgcgtgctggacatgcggagcatggacttcaagagcaactccgccgtggcctggtccaacaagtccgatttcgcctgcgccaacgccttcaacaacagcattatccccgaggacacattcttcccaagccccgagagcagctgcggctttaccagcgagagctaccagcagggcgtgctgagcgccaccatcctgtacgagatcctgctgggcaaggccaccctgtacgccgtgctggtgtctgccctggtgctgatggctatggtcaagcggaaggacagccggggacgcgccaagagaagcggatctggcgtgaagcagaccctgaatttcgacctgctgaagctggctggcgacgtggaatccaacccaggcccttctagaggccatatgaccgagtacaagcccacggtgcgcctcgccacccgcgacgacgtccccagggccgtacgcaccctcgccgccgcgttcgccgactaccccgccacgcgccacaccgtcgatccggaccgccacatcgagcgggtcaccgagctgcaagaactcttcctcacgcgcgtcgggctcgacatcggcaaggtgtgggtcgcggacgacggcgccgcggtggcggtctggaccacgccggagagcgtcgaagcgggggcggtgttcgccgagatcggcccgcgcatggccgagttgagcggttcccggctggccgcgcagcaacagatggaaggcctcctggcgccgcaccggcccaaggagcccgcgtggttcctggccaccgtcggcgtctcgcccgaccaccagggcaagggtctgggcagcgccgtcgtgctccccggagtggaggcggccgagcgcgccggggtgcccgccttcctggagacctccgcgccccgcaacctccccttctacgagcggctcggcttcaccgtcaccgccgacgtcgaggtgcccgaaggaccgcgcacctggtgcatgacccgcaagcccggtgcctga

SEQ ID NO: 37394 - DNA, 2841 bp, synthetic construct
  source 1..2841: mol_type = other DNA
atggccttaccagtgaccgccttgctcctgccgctggccttgctgctccacgccgccaggccggacatccagatgacacagagccctagcagcctgtctgccagcgtgggagacagagtgaccatcacatgcaagagcagccagagcctgctggactccgatggcaagacctacctgaactggtatcagcagaagcccggcaaggcccctaagctgctgatctacctggtgtccaagctggatagcggcgtgcccagcagattttctggcagcggcagcggaaccgacttcaccctgacaatatccagcctccagcctgaggacttcgccacctactactgcttccaaggcacccactttccattcaccttcggccagggcaccaaggtggaaatcaaaagactcgaggacctgaagaacgtgttcccacctgaggtggccgtgttcgagcctagcgaggccgagatcagccacacccagaaagccaccctcgtgtgcctggctaccggcttctaccccgaccatgtggaactgtcttggtgggtcaacggcaaagaggtgcacagcggcgtgtgtaccgacccccagccactgaaagaacagcccgccctgaacgacagccggtactgcctgagcagcagactgagagtgtccgccaccttctggcagaacccccggaaccacttcagatgccaggtgcagttctacggcctgagcgagaacgacgagtggacccaggacagagccaagcccgtgacccagatcgtgtctgccgaagcctggggcagagccgattgcgacgtgaagctggtggaaaagagcttcgagacagacaccaacctgaacttccagaacctgagcgtgatcggcttcagaatcctgctgctgaaagtggccggctttaacctgctgatgaccctgcggctgtggtccagcagggccaagcgatctggatctggagcaacaaacttctcactactcaaacaagcaggtgacgtggaggagaatcccgggcctactagtgccaccatggactggatttggcgcatccttttccttgtcggcgctgctaccggcgcccattccgggcccatgggaagctggcttgagttctaccacagactcaacgccattgacagcaggctgtgggcacttggcggaagcgaagctgaactcgccgcttttgaaaaagaaattgccgctttcgagtccgagcttcaggcttacaaaggcaaagggaatcctgaggtcgagagcctgagagatcacgctgcccacattagagagtggttgcaggcataccggcacaatggatccggcggcggaggatctggcggaggcggatctgggggcggaggctctttcgaagaagtgcagctggttgaatcaggcggaggactggttcagcctggcggatctctgagactgtcttgtgccgccagcggctacaccttcaccaactactggatgaactgggtccgacaggcccctggcaaaggactggaatgggtcggaatgatcgaccccagcgacagcgagacacactacaaccacatcttcaaggaccgcttcaccatcagcgccgacaccagcaagaataccgcctacctccagatgaactccctgagagccgaggacaccgccgtgtactactgcgccagaaacctgtatctgtggggccagggaaccctggtcacagtgtcatctacgcgtatccagaaccctgatcctgccgtgtaccagctgcgggatagcaagagcagcgacaagagcgtgtgtctgttcaccgacttcgacagccagaccaacgtgtcccagagcaaggactccgacgtgtacatcaccgataagtgcgtgctggacatgcggagcatggacttcaagagcaactccgccgtggcctggtccaacaagtccgatttcgcctgcgccaacgccttcaacaacagcattatccccgaggacacattcttcccaagccccgagagcagctgcggctttaccagcgagagctaccagcagggcgtgctgagcgccaccatcctgtacgagatcctgctgggcaaggccaccctgtacgccgtgctggtgtctgccctggtgctgatggctatggtcaagcggaaggacagccggggacgcgccaagagaagcggatctggcgtgaagcagaccctgaatttcgacctgctgaagctggctggcgacgtggaatccaacccaggcccttctagaggccatatgaccgagtacaagcccacggtgcgcctcgccacccgcgacgacgtccccagggccgtacgcaccctcgccgccgcgttcgccgactaccccgccacgcgccacaccgtcgatccggaccgccacatcgagcgggtcaccgagctgcaagaactcttcctcacgcgcgtcgggctcgacatcggcaaggtgtgggtcgcggacgacggcgccgcggtggcggtctggaccacgccggagagcgtcgaagcgggggcggtgttcgccgagatcggcccgcgcatggccgagttgagcggttcccggctggccgcgcagcaacagatggaaggcctcctggcgccgcaccggcccaaggagcccgcgtggttcctggccaccgtcggcgtctcgcccgaccaccagggcaagggtctgggcagcgccgtcgtgctccccggagtggaggcggccgagcgcgccggggtgcccgccttcctggagacctccgcgccccgcaacctccccttctacgagcggctcggcttcaccgtcaccgccgacgtcgaggtgcccgaaggaccgcgcacctggtgcatgacccgcaagcccggtgcctga

SEQ ID NO: 37395 - DNA, 2841 bp, synthetic construct
  source 1..2841: mol_type = other DNA
atggccttaccagtgaccgccttgctcctgccgctggccttgctgctccacgccgccaggccggcatgcatgggcagttggttcgagttctacgaccggctgaatgccatcgacgccagactgtgggctctcggaggatctgaagctgagctggccgccttcgagaaagagatcgccgcctttgagagcgagctgcaagcctacaaaggcaagggcaaccccgaggtggaaaacctgagagtgcacgccgctgccatcagagaatggctccaggcttacagacacaacggtaccggcggaggcggatctggcggcggaggtagcggtggcggaggatctgaattcgacatccagatgacacagagccctagcagcctgtctgccagcgtgggagacagagtgaccatcacatgcaagagcagccagagcctgctggactccgatggcaagacctacctgaactggtatcagcagaagcccggcaaggcccctaagctgctgatctacctggtgtccaagctggatagcggcgtgcccagcagattttctggcagcggcagcggaaccgacttcaccctgacaatatccagcctccagcctgaggacttcgccacctactactgcttccaaggcacccactttccattcaccttcggccagggcaccaaggtggaaatcaaaagactcgaggacctgaagaacgtgttcccacctgaggtggccgtgttcgagcctagcgaggccgagatcagccacacccagaaagccaccctcgtgtgcctggctaccggcttctaccccgaccatgtggaactgtcttggtgggtcaacggcaaagaggtgcacagcggcgtgtgtaccgacccccagccactgaaagaacagcccgccctgaacgacagccggtactgcctgagcagcagactgagagtgtccgccaccttctggcagaacccccggaaccacttcagatgccaggtgcagttctacggcctgagcgagaacgacgagtggacccaggacagagccaagcccgtgacccagatcgtgtctgccgaagcctggggcagagccgattgcgacgtgaagctggtggaaaagagcttcgagacagacaccaacctgaacttccagaacctgagcgtgatcggcttcagaatcctgctgctgaaagtggccggctttaacctgctgatgaccctgcggctgtggtccagcagggccaagcgatctggatctggagcaacaaacttctcactactcaaacaagcaggtgacgtggaggagaatcccgggcctactagtatggactggatttggcgcatccttttccttgtcggcgctgctaccggcgcgcattccttcgaagaagtgcagctggttgaatcaggcggaggactggttcagcctggcggatctctgagactgtcttgtgccgccagcggctacaccttcaccaactactggatgaactgggtccgacaggcccctggcaaaggactggaatgggtcggaatgatcgaccccagcgacagcgagacacactacaaccacatcttcaaggaccgcttcaccatcagcgccgacaccagcaagaataccgcctacctccagatgaactccctgagagccgaggacaccgccgtgtactactgcgccagaaacctgtatctgtggggccagggaaccctggtcacagtgtcatctacgcgtatccagaaccctgatcctgccgtgtaccagctgcgggatagcaagagcagcgacaagagcgtgtgtctgttcaccgacttcgacagccagaccaacgtgtcccagagcaaggactccgacgtgtacatcaccgataagtgcgtgctggacatgcggagcatggacttcaagagcaactccgccgtggcctggtccaacaagtccgatttcgcctgcgccaacgccttcaacaacagcattatccccgaggacacattcttcccaagccccgagagcagctgcggctttaccagcgagagctaccagcagggcgtgctgagcgccaccatcctgtacgagatcctgctgggcaaggccaccctgtacgccgtgctggtgtctgccctggtgctgatggctatggtcaagcggaaggacagccggggacgcgccaagagaagcggatctggcgtgaagcagaccctgaatttcgacctgctgaagctggctggcgacgtggaatccaacccaggcccttctagaggccatatgaccgagtacaagcccacggtgcgcctcgccacccgcgacgacgtccccagggccgtacgcaccctcgccgccgcgttcgccgactaccccgccacgcgccacaccgtcgatccggaccgccacatcgagcgggtcaccgagctgcaagaactcttcctcacgcgcgtcgggctcgacatcggcaaggtgtgggtcgcggacgacggcgccgcggtggcggtctggaccacgccggagagcgtcgaagcgggggcggtgttcgccgagatcggcccgcgcatggccgagttgagcggttcccggctggccgcgcagcaacagatggaaggcctcctggcgccgcaccggcccaaggagcccgcgtggttcctggccaccgtcggcgtctcgcccgaccaccagggcaagggtctgggcagcgccgtcgtgctccccggagtggaggcggccgagcgcgccggggtgcccgccttcctggagacctccgcgccccgcaacctccccttctacgagcggctcggcttcaccgtcaccgccgacgtcgaggtgcccgaaggaccgcgcacctggtgcatgacccgcaagcccggtgcctga

SEQ ID NO: 37396 - DNA, 3192 bp, synthetic construct
  source 1..3192: mol_type = other DNA
atggccttaccagtgaccgccttgctcctgccgctggccttgctgctccacgccgccaggccggcatgcatggaccccgacctggaaatcagagccgccttcctgcggcagagaaacacagccctgagaacagaggtggccgagctggaacaagaggtgcagcggctggaaaacgaggtgtcccagtacgagacaagatacggccctctcggaggcggaaaaggtaccggcggaggcggatctggcggcggaggtagcggtggcggaggatctgaattcgacatccagatgacacagagccctagcagcctgtctgccagcgtgggagacagagtgaccatcacatgcaagagcagccagagcctgctggactccgatggcaagacctacctgaactggtatcagcagaagcccggcaaggcccctaagctgctgatctacctggtgtccaagctggatagcggcgtgcccagcagattttctggcagcggcagcggaaccgacttcaccctgacaatatccagcctccagcctgaggacttcgccacctactactgcttccaaggcacccactttccattcaccttcggccagggcaccaaggtggaaatcaaaagactcgaggacctgaagaacgtgttcccacctgaggtggccgtgttcgagcctagcgaggccgagatcagccacacccagaaagccaccctcgtgtgcctggctaccggcttctaccccgaccatgtggaactgtcttggtgggtcaacggcaaagaggtgcacagcggcgtgtgtaccgacccccagccactgaaagaacagcccgccctgaacgacagccggtactgcctgagcagcagactgagagtgtccgccaccttctggcagaacccccggaaccacttcagatgccaggtgcagttctacggcctgagcgagaacgacgagtggacccaggacagagccaagcccgtgacccagatcgtgtctgccgaagcctggggcagagccgattgcgacgtgaagctggtggaaaagagcttcgagacagacaccaacctgaacttccagaacctgagcgtgatcggcttcagaatcctgctgctgaaagtggccggctttaacctgctgatgaccctgcggctgtggtccagcagggccaagcgatctggatctggagcaacaaacttctcactactcaaacaagcaggtgacgtggaggagaatcccgggcctactagtgccaccatggactggatttggcgcatccttttccttgtcggcgctgctaccggcgcccattccgggcccgaagtgcagctggttgaatctggcggaggactggttcaggctggcggatctctgagactgtcttgtgccgccagcggcagaacctttagcatgggctggtttagacaggcccctggcaaagagagagagttcgtcgccgccatcacatactctggcggcagcccttactacgccgactctgtgaagggcagattcaccatcagccgggacaacgccaagaacaccgtgtacctccagatgaacagcctgaagcctgaggacaccgccgtgtactactgcgccgccaatccaacatacggcagcgactggaacgccgagaattggggccagggaacccaagtgacagtgtctagcggatccggcggcggaggatctggcggaggcggatctgggggcggaggctctttcgaagaagtgcagctggttgaatcaggcggaggactggttcagcctggcggatctctgagactgtcttgtgccgccagcggctacaccttcaccaactactggatgaactgggtccgacaggcccctggcaaaggactggaatgggtcggaatgatcgaccccagcgacagcgagacacactacaaccacatcttcaaggaccgcttcaccatcagcgccgacaccagcaagaataccgcctacctccagatgaactccctgagagccgaggacaccgccgtgtactactgcgccagaaacctgtatctgtggggccagggaaccctggtcacagtgtcatctacgcgtatccagaaccctgatcctgccgtgtaccagctgcgggatagcaagagcagcgacaagagcgtgtgtctgttcaccgacttcgacagccagaccaacgtgtcccagagcaaggactccgacgtgtacatcaccgataagtgcgtgctggacatgcggagcatggacttcaagagcaactccgccgtggcctggtccaacaagtccgatttcgcctgcgccaacgccttcaacaacagcattatccccgaggacacattcttcccaagccccgagagcagctgcggctttaccagcgagagctaccagcagggcgtgctgagcgccaccatcctgtacgagatcctgctgggcaaggccaccctgtacgccgtgctggtgtctgccctggtgctgatggctatggtcaagcggaaggacagccggggacgcgccaagagaagcggatctggcgtgaagcagaccctgaatttcgacctgctgaagctggctggcgacgtggaatccaacccaggcccttctagaggccatatgaccgagtacaagcccacggtgcgcctcgccacccgcgacgacgtccccagggccgtacgcaccctcgccgccgcgttcgccgactaccccgccacgcgccacaccgtcgatccggaccgccacatcgagcgggtcaccgagctgcaagaactcttcctcacgcgcgtcgggctcgacatcggcaaggtgtgggtcgcggacgacggcgccgcggtggcggtctggaccacgccggagagcgtcgaagcgggggcggtgttcgccgagatcggcccgcgcatggccgagttgagcggttcccggctggccgcgcagcaacagatggaaggcctcctggcgccgcaccggcccaaggagcccgcgtggttcctggccaccgtcggcgtctcgcccgaccaccagggcaagggtctgggcagcgccgtcgtgctccccggagtggaggcggccgagcgcgccggggtgcccgccttcctggagacctccgcgccccgcaacctccccttctacgagcggctcggcttcaccgtcaccgccgacgtcgaggtgcccgaaggaccgcgcacctggtgcatgacccgcaagcccggtgcctga

SEQ ID NO: 37397 - DNA, 2841 bp, synthetic construct
  source 1..2841: mol_type = other DNA
atggccttaccagtgaccgccttgctcctgccgctggccttgctgctccacgccgccaggccggacatccagatgacacagagccctagcagcctgtctgccagcgtgggagacagagtgaccatcacatgcaagagcagccagagcctgctggactccgatggcaagacctacctgaactggtatcagcagaagcccggcaaggcccctaagctgctgatctacctggtgtccaagctggatagcggcgtgcccagcagattttctggcagcggcagcggaaccgacttcaccctgacaatatccagcctccagcctgaggacttcgccacctactactgcttccaaggcacccactttccattcaccttcggccagggcaccaaggtggaaatcaaaagactcgaggacctgaagaacgtgttcccacctgaggtggccgtgttcgagcctagcgaggccgagatcagccacacccagaaagccaccctcgtgtgcctggctaccggcttctaccccgaccatgtggaactgtcttggtgggtcaacggcaaagaggtgcacagcggcgtgtgtaccgacccccagccactgaaagaacagcccgccctgaacgacagccggtactgcctgagcagcagactgagagtgtccgccaccttctggcagaacccccggaaccacttcagatgccaggtgcagttctacggcctgagcgagaacgacgagtggacccaggacagagccaagcccgtgacccagatcgtgtctgccgaagcctggggcagagccgattgcgacgtgaagctggtggaaaagagcttcgagacagacaccaacctgaacttccagaacctgagcgtgatcggcttcagaatcctgctgctgaaagtggccggctttaacctgctgatgaccctgcggctgtggtccagcagggccaagcgatctggatctggagcaacaaacttctcactactcaaacaagcaggtgacgtggaggagaatcccgggcctactagtgccaccatggactggatttggcgcatccttttccttgtcggcgctgctaccggcgcccattccgggcccatgggatcttggagcgagttttacgatcggctgcacgccattcaccaccggctgtatgctctcggaggaagcgaagctgagctggccgcttttgaaaaagaaattgccgctttcgagtccgagcttcaggcttacaaaggcaaagggaatcctgaggtcgaggccctgagagataccgccgccttcatcagaacccggttgcaggcataccggcacaacggatccggcggcggaggatctggcggaggcggatctgggggcggaggctctttcgaagaagtgcagctggttgaatcaggcggaggactggttcagcctggcggatctctgagactgtcttgtgccgccagcggctacaccttcaccaactactggatgaactgggtccgacaggcccctggcaaaggactggaatgggtcggaatgatcgaccccagcgacagcgagacacactacaaccacatcttcaaggaccgcttcaccatcagcgccgacaccagcaagaataccgcctacctccagatgaactccctgagagccgaggacaccgccgtgtactactgcgccagaaacctgtatctgtggggccagggaaccctggtcacagtgtcatctacgcgtatccagaaccctgatcctgccgtgtaccagctgcgggatagcaagagcagcgacaagagcgtgtgtctgttcaccgacttcgacagccagaccaacgtgtcccagagcaaggactccgacgtgtacatcaccgataagtgcgtgctggacatgcggagcatggacttcaagagcaactccgccgtggcctggtccaacaagtccgatttcgcctgcgccaacgccttcaacaacagcattatccccgaggacacattcttcccaagccccgagagcagctgcggctttaccagcgagagctaccagcagggcgtgctgagcgccaccatcctgtacgagatcctgctgggcaaggccaccctgtacgccgtgctggtgtctgccctggtgctgatggctatggtcaagcggaaggacagccggggacgcgccaagagaagcggatctggcgtgaagcagaccctgaatttcgacctgctgaagctggctggcgacgtggaatccaacccaggcccttctagaggccatatgaccgagtacaagcccacggtgcgcctcgccacccgcgacgacgtccccagggccgtacgcaccctcgccgccgcgttcgccgactaccccgccacgcgccacaccgtcgatccggaccgccacatcgagcgggtcaccgagctgcaagaactcttcctcacgcgcgtcgggctcgacatcggcaaggtgtgggtcgcggacgacggcgccgcggtggcggtctggaccacgccggagagcgtcgaagcgggggcggtgttcgccgagatcggcccgcgcatggccgagttgagcggttcccggctggccgcgcagcaacagatggaaggcctcctggcgccgcaccggcccaaggagcccgcgtggttcctggccaccgtcggcgtctcgcccgaccaccagggcaagggtctgggcagcgccgtcgtgctccccggagtggaggcggccgagcgcgccggggtgcccgccttcctggagacctccgcgccccgcaacctccccttctacgagcggctcggcttcaccgtcaccgccgacgtcgaggtgcccgaaggaccgcgcacctggtgcatgacccgcaagcccggtgcctga

SEQ ID NO: 37398 - DNA, 3471 bp, synthetic construct
  source 1..3471: mol_type = other DNA
atggccttaccagtgaccgccttgctcctgccgctggccttgctgctccacgccgccaggccggacatccagatgacacagagccctagcagcctgtctgccagcgtgggagacagagtgaccatcacatgcaagagcagccagagcctgctggactccgatggcaagacctacctgaactggtatcagcagaagcccggcaaggcccctaagctgctgatctacctggtgtccaagctggatagcggcgtgcccagcagattttctggcagcggcagcggaaccgacttcaccctgacaatatccagcctccagcctgaggacttcgccacctactactgcttccaaggcacccactttccattcaccttcggccagggcaccaaggtggaaatcaaaagactcgaggacctgaagaacgtgttcccacctgaggtggccgtgttcgagcctagcgaggccgagatcagccacacccagaaagccaccctcgtgtgcctggctaccggcttctaccccgaccatgtggaactgtcttggtgggtcaacggcaaagaggtgcacagcggcgtgtgtaccgacccccagccactgaaagaacagcccgccctgaacgacagccggtactgcctgagcagcagactgagagtgtccgccaccttctggcagaacccccggaaccacttcagatgccaggtgcagttctacggcctgagcgagaacgacgagtggacccaggacagagccaagcccgtgacccagatcgtgtctgccgaagcctggggcagagccgattgcgacgtgaagctggtggaaaagagcttcgagacagacaccaacctgaacttccagaacctgagcgtgatcggcttcagaatcctgctgctgaaagtggccggctttaacctgctgatgaccctgcggctgtggtccagcagggccaagcgatctggatctggagcaacaaacttctcactactcaaacaagcaggtgacgtggaggagaatcccgggcctactagtaccatggactggatttggcgcatccttttccttgtcggcgctgctaccggcgcccattccctgttcaatcaagaggtgcagatccctctgaccgagagctactgtggcccctgtcctaagaactggatctgctacaagaacaactgctaccagttcttcgacgagagcaagaattggtacgagagccaggccagctgcatgagccagaatgccagcctgctgaaggtgtacagcaaagaggaccaggacctgctgaaactggtcaagagcgcccactggatgggccttgtgcacatccccaccaatggctcttggcagtgggaggacggcagcattctgagccctaacctgctgaccatcatcgagatgcagaagggcgactgcgccctgtacgccagcagctttaagggctacatcgagaattgcagcaccccgaacacctacatctgtatgcagagaaccgtttctggcggaggcggctctggaggaggcggaagtggcggcggaggcgacctctttaatcaagaagtccagattccactcaccgaatcctactgcggaccttgtccaaaaaattggatttgttataagaacaactgttatcaattctttgatgagtctaaaaattggtatgagtcccaggcttcctgcatgtctcagaacgcttctctgctgaaagtctactctaaagaagatcaggatctcctgaagctcgtcaagtctgcccattggatggggctcgtccacattcctaccaacggaagctggcaatgggaagatggctccatcctgtctccaaatctgctcacgattattgaaatgcagaaaggggattgtgctctctacgccagctccttcaagggatatattgagaactgtagcacgcccaatacttatatctgtatgcaacggaccgtgggatccggcggcggaggatctggcggaggcggatctgggggcggaggctctttcgaagaagtgcagctggttgaatcaggcggaggactggttcagcctggcggatctctgagactgtcttgtgccgccagcggctacaccttcaccaactactggatgaactgggtccgacaggcccctggcaaaggactggaatgggtcggaatgatcgaccccagcgacagcgagacacactacaaccacatcttcaaggaccgcttcaccatcagcgccgacaccagcaagaataccgcctacctccagatgaactccctgagagccgaggacaccgccgtgtactactgcgccagaaacctgtatctgtggggccagggaaccctggtcacagtgtcatctacgcgtatccagaaccctgatcctgccgtgtaccagctgcgggatagcaagagcagcgacaagagcgtgtgtctgttcaccgacttcgacagccagaccaacgtgtcccagagcaaggactccgacgtgtacatcaccgataagtgcgtgctggacatgcggagcatggacttcaagagcaactccgccgtggcctggtccaacaagtccgatttcgcctgcgccaacgccttcaacaacagcattatccccgaggacacattcttcccaagccccgagagcagctgcggctttaccagcgagagctaccagcagggcgtgctgagcgccaccatcctgtacgagatcctgctgggcaaggccaccctgtacgccgtgctggtgtctgccctggtgctgatggctatggtcaagcggaaggacagccggggacgcgccaagagaagcggatctggcgtgaagcagaccctgaatttcgacctgctgaagctggctggcgacgtggaatccaacccaggcccttctagaggccatatgaccgagtacaagcccacggtgcgcctcgccacccgcgacgacgtccccagggccgtacgcaccctcgccgccgcgttcgccgactaccccgccacgcgccacaccgtcgatccggaccgccacatcgagcgggtcaccgagctgcaagaactcttcctcacgcgcgtcgggctcgacatcggcaaggtgtgggtcgcggacgacggcgccgcggtggcggtctggaccacgccggagagcgtcgaagcgggggcggtgttcgccgagatcggcccgcgcatggccgagttgagcggttcccggctggccgcgcagcaacagatggaaggcctcctggcgccgcaccggcccaaggagcccgcgtggttcctggccaccgtcggcgtctcgcccgaccaccagggcaagggtctgggcagcgccgtcgtgctccccggagtggaggcggccgagcgcgccggggtgcccgccttcctggagacctccgcgccccgcaacctccccttctacgagcggctcggcttcaccgtcaccgccgacgtcgaggtgcccgaaggaccgcgcacctggtgcatgacccgcaagcccggtgcctga

SEQ ID NO: 37399 - DNA, 1857 bp, synthetic construct
  source 1..1857: mol_type = other DNA
atggccttaccagtgaccgccttgctcctgccgctggccttgctgctccacgccgccaggccggacatccagatgacacagagccctagcagcctgtctgccagcgtgggagacagagtgaccatcacatgcaagagcagccagagcctgctggactccgatggcaagacctacctgaactggtatcagcagaagcccggcaaggcccctaagctgctgatctacctggtgtccaagctggatagcggcgtgcccagcagattttctggcagcggcagcggaaccgacttcaccctgacaatatccagcctccagcctgaggacttcgccacctactactgcttccaaggcacccactttccattcaccttcggccagggcaccaaggtggaaatcaaaagactcgaggacctgaagaacgtgttcccacctgaggtggccgtgttcgagcctagcgaggccgagatcagccacacccagaaagccaccctcgtgtgcctggctaccggcttctaccccgaccatgtggaactgtcttggtgggtcaacggcaaagaggtgcacagcggcgtgtgtaccgacccccagccactgaaagaacagcccgccctgaacgacagccggtactgcctgagcagcagactgagagtgtccgccaccttctggcagaacccccggaaccacttcagatgccaggtgcagttctacggcctgagcgagaacgacgagtggacccaggacagagccaagcccgtgacccagatcgtgtctgccgaagcctggggcagagccgattgcggctttaccagcgagagctaccagcagggcgtgctgagcgccaccaacctgagcgtgatcggcttcagaatcctgctgctgaaagtggccggctttaacctgctgatgaccctgcggctgtggtccagcagggccaagcgatctggatctggagcaacaaacttctcactactcaaacaagcaggtgacgtggaggagaatcccgggcctactagtatggactggatttggcgcatccttttccttgtcggcgctgctaccggcgcgcattccttcgaagaagtgcagctggttgaatcaggcggaggactggttcagcctggcggatctctgagactgtcttgtgccgccagcggctacaccttcaccaactactggatgaactgggtccgacaggcccctggcaaaggactggaatgggtcggaatgatcgaccccagcgacagcgagacacactacaaccacatcttcaaggaccgcttcaccatcagcgccgacaccagcaagaataccgcctacctccagatgaactccctgagagccgaggacaccgccgtgtactactgcgccagaaacctgtatctgtggggccagggaaccctggtcacagtgtcatctacgcgtatccagaaccctgatcctgccgtgtaccagctgcgggatagcaagagcagcgacaagagcgtgtgtctgttcaccgacttcgacagccagaccaacgtgtcccagagcaaggactccgacgtgtacatcaccgataagtgcgtgctggacatgcggagcatggacttcaagagcaactccgccgtggcctggtccaacaagtccgatttcgcctgcgccaacgccttcaacaacagcattatccccgaggacacattcttcccaagccccgagagcagctgcgacgtgaagctggtggaaaagagcttcgagacagacaccaacctgaacttccagatcctgtacgagatcctgctgggcaaggccaccctgtacgccgtgctggtgtctgccctggtgctgatggctatggtcaagcggaaggacagccgggga

SEQ ID NO: 37400 - DNA, 1869 bp, synthetic construct
  source 1..1869: mol_type = other DNA
atggccttaccagtgaccgccttgctcctgccgctggccttgctgctccacgccgccaggccggacatccagatgacacagagccctagcagcctgtctgccagcgtgggagacagagtgaccatcacatgcaagagcagccagagcctgctggactccgatggcaagacctacctgaactggtatcagcagaagcccggcaaggcccctaagctgctgatctacctggtgtccaagctggatagcggcgtgcccagcagattttctggcagcggcagcggaaccgacttcaccctgacaatatccagcctccagcctgaggacttcgccacctactactgcttccaaggcacccactttccattcaccttcggccagggcaccaaggtggaaatcaaaagactcgagatccagaaccctgatcctgccgtgtaccagctgcgggatagcaagagcagcgacaagagcgtgtgtctgttcaccgacttcgacagccagaccaacgtgtcccagagcaaggactccgacgtgtacatcaccgataagtgcgtgctggacatgcggagcatggacttcaagagcaactccgccgtggcctggtccaacaagtccgatttcgcctgcgccaacgccttcaacaacagcattatccccgaggacacattcttcccaagccccgagagcagctgcgacgtgaagctggtggaaaagagcttcgagacagacaccaacctgaacttccagatcctgtacgagatcctgctgggcaaggccaccctgtacgccgtgctggtgtctgccctggtgctgatggctatggtcaagcggaaggacagccggggacgcgccaagagaagcggatctggcgtgaagcagaccctgaatttcgacctgctgaagctggctggcgacgtggaatccaacccaggccctactagtatggactggatttggcgcatccttttccttgtcggcgctgctaccggcgcgcattccttcgaagaagtgcagctggttgaatcaggcggaggactggttcagcctggcggatctctgagactgtcttgtgccgccagcggctacaccttcaccaactactggatgaactgggtccgacaggcccctggcaaaggactggaatgggtcggaatgatcgaccccagcgacagcgagacacactacaaccacatcttcaaggaccgcttcaccatcagcgccgacaccagcaagaataccgcctacctccagatgaactccctgagagccgaggacaccgccgtgtactactgcgccagaaacctgtatctgtggggccagggaaccctggtcacagtgtcatctacgcgtgaggacctgaagaacgtgttcccacctgaggtggccgtgttcgagcctagcgaggccgagatcagccacacccagaaagccaccctcgtgtgcctggctaccggcttctaccccgaccatgtggaactgtcttggtgggtcaacggcaaagaggtgcacagcggcgtgtgtaccgacccccagccactgaaagaacagcccgccctgaacgacagccggtactgcctgagcagcagactgagagtgtccgccaccttctggcagaacccccggaaccacttcagatgccaggtgcagttctacggcctgagcgagaacgacgagtggacccaggacagagccaagcccgtgacccagatcgtgtctgccgaagcctggggcagagccgattgcggctttaccagcgagagctaccagcagggcgtgctgagcgccaccaacctgagcgtgatcggcttcagaatcctgctgctgaaagtggccggctttaacctgctgatgaccctgcggctgtggtccagc

SEQ ID NO: 37401 - DNA, 2262 bp, synthetic construct
  source 1..2262: mol_type = other DNA
atggccttaccagtgaccgccttgctcctgccgctggccttgctgctccacgccgccaggccggaagtgcagctggttgaatctggcggaggactggttcagcctggcggatctctgagactgtcttgtgccgccagcggcttcagcttcagcgacttttggatgagctgggtccgacaggcccctggcaaaggacttgaatgggtcgccacaatcagccaggccggcagcgagaaggactacgtggactctgtgaagggcagattcaccatcagccgggacaacgccaagaagtccctgtacctccagatgaacagcctgagagccgaggacaccgccgtgtactattgtgcctctggcgtgtacagcttcgactacagaggccagggcaccctggtcacagtctcttctggtaccggcggaggcggatctggcggcggaggtagcggtggcggaggatctgaattcgacatccagatgacacagagccctagcagcctgtctgccagcgtgggagacagagtgaccatcacatgcaagagcagccagagcctgctggactccgatggcaagacctacctgaactggtatcagcagaagcccggcaaggcccctaagctgctgatctacctggtgtccaagctggatagcggcgtgcccagcagattttctggcagcggcagcggaaccgacttcaccctgacaatatccagcctccagcctgaggacttcgccacctactactgcttccaaggcacccactttccattcaccttcggccagggcaccaaggtggaaatcaaaagactcgaggacctgaagaacgtgttcccacctgaggtggccgtgttcgagcctagcgaggccgagatcagccacacccagaaagccaccctcgtgtgcctggctaccggcttctaccccgaccatgtggaactgtcttggtgggtcaacggcaaagaggtgcacagcggcgtgtgtaccgacccccagccactgaaagaacagcccgccctgaacgacagccggtactgcctgagcagcagactgagagtgtccgccaccttctggcagaacccccggaaccacttcagatgccaggtgcagttctacggcctgagcgagaacgacgagtggacccaggacagagccaagcccgtgacccagatcgtgtctgccgaagcctggggcagagccgattgcggctttaccagcgagagctaccagcagggcgtgctgagcgccaccaacctgagcgtgatcggcttcagaatcctgctgctgaaagtggccggctttaacctgctgatgaccctgcggctgtggtccagcagggccaagcgatctggatctggagcaacaaacttctcactactcaaacaagcaggtgacgtggaggagaatcccgggcctactagtatggactggatttggcgcatccttttccttgtcggcgctgctaccggcgcgcattccttcgaagaagtgcagctggttgaatcaggcggaggactggttcagcctggcggatctctgagactgtcttgtgccgccagcggctacaccttcaccaactactggatgaactgggtccgacaggcccctggcaaaggactggaatgggtcggaatgatcgaccccagcgacagcgagacacactacaaccacatcttcaaggaccgcttcaccatcagcgccgacaccagcaagaataccgcctacctccagatgaactccctgagagccgaggacaccgccgtgtactactgcgccagaaacctgtatctgtggggccagggaaccctggtcacagtgtcatctacgcgtatccagaaccctgatcctgccgtgtaccagctgcgggatagcaagagcagcgacaagagcgtgtgtctgttcaccgacttcgacagccagaccaacgtgtcccagagcaaggactccgacgtgtacatcaccgataagtgcgtgctggacatgcggagcatggacttcaagagcaactccgccgtggcctggtccaacaagtccgatttcgcctgcgccaacgccttcaacaacagcattatccccgaggacacattcttcccaagccccgagagcagctgcgacgtgaagctggtggaaaagagcttcgagacagacaccaacctgaacttccagatcctgtacgagatcctgctgggcaaggccaccctgtacgccgtgctggtgtctgccctggtgctgatggctatggtcaagcggaaggacagccgggga

SEQ ID NO: 37402 - DNA, 2274 bp, synthetic construct
  source 1..2274: mol_type = other DNA
atggccttaccagtgaccgccttgctcctgccgctggccttgctgctccacgccgccaggccggaagtgcagctggttgaatctggcggaggactggttcagcctggcggatctctgagactgtcttgtgccgccagcggcttcagcttcagcgacttttggatgagctgggtccgacaggcccctggcaaaggacttgaatgggtcgccacaatcagccaggccggcagcgagaaggactacgtggactctgtgaagggcagattcaccatcagccgggacaacgccaagaagtccctgtacctccagatgaacagcctgagagccgaggacaccgccgtgtactattgtgcctctggcgtgtacagcttcgactacagaggccagggcaccctggtcacagtctcttctggtaccggcggaggcggatctggcggcggaggtagcggtggcggaggatctgaattcgacatccagatgacacagagccctagcagcctgtctgccagcgtgggagacagagtgaccatcacatgcaagagcagccagagcctgctggactccgatggcaagacctacctgaactggtatcagcagaagcccggcaaggcccctaagctgctgatctacctggtgtccaagctggatagcggcgtgcccagcagattttctggcagcggcagcggaaccgacttcaccctgacaatatccagcctccagcctgaggacttcgccacctactactgcttccaaggcacccactttccattcaccttcggccagggcaccaaggtggaaatcaaaagactcgagatccagaaccctgatcctgccgtgtaccagctgcgggatagcaagagcagcgacaagagcgtgtgtctgttcaccgacttcgacagccagaccaacgtgtcccagagcaaggactccgacgtgtacatcaccgataagtgcgtgctggacatgcggagcatggacttcaagagcaactccgccgtggcctggtccaacaagtccgatttcgcctgcgccaacgccttcaacaacagcattatccccgaggacacattcttcccaagccccgagagcagctgcgacgtgaagctggtggaaaagagcttcgagacagacaccaacctgaacttccagatcctgtacgagatcctgctgggcaaggccaccctgtacgccgtgctggtgtctgccctggtgctgatggctatggtcaagcggaaggacagccggggacgcgccaagagaagcggatctggcgtgaagcagaccctgaatttcgacctgctgaagctggctggcgacgtggaatccaacccaggccctactagtatggactggatttggcgcatccttttccttgtcggcgctgctaccggcgcgcattccttcgaagaagtgcagctggttgaatcaggcggaggactggttcagcctggcggatctctgagactgtcttgtgccgccagcggctacaccttcaccaactactggatgaactgggtccgacaggcccctggcaaaggactggaatgggtcggaatgatcgaccccagcgacagcgagacacactacaaccacatcttcaaggaccgcttcaccatcagcgccgacaccagcaagaataccgcctacctccagatgaactccctgagagccgaggacaccgccgtgtactactgcgccagaaacctgtatctgtggggccagggaaccctggtcacagtgtcatctacgcgtgaggacctgaagaacgtgttcccacctgaggtggccgtgttcgagcctagcgaggccgagatcagccacacccagaaagccaccctcgtgtgcctggctaccggcttctaccccgaccatgtggaactgtcttggtgggtcaacggcaaagaggtgcacagcggcgtgtgtaccgacccccagccactgaaagaacagcccgccctgaacgacagccggtactgcctgagcagcagactgagagtgtccgccaccttctggcagaacccccggaaccacttcagatgccaggtgcagttctacggcctgagcgagaacgacgagtggacccaggacagagccaagcccgtgacccagatcgtgtctgccgaagcctggggcagagccgattgcggctttaccagcgagagctaccagcagggcgtgctgagcgccaccaacctgagcgtgatcggcttcagaatcctgctgctgaaagtggccggctttaacctgctgatgaccctgcggctgtggtccagc

SEQ ID NO: 37403 - DNA, 2673 bp, synthetic construct
  source 1..2673: mol_type = other DNA
atggccttaccagtgaccgccttgctcctgccgctggccttgctgctccacgccgccaggccggaagtgcagctggttgaatctggcggaggactggttcagcctggcggatctctgagactgtcttgtgccgccagcggcttcagcttcagcgacttttggatgagctgggtccgacaggcccctggcaaaggacttgaatgggtcgccacaatcagccaggccggcagcgagaaggactacgtggactctgtgaagggcagattcaccatcagccgggacaacgccaagaagtccctgtacctccagatgaacagcctgagagccgaggacaccgccgtgtactattgtgcctctggcgtgtacagcttcgactacagaggccagggcaccctggtcacagtctcttctggtaccggcggaggcggatctggcggcggaggtagcggtggcggaggatctgaattcgacatccagatgacacagagccctagcagcctgtctgccagcgtgggagacagagtgaccatcacatgcaagagcagccagagcctgctggactccgatggcaagacctacctgaactggtatcagcagaagcccggcaaggcccctaagctgctgatctacctggtgtccaagctggatagcggcgtgcccagcagattttctggcagcggcagcggaaccgacttcaccctgacaatatccagcctccagcctgaggacttcgccacctactactgcttccaaggcacccactttccattcaccttcggccagggcaccaaggtggaaatcaaaagactcgaggacctgaagaacgtgttcccacctgaggtggccgtgttcgagcctagcgaggccgagatcagccacacccagaaagccaccctcgtgtgcctggctaccggcttctaccccgaccatgtggaactgtcttggtgggtcaacggcaaagaggtgcacagcggcgtgtgtaccgacccccagccactgaaagaacagcccgccctgaacgacagccggtactgcctgagcagcagactgagagtgtccgccaccttctggcagaacccccggaaccacttcagatgccaggtgcagttctacggcctgagcgagaacgacgagtggacccaggacagagccaagcccgtgacccagatcgtgtctgccgaagcctggggcagagccgattgcggctttaccagcgagagctaccagcagggcgtgctgagcgccaccaacctgagcgtgatcggcttcagaatcctgctgctgaaagtggccggctttaacctgctgatgaccctgcggctgtggtccagcagggccaagcgatctggatctggagcaacaaacttctcactactcaaacaagcaggtgacgtggaggagaatcccgggcctactagtatggactggatttggcgcatccttttccttgtcggcgctgctaccggcgcgcattccgggccccagctccagctgcaagagtctggacctggcctggtcaagcctagcgagacactgagcctgacctgtaccgtgtccggcgatagcatcagcagcggcgattactactggggctggatcagacagcctcctggcaaaggactggaatggatcggccacatctactacagcggcgtgacctactacaaccccagcctgaagtccagagtgaccatcagcgtggacaccagccggaaccagttctccctgaagctgtctagcgtgacagccgccgataccgccgtgtactactgcaccagagaggacagcagcaactggcggagtagaggccagggaacactggtcacagttagctctggatccggcggaggcggaagtggaggcggaggatctggcggcggaggctctttcgaagaagtgcagctggttgaatcaggcggaggactggttcagcctggcggatctctgagactgtcttgtgccgccagcggctacaccttcaccaactactggatgaactgggtccgacaggcccctggcaaaggactggaatgggtcggaatgatcgaccccagcgacagcgagacacactacaaccacatcttcaaggaccgcttcaccatcagcgccgacaccagcaagaataccgcctacctccagatgaactccctgagagccgaggacaccgccgtgtactactgcgccagaaacctgtatctgtggggccagggaaccctggtcacagtgtcatctacgcgtatccagaaccctgatcctgccgtgtaccagctgcgggatagcaagagcagcgacaagagcgtgtgtctgttcaccgacttcgacagccagaccaacgtgtcccagagcaaggactccgacgtgtacatcaccgataagtgcgtgctggacatgcggagcatggacttcaagagcaactccgccgtggcctggtccaacaagtccgatttcgcctgcgccaacgccttcaacaacagcattatccccgaggacacattcttcccaagccccgagagcagctgcgacgtgaagctggtggaaaagagcttcgagacagacaccaacctgaacttccagatcctgtacgagatcctgctgggcaaggccaccctgtacgccgtgctggtgtctgccctggtgctgatggctatggtcaagcggaaggacagccgggga

SEQ ID NO: 37404 - DNA, 2685 bp, synthetic construct
  source 1..2685: mol_type = other DNA
atggccttaccagtgaccgccttgctcctgccgctggccttgctgctccacgccgccaggccggaagtgcagctggttgaatctggcggaggactggttcagcctggcggatctctgagactgtcttgtgccgccagcggcttcagcttcagcgacttttggatgagctgggtccgacaggcccctggcaaaggacttgaatgggtcgccacaatcagccaggccggcagcgagaaggactacgtggactctgtgaagggcagattcaccatcagccgggacaacgccaagaagtccctgtacctccagatgaacagcctgagagccgaggacaccgccgtgtactattgtgcctctggcgtgtacagcttcgactacagaggccagggcaccctggtcacagtctcttctggtaccggcggaggcggatctggcggcggaggtagcggtggcggaggatctgaattcgacatccagatgacacagagccctagcagcctgtctgccagcgtgggagacagagtgaccatcacatgcaagagcagccagagcctgctggactccgatggcaagacctacctgaactggtatcagcagaagcccggcaaggcccctaagctgctgatctacctggtgtccaagctggatagcggcgtgcccagcagattttctggcagcggcagcggaaccgacttcaccctgacaatatccagcctccagcctgaggacttcgccacctactactgcttccaaggcacccactttccattcaccttcggccagggcaccaaggtggaaatcaaaagactcgagatccagaaccctgatcctgccgtgtaccagctgcgggatagcaagagcagcgacaagagcgtgtgtctgttcaccgacttcgacagccagaccaacgtgtcccagagcaaggactccgacgtgtacatcaccgataagtgcgtgctggacatgcggagcatggacttcaagagcaactccgccgtggcctggtccaacaagtccgatttcgcctgcgccaacgccttcaacaacagcattatccccgaggacacattcttcccaagccccgagagcagctgcgacgtgaagctggtggaaaagagcttcgagacagacaccaacctgaacttccagatcctgtacgagatcctgctgggcaaggccaccctgtacgccgtgctggtgtctgccctggtgctgatggctatggtcaagcggaaggacagccggggacgcgccaagagaagcggatctggcgtgaagcagaccctgaatttcgacctgctgaagctggctggcgacgtggaatccaacccaggccctactagtatggactggatttggcgcatccttttccttgtcggcgctgctaccggcgcgcattccgggccccagctccagctgcaagagtctggacctggcctggtcaagcctagcgagacactgagcctgacctgtaccgtgtccggcgatagcatcagcagcggcgattactactggggctggatcagacagcctcctggcaaaggactggaatggatcggccacatctactacagcggcgtgacctactacaaccccagcctgaagtccagagtgaccatcagcgtggacaccagccggaaccagttctccctgaagctgtctagcgtgacagccgccgataccgccgtgtactactgcaccagagaggacagcagcaactggcggagtagaggccagggaacactggtcacagttagctctggatccggcggaggcggaagtggaggcggaggatctggcggcggaggctctttcgaagaagtgcagctggttgaatcaggcggaggactggttcagcctggcggatctctgagactgtcttgtgccgccagcggctacaccttcaccaactactggatgaactgggtccgacaggcccctggcaaaggactggaatgggtcggaatgatcgaccccagcgacagcgagacacactacaaccacatcttcaaggaccgcttcaccatcagcgccgacaccagcaagaataccgcctacctccagatgaactccctgagagccgaggacaccgccgtgtactactgcgccagaaacctgtatctgtggggccagggaaccctggtcacagtgtcatctacgcgtgaggacctgaagaacgtgttcccacctgaggtggccgtgttcgagcctagcgaggccgagatcagccacacccagaaagccaccctcgtgtgcctggctaccggcttctaccccgaccatgtggaactgtcttggtgggtcaacggcaaagaggtgcacagcggcgtgtgtaccgacccccagccactgaaagaacagcccgccctgaacgacagccggtactgcctgagcagcagactgagagtgtccgccaccttctggcagaacccccggaaccacttcagatgccaggtgcagttctacggcctgagcgagaacgacgagtggacccaggacagagccaagcccgtgacccagatcgtgtctgccgaagcctggggcagagccgattgcggctttaccagcgagagctaccagcagggcgtgctgagcgccaccaacctgagcgtgatcggcttcagaatcctgctgctgaaagtggccggctttaacctgctgatgaccctgcggctgtggtccagc

SEQ ID NO: 37405 - DNA, 2169 bp, synthetic construct
  source 1..2169: mol_type = other DNA
atggccttaccagtgaccgccttgctcctgccgctggccttgctgctccacgccgccaggccggacatccagatgacacagagccctagcagcctgtctgccagcgtgggagacagagtgaccatcacatgcaagagcagccagagcctgctggactccgatggcaagacctacctgaactggtatcagcagaagcccggcaaggcccctaagctgctgatctacctggtgtccaagctggatagcggcgtgcccagcagattttctggcagcggcagcggaaccgacttcaccctgacaatatccagcctccagcctgaggacttcgccacctactactgcttccaaggcacccactttccattcaccttcggccagggcaccaaggtggaaatcaaaagactcgaggacctgaagaacgtgttcccacctgaggtggccgtgttcgagcctagcgaggccgagatcagccacacccagaaagccaccctcgtgtgcctggctaccggcttctaccccgaccatgtggaactgtcttggtgggtcaacggcaaagaggtgcacagcggcgtgtgtaccgacccccagccactgaaagaacagcccgccctgaacgacagccggtactgcctgagcagcagactgagagtgtccgccaccttctggcagaacccccggaaccacttcagatgccaggtgcagttctacggcctgagcgagaacgacgagtggacccaggacagagccaagcccgtgacccagatcgtgtctgccgaagcctggggcagagccgatgatgtgattaagatccactggcaggaaaagaagtccaacaccatcctgggcagccaggaaggcaacaccatgaagaccaacgacacctacatgaagttcagctggctgaccgtgcccgagaagtccctggacaaagaacacagatgcatcgtgcggcacgaaaacaacaagaacggcgtggaccaggaaatcatcttcccacccatcaagaccgatgtgattacaatggaccccaaggacaactgctccaaggacgccaacgataccctgctgctccagctgaccaacaccagcgcctactacatgtacttgttgctgctgctgaagtccgtggtgtacttcgccatcatcacatgctgcctgctgatggctatggtcaagcggaaggacagccggggaagggccaagcgatctggatctggagcaacaaacttctcactactcaaacaagcaggtgacgtggaggagaatcccgggcctactagtatggactggatttggcgcatccttttccttgtcggcgctgctaccggcgcgcattccttcgaagaagtgcagctggttgaatcaggcggaggactggttcagcctggcggatctctgagactgtcttgtgccgccagcggctacaccttcaccaactactggatgaactgggtccgacaggcccctggcaaaggactggaatgggtcggaatgatcgaccccagcgacagcgagacacactacaaccacatcttcaaggaccgcttcaccatcagcgccgacaccagcaagaataccgcctacctccagatgaactccctgagagccgaggacaccgccgtgtactactgcgccagaaacctgtatctgtggggccagggaaccctggtcacagtgtcatctacgcgtatccagaaccctgatcctgccgtgtaccagctgcgggatagcaagagcagcgacaagagcgtgtgtctgttcaccgacttcgacagccagaccaacgtgtcccagagcaaggactccgacgtgtacatcaccgataagtgcgtgctggacatgcggagcatggacttcaagagcaactccgccgtggcctggtccaacaagtccgatttcgcctgcgccaacgccttcaacaacagcattatccccgaggacacattcttcccaagccccgagagcagcgactccaccgaccacgtgaagcccaaagagacagagaacaccaagcagcccagcaagagctgccacaagcccaaggccatcgtgcacaccgagaaagtgaacatgatgagcctgaccgtgctgggcctgcggatgctgttcgccaaaaccgtggccgtgaacttcctgctgaccgccaagctgttcttcctcctcaccgcc

SEQ ID NO: 37406 - DNA, 2181 bp, synthetic construct
  source 1..2181: mol_type = other DNA
atggccttaccagtgaccgccttgctcctgccgctggccttgctgctccacgccgccaggccggacatccagatgacacagagccctagcagcctgtctgccagcgtgggagacagagtgaccatcacatgcaagagcagccagagcctgctggactccgatggcaagacctacctgaactggtatcagcagaagcccggcaaggcccctaagctgctgatctacctggtgtccaagctggatagcggcgtgcccagcagattttctggcagcggcagcggaaccgacttcaccctgacaatatccagcctccagcctgaggacttcgccacctactactgcttccaaggcacccactttccattcaccttcggccagggcaccaaggtggaaatcaaaagactcgagatccagaaccctgatcctgccgtgtaccagctgcgggatagcaagagcagcgacaagagcgtgtgtctgttcaccgacttcgacagccagaccaacgtgtcccagagcaaggactccgacgtgtacatcaccgataagtgcgtgctggacatgcggagcatggacttcaagagcaactccgccgtggcctggtccaacaagtccgatttcgcctgcgccaacgccttcaacaacagcattatccccgaggacacattcttcccaagccccgagagcagcgactccaccgaccacgtgaagcccaaagagacagagaacaccaagcagcccagcaagagctgccacaagcccaaggccatcgtgcacaccgagaaagtgaacatgatgagcctgaccgtgctgggcctgcggatgctgttcgccaaaaccgtggccgtgaacttcctgctgaccgccaagctgttcttcctcctcaccgcccgcgccaagagaagcggatctggcgtgaagcagaccctgaatttcgacctgctgaagctggctggcgacgtggaatccaacccaggccctactagtatggactggatttggcgcatccttttccttgtcggcgctgctaccggcgcgcattccttcgaagaagtgcagctggttgaatcaggcggaggactggttcagcctggcggatctctgagactgtcttgtgccgccagcggctacaccttcaccaactactggatgaactgggtccgacaggcccctggcaaaggactggaatgggtcggaatgatcgaccccagcgacagcgagacacactacaaccacatcttcaaggaccgcttcaccatcagcgccgacaccagcaagaataccgcctacctccagatgaactccctgagagccgaggacaccgccgtgtactactgcgccagaaacctgtatctgtggggccagggaaccctggtcacagtgtcatctacgcgtgaggacctgaagaacgtgttcccacctgaggtggccgtgttcgagcctagcgaggccgagatcagccacacccagaaagccaccctcgtgtgcctggctaccggcttctaccccgaccatgtggaactgtcttggtgggtcaacggcaaagaggtgcacagcggcgtgtgtaccgacccccagccactgaaagaacagcccgccctgaacgacagccggtactgcctgagcagcagactgagagtgtccgccaccttctggcagaacccccggaaccacttcagatgccaggtgcagttctacggcctgagcgagaacgacgagtggacccaggacagagccaagcccgtgacccagatcgtgtctgccgaagcctggggcagagccgatgatgtgattaagatccactggcaggaaaagaagtccaacaccatcctgggcagccaggaaggcaacaccatgaagaccaacgacacctacatgaagttcagctggctgaccgtgcccgagaagtccctggacaaagaacacagatgcatcgtgcggcacgaaaacaacaagaacggcgtggaccaggaaatcatcttcccacccatcaagaccgatgtgattacaatggaccccaaggacaactgctccaaggacgccaacgataccctgctgctccagctgaccaacaccagcgcctactacatgtacttgttgctgctgctgaagtccgtggtgtacttcgccatcatcacatgctgcctgctgatggctatggtcaagcggaaggacagccgggga

SEQ ID NO: 37407 - DNA, 2574 bp, synthetic construct
  source 1..2574: mol_type = other DNA
atggccttaccagtgaccgccttgctcctgccgctggccttgctgctccacgccgccaggccggaagtgcagctggttgaatctggcggaggactggttcagcctggcggatctctgagactgtcttgtgccgccagcggcttcagcttcagcgacttttggatgagctgggtccgacaggcccctggcaaaggacttgaatgggtcgccacaatcagccaggccggcagcgagaaggactacgtggactctgtgaagggcagattcaccatcagccgggacaacgccaagaagtccctgtacctccagatgaacagcctgagagccgaggacaccgccgtgtactattgtgcctctggcgtgtacagcttcgactacagaggccagggcaccctggtcacagtctcttctggtaccggcggaggcggatctggcggcggaggtagcggtggcggaggatctgaattcgacatccagatgacacagagccctagcagcctgtctgccagcgtgggagacagagtgaccatcacatgcaagagcagccagagcctgctggactccgatggcaagacctacctgaactggtatcagcagaagcccggcaaggcccctaagctgctgatctacctggtgtccaagctggatagcggcgtgcccagcagattttctggcagcggcagcggaaccgacttcaccctgacaatatccagcctccagcctgaggacttcgccacctactactgcttccaaggcacccactttccattcaccttcggccagggcaccaaggtggaaatcaaaagactcgaggacctgaagaacgtgttcccacctgaggtggccgtgttcgagcctagcgaggccgagatcagccacacccagaaagccaccctcgtgtgcctggctaccggcttctaccccgaccatgtggaactgtcttggtgggtcaacggcaaagaggtgcacagcggcgtgtgtaccgacccccagccactgaaagaacagcccgccctgaacgacagccggtactgcctgagcagcagactgagagtgtccgccaccttctggcagaacccccggaaccacttcagatgccaggtgcagttctacggcctgagcgagaacgacgagtggacccaggacagagccaagcccgtgacccagatcgtgtctgccgaagcctggggcagagccgatgatgtgattaagatccactggcaggaaaagaagtccaacaccatcctgggcagccaggaaggcaacaccatgaagaccaacgacacctacatgaagttcagctggctgaccgtgcccgagaagtccctggacaaagaacacagatgcatcgtgcggcacgaaaacaacaagaacggcgtggaccaggaaatcatcttcccacccatcaagaccgatgtgattacaatggaccccaaggacaactgctccaaggacgccaacgataccctgctgctccagctgaccaacaccagcgcctactacatgtacttgttgctgctgctgaagtccgtggtgtacttcgccatcatcacatgctgcctgctgatggctatggtcaagcggaaggacagccggggaagggccaagcgatctggatctggagcaacaaacttctcactactcaaacaagcaggtgacgtggaggagaatcccgggcctactagtatggactggatttggcgcatccttttccttgtcggcgctgctaccggcgcgcattccttcgaagaagtgcagctggttgaatcaggcggaggactggttcagcctggcggatctctgagactgtcttgtgccgccagcggctacaccttcaccaactactggatgaactgggtccgacaggcccctggcaaaggactggaatgggtcggaatgatcgaccccagcgacagcgagacacactacaaccacatcttcaaggaccgcttcaccatcagcgccgacaccagcaagaataccgcctacctccagatgaactccctgagagccgaggacaccgccgtgtactactgcgccagaaacctgtatctgtggggccagggaaccctggtcacagtgtcatctacgcgtatccagaaccctgatcctgccgtgtaccagctgcgggatagcaagagcagcgacaagagcgtgtgtctgttcaccgacttcgacagccagaccaacgtgtcccagagcaaggactccgacgtgtacatcaccgataagtgcgtgctggacatgcggagcatggacttcaagagcaactccgccgtggcctggtccaacaagtccgatttcgcctgcgccaacgccttcaacaacagcattatccccgaggacacattcttcccaagccccgagagcagcgactccaccgaccacgtgaagcccaaagagacagagaacaccaagcagcccagcaagagctgccacaagcccaaggccatcgtgcacaccgagaaagtgaacatgatgagcctgaccgtgctgggcctgcggatgctgttcgccaaaaccgtggccgtgaacttcctgctgaccgccaagctgttcttcctcctcaccgcc

SEQ ID NO: 37408 - DNA, 2586 bp, synthetic construct
  source 1..2586: mol_type = other DNA
atggccttaccagtgaccgccttgctcctgccgctggccttgctgctccacgccgccaggccggaagtgcagctggttgaatctggcggaggactggttcagcctggcggatctctgagactgtcttgtgccgccagcggcttcagcttcagcgacttttggatgagctgggtccgacaggcccctggcaaaggacttgaatgggtcgccacaatcagccaggccggcagcgagaaggactacgtggactctgtgaagggcagattcaccatcagccgggacaacgccaagaagtccctgtacctccagatgaacagcctgagagccgaggacaccgccgtgtactattgtgcctctggcgtgtacagcttcgactacagaggccagggcaccctggtcacagtctcttctggtaccggcggaggcggatctggcggcggaggtagcggtggcggaggatctgaattcgacatccagatgacacagagccctagcagcctgtctgccagcgtgggagacagagtgaccatcacatgcaagagcagccagagcctgctggactccgatggcaagacctacctgaactggtatcagcagaagcccggcaaggcccctaagctgctgatctacctggtgtccaagctggatagcggcgtgcccagcagattttctggcagcggcagcggaaccgacttcaccctgacaatatccagcctccagcctgaggacttcgccacctactactgcttccaaggcacccactttccattcaccttcggccagggcaccaaggtggaaatcaaaagactcgagatccagaaccctgatcctgccgtgtaccagctgcgggatagcaagagcagcgacaagagcgtgtgtctgttcaccgacttcgacagccagaccaacgtgtcccagagcaaggactccgacgtgtacatcaccgataagtgcgtgctggacatgcggagcatggacttcaagagcaactccgccgtggcctggtccaacaagtccgatttcgcctgcgccaacgccttcaacaacagcattatccccgaggacacattcttcccaagccccgagagcagcgactccaccgaccacgtgaagcccaaagagacagagaacaccaagcagcccagcaagagctgccacaagcccaaggccatcgtgcacaccgagaaagtgaacatgatgagcctgaccgtgctgggcctgcggatgctgttcgccaaaaccgtggccgtgaacttcctgctgaccgccaagctgttcttcctcctcaccgcccgcgccaagagaagcggatctggcgtgaagcagaccctgaatttcgacctgctgaagctggctggcgacgtggaatccaacccaggccctactagtatggactggatttggcgcatccttttccttgtcggcgctgctaccggcgcgcattccttcgaagaagtgcagctggttgaatcaggcggaggactggttcagcctggcggatctctgagactgtcttgtgccgccagcggctacaccttcaccaactactggatgaactgggtccgacaggcccctggcaaaggactggaatgggtcggaatgatcgaccccagcgacagcgagacacactacaaccacatcttcaaggaccgcttcaccatcagcgccgacaccagcaagaataccgcctacctccagatgaactccctgagagccgaggacaccgccgtgtactactgcgccagaaacctgtatctgtggggccagggaaccctggtcacagtgtcatctacgcgtgaggacctgaagaacgtgttcccacctgaggtggccgtgttcgagcctagcgaggccgagatcagccacacccagaaagccaccctcgtgtgcctggctaccggcttctaccccgaccatgtggaactgtcttggtgggtcaacggcaaagaggtgcacagcggcgtgtgtaccgacccccagccactgaaagaacagcccgccctgaacgacagccggtactgcctgagcagcagactgagagtgtccgccaccttctggcagaacccccggaaccacttcagatgccaggtgcagttctacggcctgagcgagaacgacgagtggacccaggacagagccaagcccgtgacccagatcgtgtctgccgaagcctggggcagagccgatgatgtgattaagatccactggcaggaaaagaagtccaacaccatcctgggcagccaggaaggcaacaccatgaagaccaacgacacctacatgaagttcagctggctgaccgtgcccgagaagtccctggacaaagaacacagatgcatcgtgcggcacgaaaacaacaagaacggcgtggaccaggaaatcatcttcccacccatcaagaccgatgtgattacaatggaccccaaggacaactgctccaaggacgccaacgataccctgctgctccagctgaccaacaccagcgcctactacatgtacttgttgctgctgctgaagtccgtggtgtacttcgccatcatcacatgctgcctgctgatggctatggtcaagcggaaggacagccgggga

SEQ ID NO: 37409 - DNA, 2985 bp, synthetic construct
  source 1..2985: mol_type = other DNA
atggccttaccagtgaccgccttgctcctgccgctggccttgctgctccacgccgccaggccggaagtgcagctggttgaatctggcggaggactggttcagcctggcggatctctgagactgtcttgtgccgccagcggcttcagcttcagcgacttttggatgagctgggtccgacaggcccctggcaaaggacttgaatgggtcgccacaatcagccaggccggcagcgagaaggactacgtggactctgtgaagggcagattcaccatcagccgggacaacgccaagaagtccctgtacctccagatgaacagcctgagagccgaggacaccgccgtgtactattgtgcctctggcgtgtacagcttcgactacagaggccagggcaccctggtcacagtctcttctggtaccggcggaggcggatctggcggcggaggtagcggtggcggaggatctgaattcgacatccagatgacacagagccctagcagcctgtctgccagcgtgggagacagagtgaccatcacatgcaagagcagccagagcctgctggactccgatggcaagacctacctgaactggtatcagcagaagcccggcaaggcccctaagctgctgatctacctggtgtccaagctggatagcggcgtgcccagcagattttctggcagcggcagcggaaccgacttcaccctgacaatatccagcctccagcctgaggacttcgccacctactactgcttccaaggcacccactttccattcaccttcggccagggcaccaaggtggaaatcaaaagactcgaggacctgaagaacgtgttcccacctgaggtggccgtgttcgagcctagcgaggccgagatcagccacacccagaaagccaccctcgtgtgcctggctaccggcttctaccccgaccatgtggaactgtcttggtgggtcaacggcaaagaggtgcacagcggcgtgtgtaccgacccccagccactgaaagaacagcccgccctgaacgacagccggtactgcctgagcagcagactgagagtgtccgccaccttctggcagaacccccggaaccacttcagatgccaggtgcagttctacggcctgagcgagaacgacgagtggacccaggacagagccaagcccgtgacccagatcgtgtctgccgaagcctggggcagagccgatgatgtgattaagatccactggcaggaaaagaagtccaacaccatcctgggcagccaggaaggcaacaccatgaagaccaacgacacctacatgaagttcagctggctgaccgtgcccgagaagtccctggacaaagaacacagatgcatcgtgcggcacgaaaacaacaagaacggcgtggaccaggaaatcatcttcccacccatcaagaccgatgtgattacaatggaccccaaggacaactgctccaaggacgccaacgataccctgctgctccagctgaccaacaccagcgcctactacatgtacttgttgctgctgctgaagtccgtggtgtacttcgccatcatcacatgctgcctgctgatggctatggtcaagcggaaggacagccggggaagggccaagcgatctggatctggagcaacaaacttctcactactcaaacaagcaggtgacgtggaggagaatcccgggcctactagtatggactggatttggcgcatccttttccttgtcggcgctgctaccggcgcgcattccgggccccagctccagctgcaagagtctggacctggcctggtcaagcctagcgagacactgagcctgacctgtaccgtgtccggcgatagcatcagcagcggcgattactactggggctggatcagacagcctcctggcaaaggactggaatggatcggccacatctactacagcggcgtgacctactacaaccccagcctgaagtccagagtgaccatcagcgtggacaccagccggaaccagttctccctgaagctgtctagcgtgacagccgccgataccgccgtgtactactgcaccagagaggacagcagcaactggcggagtagaggccagggaacactggtcacagttagctctggatccggcggaggcggaagtggaggcggaggatctggcggcggaggctctttcgaagaagtgcagctggttgaatcaggcggaggactggttcagcctggcggatctctgagactgtcttgtgccgccagcggctacaccttcaccaactactggatgaactgggtccgacaggcccctggcaaaggactggaatgggtcggaatgatcgaccccagcgacagcgagacacactacaaccacatcttcaaggaccgcttcaccatcagcgccgacaccagcaagaataccgcctacctccagatgaactccctgagagccgaggacaccgccgtgtactactgcgccagaaacctgtatctgtggggccagggaaccctggtcacagtgtcatctacgcgtatccagaaccctgatcctgccgtgtaccagctgcgggatagcaagagcagcgacaagagcgtgtgtctgttcaccgacttcgacagccagaccaacgtgtcccagagcaaggactccgacgtgtacatcaccgataagtgcgtgctggacatgcggagcatggacttcaagagcaactccgccgtggcctggtccaacaagtccgatttcgcctgcgccaacgccttcaacaacagcattatccccgaggacacattcttcccaagccccgagagcagcgactccaccgaccacgtgaagcccaaagagacagagaacaccaagcagcccagcaagagctgccacaagcccaaggccatcgtgcacaccgagaaagtgaacatgatgagcctgaccgtgctgggcctgcggatgctgttcgccaaaaccgtggccgtgaacttcctgctgaccgccaagctgttcttcctcctcaccgcc

SEQ ID NO: 37410 - DNA, 2997 bp, synthetic construct
  source 1..2997: mol_type = other DNA
atggccttaccagtgaccgccttgctcctgccgctggccttgctgctccacgccgccaggccggaagtgcagctggttgaatctggcggaggactggttcagcctggcggatctctgagactgtcttgtgccgccagcggcttcagcttcagcgacttttggatgagctgggtccgacaggcccctggcaaaggacttgaatgggtcgccacaatcagccaggccggcagcgagaaggactacgtggactctgtgaagggcagattcaccatcagccgggacaacgccaagaagtccctgtacctccagatgaacagcctgagagccgaggacaccgccgtgtactattgtgcctctggcgtgtacagcttcgactacagaggccagggcaccctggtcacagtctcttctggtaccggcggaggcggatctggcggcggaggtagcggtggcggaggatctgaattcgacatccagatgacacagagccctagcagcctgtctgccagcgtgggagacagagtgaccatcacatgcaagagcagccagagcctgctggactccgatggcaagacctacctgaactggtatcagcagaagcccggcaaggcccctaagctgctgatctacctggtgtccaagctggatagcggcgtgcccagcagattttctggcagcggcagcggaaccgacttcaccctgacaatatccagcctccagcctgaggacttcgccacctactactgcttccaaggcacccactttccattcaccttcggccagggcaccaaggtggaaatcaaaagactcgagatccagaaccctgatcctgccgtgtaccagctgcgggatagcaagagcagcgacaagagcgtgtgtctgttcaccgacttcgacagccagaccaacgtgtcccagagcaaggactccgacgtgtacatcaccgataagtgcgtgctggacatgcggagcatggacttcaagagcaactccgccgtggcctggtccaacaagtccgatttcgcctgcgccaacgccttcaacaacagcattatccccgaggacacattcttcccaagccccgagagcagcgactccaccgaccacgtgaagcccaaagagacagagaacaccaagcagcccagcaagagctgccacaagcccaaggccatcgtgcacaccgagaaagtgaacatgatgagcctgaccgtgctgggcctgcggatgctgttcgccaaaaccgtggccgtgaacttcctgctgaccgccaagctgttcttcctcctcaccgcccgcgccaagagaagcggatctggcgtgaagcagaccctgaatttcgacctgctgaagctggctggcgacgtggaatccaacccaggccctactagtatggactggatttggcgcatccttttccttgtcggcgctgctaccggcgcgcattccgggccccagctccagctgcaagagtctggacctggcctggtcaagcctagcgagacactgagcctgacctgtaccgtgtccggcgatagcatcagcagcggcgattactactggggctggatcagacagcctcctggcaaaggactggaatggatcggccacatctactacagcggcgtgacctactacaaccccagcctgaagtccagagtgaccatcagcgtggacaccagccggaaccagttctccctgaagctgtctagcgtgacagccgccgataccgccgtgtactactgcaccagagaggacagcagcaactggcggagtagaggccagggaacactggtcacagttagctctggatccggcggaggcggaagtggaggcggaggatctggcggcggaggctctttcgaagaagtgcagctggttgaatcaggcggaggactggttcagcctggcggatctctgagactgtcttgtgccgccagcggctacaccttcaccaactactggatgaactgggtccgacaggcccctggcaaaggactggaatgggtcggaatgatcgaccccagcgacagcgagacacactacaaccacatcttcaaggaccgcttcaccatcagcgccgacaccagcaagaataccgcctacctccagatgaactccctgagagccgaggacaccgccgtgtactactgcgccagaaacctgtatctgtggggccagggaaccctggtcacagtgtcatctacgcgtgaggacctgaagaacgtgttcccacctgaggtggccgtgttcgagcctagcgaggccgagatcagccacacccagaaagccaccctcgtgtgcctggctaccggcttctaccccgaccatgtggaactgtcttggtgggtcaacggcaaagaggtgcacagcggcgtgtgtaccgacccccagccactgaaagaacagcccgccctgaacgacagccggtactgcctgagcagcagactgagagtgtccgccaccttctggcagaacccccggaaccacttcagatgccaggtgcagttctacggcctgagcgagaacgacgagtggacccaggacagagccaagcccgtgacccagatcgtgtctgccgaagcctggggcagagccgatgatgtgattaagatccactggcaggaaaagaagtccaacaccatcctgggcagccaggaaggcaacaccatgaagaccaacgacacctacatgaagttcagctggctgaccgtgcccgagaagtccctggacaaagaacacagatgcatcgtgcggcacgaaaacaacaagaacggcgtggaccaggaaatcatcttcccacccatcaagaccgatgtgattacaatggaccccaaggacaactgctccaaggacgccaacgataccctgctgctccagctgaccaacaccagcgcctactacatgtacttgttgctgctgctgaagtccgtggtgtacttcgccatcatcacatgctgcctgctgatggctatggtcaagcggaaggacagccgggga

SEQ ID NO: 37411 - DNA, 2163 bp, synthetic construct
  source 1..2163: mol_type = other DNA
atggccttaccagtgaccgccttgctcctgccgctggccttgctgctccacgccgccaggccggacatccagatgacacagagccctagcagcctgtctgccagcgtgggagacagagtgaccatcacatgcaagagcagccagagcctgctggactccgatggcaagacctacctgaactggtatcagcagaagcccggcaaggcccctaagctgctgatctacctggtgtccaagctggatagcggcgtgcccagcagattttctggcagcggcagcggaaccgacttcaccctgacaatatccagcctccagcctgaggacttcgccacctactactgcttccaaggcacccactttccattcaccttcggccagggcaccaaggtggaaatcaaaagactcgaggacctgaagaacgtgttcccacctgaggtggccgtgttcgagcctagcgaggccgagatcagccacacccagaaagccaccctcgtgtgcctggctaccggcttctaccccgaccatgtggaactgtcttggtgggtcaacggcaaagaggtgcacagcggcgtgtgtaccgacccccagccactgaaagaacagcccgccctgaacgacagccggtactgcctgagcagcagactgagagtgtccgccaccttctggcagaacccccggaaccacttcagatgccaggtgcagttctacggcctgagcgagaacgacgagtggacccaggacagagccaagcccgtgacccagatcgtgtctgccgaagcctggggcagagccgatgatgtgattaagatccactggcaggaaaagaagtccaacaccatcctgggcagccaggaaggcaacaccatgaagaccaacgacacctacatgaagttcagctggctgaccgtgcccgagaagtccctggacaaagaacacagatgcatcgtgcggcacgaaaacaacaagaacggcgtggaccaggaaatcatcttcccacccatcaagaccgatgtgattacaatggaccccaaggacaactgctccaaggacgccaacgataccctgctgctccagctgaccaacaccagcgcctactacatgtacttgttgctgctgctgaagtccgtggtgtacttcgccatcatcacatgctgcctgctgcggagaaccgccttctgctgcaacggcgagaagtctagggccaagcgatctggatctggagcaacaaacttctcactactcaaacaagcaggtgacgtggaggagaatcccgggcctactagtatggactggatttggcgcatccttttccttgtcggcgctgctaccggcgcgcattccttcgaagaagtgcagctggttgaatcaggcggaggactggttcagcctggcggatctctgagactgtcttgtgccgccagcggctacaccttcaccaactactggatgaactgggtccgacaggcccctggcaaaggactggaatgggtcggaatgatcgaccccagcgacagcgagacacactacaaccacatcttcaaggaccgcttcaccatcagcgccgacaccagcaagaataccgcctacctccagatgaactccctgagagccgaggacaccgccgtgtactactgcgccagaaacctgtatctgtggggccagggaaccctggtcacagtgtcatctacgcgtatccagaaccctgatcctgccgtgtaccagctgcgggatagcaagagcagcgacaagagcgtgtgtctgttcaccgacttcgacagccagaccaacgtgtcccagagcaaggactccgacgtgtacatcaccgataagtgcgtgctggacatgcggagcatggacttcaagagcaactccgccgtggcctggtccaacaagtccgatttcgcctgcgccaacgccttcaacaacagcattatccccgaggacacattcttcccaagccccgagagcagcgactccaccgaccacgtgaagcccaaagagacagagaacaccaagcagcccagcaagagctgccacaagcccaaggccatcgtgcacaccgagaaagtgaacatgatgagcctgaccgtgctgggcctgcggatgctgttcgccaaaaccgtggccgtgaacttcctgctgaccgccaagctgttcttcctc

SEQ ID NO: 37412 - DNA, 2175 bp, synthetic construct
  source 1..2175: mol_type = other DNA
atggccttaccagtgaccgccttgctcctgccgctggccttgctgctccacgccgccaggccggacatccagatgacacagagccctagcagcctgtctgccagcgtgggagacagagtgaccatcacatgcaagagcagccagagcctgctggactccgatggcaagacctacctgaactggtatcagcagaagcccggcaaggcccctaagctgctgatctacctggtgtccaagctggatagcggcgtgcccagcagattttctggcagcggcagcggaaccgacttcaccctgacaatatccagcctccagcctgaggacttcgccacctactactgcttccaaggcacccactttccattcaccttcggccagggcaccaaggtggaaatcaaaagactcgagatccagaaccctgatcctgccgtgtaccagctgcgggatagcaagagcagcgacaagagcgtgtgtctgttcaccgacttcgacagccagaccaacgtgtcccagagcaaggactccgacgtgtacatcaccgataagtgcgtgctggacatgcggagcatggacttcaagagcaactccgccgtggcctggtccaacaagtccgatttcgcctgcgccaacgccttcaacaacagcattatccccgaggacacattcttcccaagccccgagagcagcgactccaccgaccacgtgaagcccaaagagacagagaacaccaagcagcccagcaagagctgccacaagcccaaggccatcgtgcacaccgagaaagtgaacatgatgagcctgaccgtgctgggcctgcggatgctgttcgccaaaaccgtggccgtgaacttcctgctgaccgccaagctgttcttcctccgcgccaagagaagcggatctggcgtgaagcagaccctgaatttcgacctgctgaagctggctggcgacgtggaatccaacccaggccctactagtatggactggatttggcgcatccttttccttgtcggcgctgctaccggcgcgcattccttcgaagaagtgcagctggttgaatcaggcggaggactggttcagcctggcggatctctgagactgtcttgtgccgccagcggctacaccttcaccaactactggatgaactgggtccgacaggcccctggcaaaggactggaatgggtcggaatgatcgaccccagcgacagcgagacacactacaaccacatcttcaaggaccgcttcaccatcagcgccgacaccagcaagaataccgcctacctccagatgaactccctgagagccgaggacaccgccgtgtactactgcgccagaaacctgtatctgtggggccagggaaccctggtcacagtgtcatctacgcgtgaggacctgaagaacgtgttcccacctgaggtggccgtgttcgagcctagcgaggccgagatcagccacacccagaaagccaccctcgtgtgcctggctaccggcttctaccccgaccatgtggaactgtcttggtgggtcaacggcaaagaggtgcacagcggcgtgtgtaccgacccccagccactgaaagaacagcccgccctgaacgacagccggtactgcctgagcagcagactgagagtgtccgccaccttctggcagaacccccggaaccacttcagatgccaggtgcagttctacggcctgagcgagaacgacgagtggacccaggacagagccaagcccgtgacccagatcgtgtctgccgaagcctggggcagagccgatgatgtgattaagatccactggcaggaaaagaagtccaacaccatcctgggcagccaggaaggcaacaccatgaagaccaacgacacctacatgaagttcagctggctgaccgtgcccgagaagtccctggacaaagaacacagatgcatcgtgcggcacgaaaacaacaagaacggcgtggaccaggaaatcatcttcccacccatcaagaccgatgtgattacaatggaccccaaggacaactgctccaaggacgccaacgataccctgctgctccagctgaccaacaccagcgcctactacatgtacttgttgctgctgctgaagtccgtggtgtacttcgccatcatcacatgctgcctgctgcggagaaccgccttctgctgcaacggcgagaagtct

SEQ ID NO: 37413 - DNA, 2568 bp, synthetic construct
  source 1..2568: mol_type = other DNA
atggccttaccagtgaccgccttgctcctgccgctggccttgctgctccacgccgccaggccggaagtgcagctggttgaatctggcggaggactggttcagcctggcggatctctgagactgtcttgtgccgccagcggcttcagcttcagcgacttttggatgagctgggtccgacaggcccctggcaaaggacttgaatgggtcgccacaatcagccaggccggcagcgagaaggactacgtggactctgtgaagggcagattcaccatcagccgggacaacgccaagaagtccctgtacctccagatgaacagcctgagagccgaggacaccgccgtgtactattgtgcctctggcgtgtacagcttcgactacagaggccagggcaccctggtcacagtctcttctggtaccggcggaggcggatctggcggcggaggtagcggtggcggaggatctgaattcgacatccagatgacacagagccctagcagcctgtctgccagcgtgggagacagagtgaccatcacatgcaagagcagccagagcctgctggactccgatggcaagacctacctgaactggtatcagcagaagcccggcaaggcccctaagctgctgatctacctggtgtccaagctggatagcggcgtgcccagcagattttctggcagcggcagcggaaccgacttcaccctgacaatatccagcctccagcctgaggacttcgccacctactactgcttccaaggcacccactttccattcaccttcggccagggcaccaaggtggaaatcaaaagactcgaggacctgaagaacgtgttcccacctgaggtggccgtgttcgagcctagcgaggccgagatcagccacacccagaaagccaccctcgtgtgcctggctaccggcttctaccccgaccatgtggaactgtcttggtgggtcaacggcaaagaggtgcacagcggcgtgtgtaccgacccccagccactgaaagaacagcccgccctgaacgacagccggtactgcctgagcagcagactgagagtgtccgccaccttctggcagaacccccggaaccacttcagatgccaggtgcagttctacggcctgagcgagaacgacgagtggacccaggacagagccaagcccgtgacccagatcgtgtctgccgaagcctggggcagagccgatgatgtgattaagatccactggcaggaaaagaagtccaacaccatcctgggcagccaggaaggcaacaccatgaagaccaacgacacctacatgaagttcagctggctgaccgtgcccgagaagtccctggacaaagaacacagatgcatcgtgcggcacgaaaacaacaagaacggcgtggaccaggaaatcatcttcccacccatcaagaccgatgtgattacaatggaccccaaggacaactgctccaaggacgccaacgataccctgctgctccagctgaccaacaccagcgcctactacatgtacttgttgctgctgctgaagtccgtggtgtacttcgccatcatcacatgctgcctgctgcggagaaccgccttctgctgcaacggcgagaagtctagggccaagcgatctggatctggagcaacaaacttctcactactcaaacaagcaggtgacgtggaggagaatcccgggcctactagtatggactggatttggcgcatccttttccttgtcggcgctgctaccggcgcgcattccttcgaagaagtgcagctggttgaatcaggcggaggactggttcagcctggcggatctctgagactgtcttgtgccgccagcggctacaccttcaccaactactggatgaactgggtccgacaggcccctggcaaaggactggaatgggtcggaatgatcgaccccagcgacagcgagacacactacaaccacatcttcaaggaccgcttcaccatcagcgccgacaccagcaagaataccgcctacctccagatgaactccctgagagccgaggacaccgccgtgtactactgcgccagaaacctgtatctgtggggccagggaaccctggtcacagtgtcatctacgcgtatccagaaccctgatcctgccgtgtaccagctgcgggatagcaagagcagcgacaagagcgtgtgtctgttcaccgacttcgacagccagaccaacgtgtcccagagcaaggactccgacgtgtacatcaccgataagtgcgtgctggacatgcggagcatggacttcaagagcaactccgccgtggcctggtccaacaagtccgatttcgcctgcgccaacgccttcaacaacagcattatccccgaggacacattcttcccaagccccgagagcagcgactccaccgaccacgtgaagcccaaagagacagagaacaccaagcagcccagcaagagctgccacaagcccaaggccatcgtgcacaccgagaaagtgaacatgatgagcctgaccgtgctgggcctgcggatgctgttcgccaaaaccgtggccgtgaacttcctgctgaccgccaagctgttcttcctc

SEQ ID NO: 37414 - DNA, 2979 bp, synthetic construct
  source 1..2979: mol_type = other DNA
atggccttaccagtgaccgccttgctcctgccgctggccttgctgctccacgccgccaggccggaagtgcagctggttgaatctggcggaggactggttcagcctggcggatctctgagactgtcttgtgccgccagcggcttcagcttcagcgacttttggatgagctgggtccgacaggcccctggcaaaggacttgaatgggtcgccacaatcagccaggccggcagcgagaaggactacgtggactctgtgaagggcagattcaccatcagccgggacaacgccaagaagtccctgtacctccagatgaacagcctgagagccgaggacaccgccgtgtactattgtgcctctggcgtgtacagcttcgactacagaggccagggcaccctggtcacagtctcttctggtaccggcggaggcggatctggcggcggaggtagcggtggcggaggatctgaattcgacatccagatgacacagagccctagcagcctgtctgccagcgtgggagacagagtgaccatcacatgcaagagcagccagagcctgctggactccgatggcaagacctacctgaactggtatcagcagaagcccggcaaggcccctaagctgctgatctacctggtgtccaagctggatagcggcgtgcccagcagattttctggcagcggcagcggaaccgacttcaccctgacaatatccagcctccagcctgaggacttcgccacctactactgcttccaaggcacccactttccattcaccttcggccagggcaccaaggtggaaatcaaaagactcgaggacctgaagaacgtgttcccacctgaggtggccgtgttcgagcctagcgaggccgagatcagccacacccagaaagccaccctcgtgtgcctggctaccggcttctaccccgaccatgtggaactgtcttggtgggtcaacggcaaagaggtgcacagcggcgtgtgtaccgacccccagccactgaaagaacagcccgccctgaacgacagccggtactgcctgagcagcagactgagagtgtccgccaccttctggcagaacccccggaaccacttcagatgccaggtgcagttctacggcctgagcgagaacgacgagtggacccaggacagagccaagcccgtgacccagatcgtgtctgccgaagcctggggcagagccgatgatgtgattaagatccactggcaggaaaagaagtccaacaccatcctgggcagccaggaaggcaacaccatgaagaccaacgacacctacatgaagttcagctggctgaccgtgcccgagaagtccctggacaaagaacacagatgcatcgtgcggcacgaaaacaacaagaacggcgtggaccaggaaatcatcttcccacccatcaagaccgatgtgattacaatggaccccaaggacaactgctccaaggacgccaacgataccctgctgctccagctgaccaacaccagcgcctactacatgtacttgttgctgctgctgaagtccgtggtgtacttcgccatcatcacatgctgcctgctgcggagaaccgccttctgctgcaacggcgagaagtctagggccaagcgatctggatctggagcaacaaacttctcactactcaaacaagcaggtgacgtggaggagaatcccgggcctactagtatggactggatttggcgcatccttttccttgtcggcgctgctaccggcgcgcattccgggccccagctccagctgcaagagtctggacctggcctggtcaagcctagcgagacactgagcctgacctgtaccgtgtccggcgatagcatcagcagcggcgattactactggggctggatcagacagcctcctggcaaaggactggaatggatcggccacatctactacagcggcgtgacctactacaaccccagcctgaagtccagagtgaccatcagcgtggacaccagccggaaccagttctccctgaagctgtctagcgtgacagccgccgataccgccgtgtactactgcaccagagaggacagcagcaactggcggagtagaggccagggaacactggtcacagttagctctggatccggcggaggcggaagtggaggcggaggatctggcggcggaggctctttcgaagaagtgcagctggttgaatcaggcggaggactggttcagcctggcggatctctgagactgtcttgtgccgccagcggctacaccttcaccaactactggatgaactgggtccgacaggcccctggcaaaggactggaatgggtcggaatgatcgaccccagcgacagcgagacacactacaaccacatcttcaaggaccgcttcaccatcagcgccgacaccagcaagaataccgcctacctccagatgaactccctgagagccgaggacaccgccgtgtactactgcgccagaaacctgtatctgtggggccagggaaccctggtcacagtgtcatctacgcgtatccagaaccctgatcctgccgtgtaccagctgcgggatagcaagagcagcgacaagagcgtgtgtctgttcaccgacttcgacagccagaccaacgtgtcccagagcaaggactccgacgtgtacatcaccgataagtgcgtgctggacatgcggagcatggacttcaagagcaactccgccgtggcctggtccaacaagtccgatttcgcctgcgccaacgccttcaacaacagcattatccccgaggacacattcttcccaagccccgagagcagcgactccaccgaccacgtgaagcccaaagagacagagaacaccaagcagcccagcaagagctgccacaagcccaaggccatcgtgcacaccgagaaagtgaacatgatgagcctgaccgtgctgggcctgcggatgctgttcgccaaaaccgtggccgtgaacttcctgctgaccgccaagctgttcttcctc

SEQ ID NO: 37415 - DNA, 1857 bp, synthetic construct
  source 1..1857: mol_type = other DNA
atggccttaccagtgaccgccttgctcctgccgctggccttgctgctccacgccgccaggccggacatccagatgacacagagccctagcagcctgtctgccagcgtgggagacagagtgaccatcacatgcaagagcagccagagcctgctggactccgatggcaagacctacctgaactggtatcagcagaagcccggcaaggcccctaagctgctgatctacctggtgtccaagctggatagcggcgtgcccagcagattttctggcagcggcagcggaaccgacttcaccctgacaatatccagcctccagcctgaggacttcgccacctactactgcttccaaggcacccactttccattcaccttcggccagggcaccaaggtggaaatcaaaagactcgaggacctgaagaacgtgttcccacctgaggtggccgtgttcgagcctagcgaggccgagatcagccacacccagaaagccaccctcgtgtgcctggctaccggcttctaccccgaccatgtggaactgtcttggtgggtcaacggcaaagaggtgcacagcggcgtgtctaccgacccccagccactgaaagaacagcccgccctgaacgacagccggtactgcctgagcagcagactgagagtgtccgccaccttctggcagaacccccggaaccacttcagatgccaggtgcagttctacggcctgagcgagaacgacgagtggacccaggacagagccaagcccgtgacccagatcgtgtctgccgaagcctggggcagagccgattgcgacgtgaagctggtggaaaagagcttcgagacagacaccaacctgaacttccagaacctgagcgtgatcggcttcagaatcctgctgctgaaagtggccggctttaacctgctgatgaccctgcggctgtggtccagcagggccaagcgatctggatctggagcaacaaacttctcactactcaaacaagcaggtgacgtggaggagaatcccgggcctactagtatggactggatttggcgcatccttttccttgtcggcgctgctaccggcgcgcattccttcgaagaagtgcagctggttgaatcaggcggaggactggttcagcctggcggatctctgagactgtcttgtgccgccagcggctacaccttcaccaactactggatgaactgggtccgacaggcccctggcaaaggactggaatgggtcggaatgatcgaccccagcgacagcgagacacactacaaccacatcttcaaggaccgcttcaccatcagcgccgacaccagcaagaataccgcctacctccagatgaactccctgagagccgaggacaccgccgtgtactactgcgccagaaacctgtatctgtggggccagggaaccctggtcacagtgtcatctacgcgtatccagaaccctgatcctgccgtgtaccagctgcgggatagcaagagcagcgacaagagcgtgtgtctgttcaccgacttcgacagccagaccaacgtgtcccagagcaaggactccgacgtgtacatcaccgataagaccgtgctggacatgcggagcatggacttcaagagcaactccgccgtggcctggtccaacaagtccgatttcgcctgcgccaacgccttcaacaacagcattatccccgaggacacattcttcccaagccccgagagcagctgcggctttaccagcgagagctaccagcagggcgtgctgagcgccaccatcctgtacgagatcctgctgggcaaggccaccctgtacgccgtgctggtgtctgccctggtgctgatggctatggtcaagcggaaggacagccgggga

SEQ ID NO: 37416 - DNA, 1857 bp, synthetic construct
  source 1..1857: mol_type = other DNA
atggccttaccagtgaccgccttgctcctgccgctggccttgctgctccacgccgccaggccggacatccagatgacacagagccctagcagcctgtctgccagcgtgggagacagagtgaccatcacatgcaagagcagccagagcctgctggactccgatggcaagacctacctgaactggtatcagcagaagcccggcaaggcccctaagctgctgatctacctggtgtccaagctggatagcggcgtgcccagcagattttctggcagcggcagcggaaccgacttcaccctgacaatatccagcctccagcctgaggacttcgccacctactactgcttccaaggcacccactttccattcaccttcggccagggcaccaaggtggaaatcaaaagactcgaggacctgaagaacgtgttcccacctgaggtggccgtgttcgagcctagcgaggccgagatcagccacacccagaaagccaccctcgtgtgcctggctaccggcttctaccccgaccatgtggaactgtcttggtgggtcaacggcaaagaggtgcacagcggcgtgtctaccgacccccagccactgaaagaacagcccgccctgaacgacagccggtactgcctgagcagcagactgagagtgtccgccaccttctggcagaacccccggaaccacttcagatgccaggtgcagttctacggcctgagcgagaacgacgagtggacccaggacagagccaagcccgtgacccagatcgtgtctgccgaagcctggggcagagccgattgcggctttaccagcgagagctaccagcagggcgtgctgagcgccaccaacctgagcgtgatcggcttcagaatcctgctgctgaaagtggccggctttaacctgctgatgaccctgcggctgtggtccagcagggccaagcgatctggatctggagcaacaaacttctcactactcaaacaagcaggtgacgtggaggagaatcccgggcctactagtatggactggatttggcgcatccttttccttgtcggcgctgctaccggcgcgcattccttcgaagaagtgcagctggttgaatcaggcggaggactggttcagcctggcggatctctgagactgtcttgtgccgccagcggctacaccttcaccaactactggatgaactgggtccgacaggcccctggcaaaggactggaatgggtcggaatgatcgaccccagcgacagcgagacacactacaaccacatcttcaaggaccgcttcaccatcagcgccgacaccagcaagaataccgcctacctccagatgaactccctgagagccgaggacaccgccgtgtactactgcgccagaaacctgtatctgtggggccagggaaccctggtcacagtgtcatctacgcgtatccagaaccctgatcctgccgtgtaccagctgcgggatagcaagagcagcgacaagagcgtgtgtctgttcaccgacttcgacagccagaccaacgtgtcccagagcaaggactccgacgtgtacatcaccgataagaccgtgctggacatgcggagcatggacttcaagagcaactccgccgtggcctggtccaacaagtccgatttcgcctgcgccaacgccttcaacaacagcattatccccgaggacacattcttcccaagccccgagagcagctgcgacgtgaagctggtggaaaagagcttcgagacagacaccaacctgaacttccagatcctgtacgagatcctgctgggcaaggccaccctgtacgccgtgctggtgtctgccctggtgctgatggctatggtcaagcggaaggacagccgggga

SEQ ID NO: 37417 - DNA, 2169 bp, synthetic construct
  source 1..2169: mol_type = other DNA
atggccttaccagtgaccgccttgctcctgccgctggccttgctgctccacgccgccaggccggacatccagatgacacagagccctagcagcctgtctgccagcgtgggagacagagtgaccatcacatgcaagagcagccagagcctgctggactccgatggcaagacctacctgaactggtatcagcagaagcccggcaaggcccctaagctgctgatctacctggtgtccaagctggatagcggcgtgcccagcagattttctggcagcggcagcggaaccgacttcaccctgacaatatccagcctccagcctgaggacttcgccacctactactgcttccaaggcacccactttccattcaccttcggccagggcaccaaggtggaaatcaaaagactcgaggacctgaagaacgtgttcccacctgaggtggccgtgttcgagcctagcgaggccgagatcagccacacccagaaagccaccctcgtgtgcctggctaccggcttctaccccgaccatgtggaactgtcttggtgggtcaacggcaaagaggtgcacagcggcgtgtctaccgacccccagccactgaaagaacagcccgccctgaacgacagccggtactgcctgagcagcagactgagagtgtccgccaccttctggcagaacccccggaaccacttcagatgccaggtgcagttctacggcctgagcgagaacgacgagtggacccaggacagagccaagcccgtgacccagatcgtgtctgccgaagcctggggcagagccgatgatgtgattaagatccactggcaggaaaagaagtccaacaccatcctgggcagccaggaaggcaacaccatgaagaccaacgacacctacatgaagttcagctggctgaccgtgcccgagaagtccctggacaaagaacacagatgcatcgtgcggcacgaaaacaacaagaacggcgtggaccaggaaatcatcttcccacccatcaagaccgatgtgattacaatggaccccaaggacaactgctccaaggacgccaacgataccctgctgctccagctgaccaacaccagcgcctactacatgtacttgttgctgctgctgaagtccgtggtgtacttcgccatcatcacatgctgcctgctgatggctatggtcaagcggaaggacagccggggaagggccaagcgatctggatctggagcaacaaacttctcactactcaaacaagcaggtgacgtggaggagaatcccgggcctactagtatggactggatttggcgcatccttttccttgtcggcgctgctaccggcgcgcattccttcgaagaagtgcagctggttgaatcaggcggaggactggttcagcctggcggatctctgagactgtcttgtgccgccagcggctacaccttcaccaactactggatgaactgggtccgacaggcccctggcaaaggactggaatgggtcggaatgatcgaccccagcgacagcgagacacactacaaccacatcttcaaggaccgcttcaccatcagcgccgacaccagcaagaataccgcctacctccagatgaactccctgagagccgaggacaccgccgtgtactactgcgccagaaacctgtatctgtggggccagggaaccctggtcacagtgtcatctacgcgtatccagaaccctgatcctgccgtgtaccagctgcgggatagcaagagcagcgacaagagcgtgtgtctgttcaccgacttcgacagccagaccaacgtgtcccagagcaaggactccgacgtgtacatcaccgataagaccgtgctggacatgcggagcatggacttcaagagcaactccgccgtggcctggtccaacaagtccgatttcgcctgcgccaacgccttcaacaacagcattatccccgaggacacattcttcccaagccccgagagcagcgactccaccgaccacgtgaagcccaaagagacagagaacaccaagcagcccagcaagagctgccacaagcccaaggccatcgtgcacaccgagaaagtgaacatgatgagcctgaccgtgctgggcctgcggatgctgttcgccaaaaccgtggccgtgaacttcctgctgaccgccaagctgttcttcctcctcaccgcc

SEQ ID NO: 37418 - DNA, 2163 bp, synthetic construct
  source 1..2163: mol_type = other DNA
atggccttaccagtgaccgccttgctcctgccgctggccttgctgctccacgccgccaggccggacatccagatgacacagagccctagcagcctgtctgccagcgtgggagacagagtgaccatcacatgcaagagcagccagagcctgctggactccgatggcaagacctacctgaactggtatcagcagaagcccggcaaggcccctaagctgctgatctacctggtgtccaagctggatagcggcgtgcccagcagattttctggcagcggcagcggaaccgacttcaccctgacaatatccagcctccagcctgaggacttcgccacctactactgcttccaaggcacccactttccattcaccttcggccagggcaccaaggtggaaatcaaaagactcgaggacctgaagaacgtgttcccacctgaggtggccgtgttcgagcctagcgaggccgagatcagccacacccagaaagccaccctcgtgtgcctggctaccggcttctaccccgaccatgtggaactgtcttggtgggtcaacggcaaagaggtgcacagcggcgtgtctaccgacccccagccactgaaagaacagcccgccctgaacgacagccggtactgcctgagcagcagactgagagtgtccgccaccttctggcagaacccccggaaccacttcagatgccaggtgcagttctacggcctgagcgagaacgacgagtggacccaggacagagccaagcccgtgacccagatcgtgtctgccgaagcctggggcagagccgatgatgtgattaagatccactggcaggaaaagaagtccaacaccatcctgggcagccaggaaggcaacaccatgaagaccaacgacacctacatgaagttcagctggctgaccgtgcccgagaagtccctggacaaagaacacagatgcatcgtgcggcacgaaaacaacaagaacggcgtggaccaggaaatcatcttcccacccatcaagaccgatgtgattacaatggaccccaaggacaactgctccaaggacgccaacgataccctgctgctccagctgaccaacaccagcgcctactacatgtacttgttgctgctgctgaagtccgtggtgtacttcgccatcatcacatgctgcctgctgcggagaaccgccttctgctgcaacggcgagaagtctagggccaagcgatctggatctggagcaacaaacttctcactactcaaacaagcaggtgacgtggaggagaatcccgggcctactagtatggactggatttggcgcatccttttccttgtcggcgctgctaccggcgcgcattccttcgaagaagtgcagctggttgaatcaggcggaggactggttcagcctggcggatctctgagactgtcttgtgccgccagcggctacaccttcaccaactactggatgaactgggtccgacaggcccctggcaaaggactggaatgggtcggaatgatcgaccccagcgacagcgagacacactacaaccacatcttcaaggaccgcttcaccatcagcgccgacaccagcaagaataccgcctacctccagatgaactccctgagagccgaggacaccgccgtgtactactgcgccagaaacctgtatctgtggggccagggaaccctggtcacagtgtcatctacgcgtatccagaaccctgatcctgccgtgtaccagctgcgggatagcaagagcagcgacaagagcgtgtgtctgttcaccgacttcgacagccagaccaacgtgtcccagagcaaggactccgacgtgtacatcaccgataagaccgtgctggacatgcggagcatggacttcaagagcaactccgccgtggcctggtccaacaagtccgatttcgcctgcgccaacgccttcaacaacagcattatccccgaggacacattcttcccaagccccgagagcagcgactccaccgaccacgtgaagcccaaagagacagagaacaccaagcagcccagcaagagctgccacaagcccaaggccatcgtgcacaccgagaaagtgaacatgatgagcctgaccgtgctgggcctgcggatgctgttcgccaaaaccgtggccgtgaacttcctgctgaccgccaagctgttcttcctc

SEQ ID NO: 37419 - DNA, 2595 bp, synthetic construct
  source 1..2595: mol_type = other DNA
atggccttaccagtgaccgccttgctcctgccgctggccttgctgctccacgccgccaggccgctcgaggaggacctgaagaacgtgttcccacctgaggtggccgtgttcgagcctagcgaggccgagatcagccacacccagaaagccaccctcgtgtgcctggctaccggcttctaccccgaccatgtggaactgtcttggtgggtcaacggcaaagaggtgcacagcggcgtgtgtaccgacccccagccactgaaagaacagcccgccctgaacgacagccggtactgcctgagcagcagactgagagtgtccgccaccttctggcagaacccccggaaccacttcagatgccaggtgcagttctacggcctgagcgagaacgacgagtggacccaggacagagccaagcccgtgacccagatcgtgtctgccgaagcctggggcagagccgattgcggctttaccagcgagagctaccagcagggcgtgctgagcgccaccaacctgagcgtgatcggcttcagaatcctgctgctgaaagtggccggctttaacctgctgatgaccctgcggctgtggtccagcagggccaagcgatctggatctggagcaacaaacttctcactactcaaacaagcaggtgacgtggaggagaatcccgggcctactagcatggccttaccagtgaccgccttgctcctgccgctggccttgctgctccacgccgccaggccggacatccagatgacacagagccctagcagcctgtctgccagcgtgggagacagagtgaccatcacatgcaagagcagccagagcctgctggactccgatggcaagacctacctgaactggtatcagcagaagcccggcaaggcccctaagctgctgatctacctggtgtccaagctggatagcggcgtgcccagcagattttctggcagcggcagcggaaccgacttcaccctgacaatatccagcctccagcctgaggacttcgccacctactactgcttccaaggcacccactttccattcaccttcggccagggcaccaaggtggaaatcaaaagaggcggaggcggaagtggaggcggaggatctggcggcggaggctctgaagtgcagctggttgaatcaggcggaggactggttcagcctggcggatctctgagactgtcttgtgccgccagcggctacaccttcaccaactactggatgaactgggtccgacaggcccctggcaaaggactggaatgggtcggaatgatcgaccccagcgacagcgagacacactacaaccacatcttcaaggaccgcttcaccatcagcgccgacaccagcaagaataccgcctacctccagatgaactccctgagagccgaggacaccgccgtgtactactgcgccagaaacctgtatctgtggggccagggaaccctggtcacagtgtcatctacgcgtatccagaaccctgatcctgccgtgtaccagctgcgggatagcaagagcagcgacaagagcgtgtgtctgttcaccgacttcgacagccagaccaacgtgtcccagagcaaggactccgacgtgtacatcaccgataagtgcgtgctggacatgcggagcatggacttcaagagcaactccgccgtggcctggtccaacaagtccgatttcgcctgcgccaacgccttcaacaacagcattatccccgaggacacattcttcccaagccccgagagcagctgcgacgtgaagctggtggaaaagagcttcgagacagacaccaacctgaacttccagatcctgtacgaggtgatcggcttcagaatcctgctgctgaaagtggccggctttaacctgctgatgaccctgcggctgtggtccagccgcgccaagagaagcggatctggcgtgaagcagaccctgaatttcgacctgctgaagctggctggcgacgtggaatccaacccaggcccttctagaggccatatgaccgagtacaagcccacggtgcgcctcgccacccgcgacgacgtccccagggccgtacgcaccctcgccgccgcgttcgccgactaccccgccacgcgccacaccgtcgatccggaccgccacatcgagcgggtcaccgagctgcaagaactcttcctcacgcgcgtcgggctcgacatcggcaaggtgtgggtcgcggacgacggcgccgcggtggcggtctggaccacgccggagagcgtcgaagcgggggcggtgttcgccgagatcggcccgcgcatggccgagttgagcggttcccggctggccgcgcagcaacagatggaaggcctcctggcgccgcaccggcccaaggagcccgcgtggttcctggccaccgtcggcgtctcgcccgaccaccagggcaagggtctgggcagcgccgtcgtgctccccggagtggaggcggccgagcgcgccggggtgcccgccttcctggagacctccgcgccccgcaacctccccttctacgagcggctcggcttcaccgtcaccgccgacgtcgaggtgcccgaaggaccgcgcacctggtgcatgacccgcaagcccggtgcctga

SEQ ID NO: 37420 - DNA, 2595 bp, synthetic construct
  source 1..2595: mol_type = other DNA
atggccttaccagtgaccgccttgctcctgccgctggccttgctgctccacgccgccaggccgctcgagatccagaaccctgatcctgccgtgtaccagctgcgggatagcaagagcagcgacaagagcgtgtgtctgttcaccgacttcgacagccagaccaacgtgtcccagagcaaggactccgacgtgtacatcaccgataagtgcgtgctggacatgcggagcatggacttcaagagcaactccgccgtggcctggtccaacaagtccgatttcgcctgcgccaacgccttcaacaacagcattatccccgaggacacattcttcccaagccccgagagcagctgcgacgtgaagctggtggaaaagagcttcgagacagacaccaacctgaacttccagatcctgtacgaggtgatcggcttcagaatcctgctgctgaaagtggccggctttaacctgctgatgaccctgcggctgtggtccagcagggccaagcgatctggatctggagcaacaaacttctcactactcaaacaagcaggtgacgtggaggagaatcccgggcctactagcatggccttaccagtgaccgccttgctcctgccgctggccttgctgctccacgccgccaggccggacatccagatgacacagagccctagcagcctgtctgccagcgtgggagacagagtgaccatcacatgcaagagcagccagagcctgctggactccgatggcaagacctacctgaactggtatcagcagaagcccggcaaggcccctaagctgctgatctacctggtgtccaagctggatagcggcgtgcccagcagattttctggcagcggcagcggaaccgacttcaccctgacaatatccagcctccagcctgaggacttcgccacctactactgcttccaaggcacccactttccattcaccttcggccagggcaccaaggtggaaatcaaaagaggcggaggcggaagtggaggcggaggatctggcggcggaggctctgaagtgcagctggttgaatcaggcggaggactggttcagcctggcggatctctgagactgtcttgtgccgccagcggctacaccttcaccaactactggatgaactgggtccgacaggcccctggcaaaggactggaatgggtcggaatgatcgaccccagcgacagcgagacacactacaaccacatcttcaaggaccgcttcaccatcagcgccgacaccagcaagaataccgcctacctccagatgaactccctgagagccgaggacaccgccgtgtactactgcgccagaaacctgtatctgtggggccagggaaccctggtcacagtgtcatctacgcgtgaggacctgaagaacgtgttcccacctgaggtggccgtgttcgagcctagcgaggccgagatcagccacacccagaaagccaccctcgtgtgcctggctaccggcttctaccccgaccatgtggaactgtcttggtgggtcaacggcaaagaggtgcacagcggcgtgtgtaccgacccccagccactgaaagaacagcccgccctgaacgacagccggtactgcctgagcagcagactgagagtgtccgccaccttctggcagaacccccggaaccacttcagatgccaggtgcagttctacggcctgagcgagaacgacgagtggacccaggacagagccaagcccgtgacccagatcgtgtctgccgaagcctggggcagagccgattgcggctttaccagcgagagctaccagcagggcgtgctgagcgccaccaacctgagcgtgatcggcttcagaatcctgctgctgaaagtggccggctttaacctgctgatgaccctgcggctgtggtccagccgcgccaagagaagcggatctggcgtgaagcagaccctgaatttcgacctgctgaagctggctggcgacgtggaatccaacccaggcccttctagaggccatatgaccgagtacaagcccacggtgcgcctcgccacccgcgacgacgtccccagggccgtacgcaccctcgccgccgcgttcgccgactaccccgccacgcgccacaccgtcgatccggaccgccacatcgagcgggtcaccgagctgcaagaactcttcctcacgcgcgtcgggctcgacatcggcaaggtgtgggtcgcggacgacggcgccgcggtggcggtctggaccacgccggagagcgtcgaagcgggggcggtgttcgccgagatcggcccgcgcatggccgagttgagcggttcccggctggccgcgcagcaacagatggaaggcctcctggcgccgcaccggcccaaggagcccgcgtggttcctggccaccgtcggcgtctcgcccgaccaccagggcaagggtctgggcagcgccgtcgtgctccccggagtggaggcggccgagcgcgccggggtgcccgccttcctggagacctccgcgccccgcaacctccccttctacgagcggctcggcttcaccgtcaccgccgacgtcgaggtgcccgaaggaccgcgcacctggtgcatgacccgcaagcccggtgcctga

SEQ ID NO: 37421 - DNA, 2595 bp, synthetic construct; identical to SEQ ID NO: 37419
  source 1..2595: mol_type = other DNA

SEQ ID NO: 37422 - DNA, 2919 bp, synthetic construct
  source 1..2919: mol_type = other DNA
atggccttaccagtgaccgccttgctcctgccgctggccttgctgctccacgccgccaggccgctcgaggaggacctgaagaacgtgttcccacctgaggtggccgtgttcgagcctagcgaggccgagatcagccacacccagaaagccaccctcgtgtgcctggctaccggcttctaccccgaccatgtggaactgtcttggtgggtcaacggcaaagaggtgcacagcggcgtgtctaccgacccccagccactgaaagaacagcccgccctgaacgacagccggtactgcctgagcagcagactgagagtgtccgccaccttctggcagaacccccggaaccacttcagatgccaggtgcagttctacggcctgagcgagaacgacgagtggacccaggacagagccaagcccgtgacccagatcgtgtctgccgaagcctggggcagagccgatgatgtgattaagatccactggcaggaaaagaagtccaacaccatcctgggcagccaggaaggcaacaccatgaagaccaacgacacctacatgaagttcagctggctgaccgtgcccgagaagtccctggacaaagaacacagatgcatcgtgcggcacgaaaacaacaagaacggcgtggaccaggaaatcatcttcccacccatcaagaccgatgtgattacaatggaccccaaggacaactgctccaaggacgccaacgataccctgctgctccagctgaccaacaccagcgcctactacatgtacttgttgctgctgctgaagtccgtggtgtacttcgccatcatcacatgctgcctgctgatggctatggtcaagcggaaggacagccggggaagggccaagcgatctggatctggagcaacaaacttctcactactcaaacaagcaggtgacgtggaggagaatcccgggcctactagcatggccttaccagtgaccgccttgctcctgccgctggccttgctgctccacgccgccaggccggacatccagatgacacagagccctagcagcctgtctgccagcgtgggagacagagtgaccatcacatgcaagagcagccagagcctgctggactccgatggcaagacctacctgaactggtatcagcagaagcccggcaaggcccctaagctgctgatctacctggtgtccaagctggatagcggcgtgcccagcagattttctggcagcggcagcggaaccgacttcaccctgacaatatccagcctccagcctgaggacttcgccacctactactgcttccaaggcacccactttccattcaccttcggccagggcaccaaggtggaaatcaaaagaggcggaggcggaagtggaggcggaggatctggcggcggaggctctgaagtgcagctggttgaatcaggcggaggactggttcagcctggcggatctctgagactgtcttgtgccgccagcggctacaccttcaccaactactggatgaactgggtccgacaggcccctggcaaaggactggaatgggtcggaatgatcgaccccagcgacagcgagacacactacaaccacatcttcaaggaccgcttcaccatcagcgccgacaccagcaagaataccgcctacctccagatgaactccctgagagccgaggacaccgccgtgtactactgcgccagaaacctgtatctgtggggccagggaaccctggtcacagtgtcatctacgcgtatccagaaccctgatcctgccgtgtaccagctgcgggatagcaagagcagcgacaagagcgtgtgtctgttcaccgacttcgacagccagaccaacgtgtcccagagcaaggactccgacgtgtacatcaccgataagaccgtgctggacatgcggagcatggacttcaagagcaactccgccgtggcctggtccaacaagtccgatttcgcctgcgccaacgccttcaacaacagcattatccccgaggacacattcttcccaagccccgagagcagcgactccaccgaccacgtgaagcccaaagagacagagaacaccaagcagcccagcaagagctgccacaagcccaaggccatcgtgcacaccgagaaagtgaacatgatgagcctgaccgtgctgggcctgcggatgctgttcgccaaaaccgtggccgtgaacttcctgctgaccgccaagctgttcttcctcctcaccgcccgcgccaagagaagcggatctggcgtgaagcagaccctgaatttcgacctgctgaagctggctggcgacgtggaatccaacccaggcccttctagaggccatatgaccgagtacaagcccacggtgcgcctcgccacccgcgacgacgtccccagggccgtacgcaccctcgccgccgcgttcgccgactaccccgccacgcgccacaccgtcgatccggaccgccacatcgagcgggtcaccgagctgcaagaactcttcctcacgcgcgtcgggctcgacatcggcaaggtgtgggtcgcggacgacggcgccgcggtggcggtctggaccacgccggagagcgtcgaagcgggggcggtgttcgccgagatcggcccgcgcatggccgagttgagcggttcccggctggccgcgcagcaacagatggaaggcctcctggcgccgcaccggcccaaggagcccgcgtggttcctggccaccgtcggcgtctcgcccgaccaccagggcaagggtctgggcagcgccgtcgtgctccccggagtggaggcggccgagcgcgccggggtgcccgccttcctggagacctccgcgccccgcaacctccccttctacgagcggctcggcttcaccgtcaccgccgacgtcgaggtgcccgaaggaccgcgcacctggtgcatgacccgcaagcccggtgcctga

SEQ ID NO: 37423 - DNA, 2919 bp, synthetic construct
  source 1..2919: mol_type = other DNA
atggccttaccagtgaccgccttgctcctgccgctggccttgctgctccacgccgccaggccgctcgagatccagaaccctgatcctgccgtgtaccagctgcgggatagcaagagcagcgacaagagcgtgtgtctgttcaccgacttcgacagccagaccaacgtgtcccagagcaaggactccgacgtgtacatcaccgataagaccgtgctggacatgcggagcatggacttcaagagcaactccgccgtggcctggtccaacaagtccgatttcgcctgcgccaacgccttcaacaacagcattatccccgaggacacattcttcccaagccccgagagcagcgactccaccgaccacgtgaagcccaaagagacagagaacaccaagcagcccagcaagagctgccacaagcccaaggccatcgtgcacaccgagaaagtgaacatgatgagcctgaccgtgctgggcctgcggatgctgttcgccaaaaccgtggccgtgaacttcctgctgaccgccaagctgttcttcctcctcaccgccagggccaagcgatctggatctggagcaacaaacttctcactactcaaacaagcaggtgacgtggaggagaatcccgggcctactagcatggccttaccagtgaccgccttgctcctgccgctggccttgctgctccacgccgccaggccggacatccagatgacacagagccctagcagcctgtctgccagcgtgggagacagagtgaccatcacatgcaagagcagccagagcctgctggactccgatggcaagacctacctgaactggtatcagcagaagcccggcaaggcccctaagctgctgatctacctggtgtccaagctggatagcggcgtgcccagcagattttctggcagcggcagcggaaccgacttcaccctgacaatatccagcctccagcctgaggacttcgccacctactactgcttccaaggcacccactttccattcaccttcggccagggcaccaaggtggaaatcaaaagaggcggaggcggaagtggaggcggaggatctggcggcggaggctctgaagtgcagctggttgaatcaggcggaggactggttcagcctggcggatctctgagactgtcttgtgccgccagcggctacaccttcaccaactactggatgaactgggtccgacaggcccctggcaaaggactggaatgggtcggaatgatcgaccccagcgacagcgagacacactacaaccacatcttcaaggaccgcttcaccatcagcgccgacaccagcaagaataccgcctacctccagatgaactccctgagagccgaggacaccgccgtgtactactgcgccagaaacctgtatctgtggggccagggaaccctggtcacagtgtcatctacgcgtgaggacctgaagaacgtgttcccacctgaggtggccgtgttcgagcctagcgaggccgagatcagccacacccagaaagccaccctcgtgtgcctggctaccggcttctaccccgaccatgtggaactgtcttggtgggtcaacggcaaagaggtgcacagcggcgtgtctaccgacccccagccactgaaagaacagcccgccctgaacgacagccggtactgcctgagcagcagactgagagtgtccgccaccttctggcagaacccccggaaccacttcagatgccaggtgcagttctacggcctgagcgagaacgacgagtggacccaggacagagccaagcccgtgacccagatcgtgtctgccgaagcctggggcagagccgatgatgtgattaagatccactggcaggaaaagaagtccaacaccatcctgggcagccaggaaggcaacaccatgaagaccaacgacacctacatgaagttcagctggctgaccgtgcccgagaagtccctggacaaagaacacagatgcatcgtgcggcacgaaaacaacaagaacggcgtggaccaggaaatcatcttcccacccatcaagaccgatgtgattacaatggaccccaaggacaactgctccaaggacgccaacgataccctgctgctccagctgaccaacaccagcgcctactacatgtacttgttgctgctgctgaagtccgtggtgtacttcgccatcatcacatgctgcctgctgatggctatggtcaagcggaaggacagccggggacgcgccaagagaagcggatctggcgtgaagcagaccctgaatttcgacctgctgaagctggctggcgacgtggaatccaacccaggcccttctagaggccatatgaccgagtacaagcccacggtgcgcctcgccacccgcgacgacgtccccagggccgtacgcaccctcgccgccgcgttcgccgactaccccgccacgcgccacaccgtcgatccggaccgccacatcgagcgggtcaccgagctgcaagaactcttcctcacgcgcgtcgggctcgacatcggcaaggtgtgggtcgcggacgacggcgccgcggtggcggtctggaccacgccggagagcgtcgaagcgggggcggtgttcgccgagatcggcccgcgcatggccgagttgagcggttcccggctggccgcgcagcaacagatggaaggcctcctggcgccgcaccggcccaaggagcccgcgtggttcctggccaccgtcggcgtctcgcccgaccaccagggcaagggtctgggcagcgccgtcgtgctccccggagtggaggcggccgagcgcgccggggtgcccgccttcctggagacctccgcgccccgcaacctccccttctacgagcggctcggcttcaccgtcaccgccgacgtcgaggtgcccgaaggaccgcgcacctggtgcatgacccgcaagcccggtgcctga

SEQ ID NO: 37424 - DNA, 2913 bp, synthetic construct
  source 1..2913: mol_type = other DNA
atggccttaccagtgaccgccttgctcctgccgctggccttgctgctccacgccgccaggccgctcgaggaggacctgaagaacgtgttcccacctgaggtggccgtgttcgagcctagcgaggccgagatcagccacacccagaaagccaccctcgtgtgcctggctaccggcttctaccccgaccatgtggaactgtcttggtgggtcaacggcaaagaggtgcacagcggcgtgtgtaccgacccccagccactgaaagaacagcccgccctgaacgacagccggtactgcctgagcagcagactgagagtgtccgccaccttctggcagaacccccggaaccacttcagatgccaggtgcagttctacggcctgagcgagaacgacgagtggacccaggacagagccaagcccgtgacccagatcgtgtctgccgaagcctggggcagagccgatgatgtgattaagatccactggcaggaaaagaagtccaacaccatcctgggcagccaggaaggcaacaccatgaagaccaacgacacctacatgaagttcagctggctgaccgtgcccgagaagtccctggacaaagaacacagatgcatcgtgcggcacgaaaacaacaagaacggcgtggaccaggaaatcatcttcccacccatcaagaccgatgtgattacaatggaccccaaggacaactgctccaaggacgccaacgataccctgctgctccagctgaccaacaccagcgcctactacatgtacttgttgctgctgctgaagtccgtggtgtacttcgccatcatcacatgctgcctgctgcggagaaccgccttctgctgcaacggcgagaagtctagggccaagcgatctggatctggagcaacaaacttctcactactcaaacaagcaggtgacgtggaggagaatcccgggcctactagcatggccttaccagtgaccgccttgctcctgccgctggccttgctgctccacgccgccaggccggacatccagatgacacagagccctagcagcctgtctgccagcgtgggagacagagtgaccatcacatgcaagagcagccagagcctgctggactccgatggcaagacctacctgaactggtatcagcagaagcccggcaaggcccctaagctgctgatctacctggtgtccaagctggatagcggcgtgcccagcagattttctggcagcggcagcggaaccgacttcaccctgacaatatccagcctccagcctgaggacttcgccacctactactgcttccaaggcacccactttccattcaccttcggccagggcaccaaggtggaaatcaaaagaggcggaggcggaagtggaggcggaggatctggcggcggaggctctgaagtgcagctggttgaatcaggcggaggactggttcagcctggcggatctctgagactgtcttgtgccgccagcggctacaccttcaccaactactggatgaactgggtccgacaggcccctggcaaaggactggaatgggtcggaatgatcgaccccagcgacagcgagacacactacaaccacatcttcaaggaccgcttcaccatcagcgccgacaccagcaagaataccgcctacctccagatgaactccctgagagccgaggacaccgccgtgtactactgcgccagaaacctgtatctgtggggccagggaaccctggtcacagtgtcatctacgcgtatccagaaccctgatcctgccgtgtaccagctgcgggatagcaagagcagcgacaagagcgtgtgtctgttcaccgacttcgacagccagaccaacgtgtcccagagcaaggactccgacgtgtacatcaccgataagtgcgtgctggacatgcggagcatggacttcaagagcaactccgccgtggcctggtccaacaagtccgatttcgcctgcgccaacgccttcaacaacagcattatccccgaggacacattcttcccaagccccgagagcagcgactccaccgaccacgtgaagcccaaagagacagagaacaccaagcagcccagcaagagctgccacaagcccaaggccatcgtgcacaccgagaaagtgaacatgatgagcctgaccgtgctgggcctgcggatgctgttcgccaaaaccgtggccgtgaacttcctgctgaccgccaagctgttcttcctccgcgccaagagaagcggatctggcgtgaagcagaccctgaatttcgacctgctgaagctggctggcgacgtggaatccaacccaggcccttctagaggccatatgaccgagtacaagcccacggtgcgcctcgccacccgcgacgacgtccccagggccgtacgcaccctcgccgccgcgttcgccgactaccccgccacgcgccacaccgtcgatccggaccgccacatcgagcgggtcaccgagctgcaagaactcttcctcacgcgcgtcgggctcgacatcggcaaggtgtgggtcgcggacgacggcgccgcggtggcggtctggaccacgccggagagcgtcgaagcgggggcggtgttcgccgagatcggcccgcgcatggccgagttgagcggttcccggctggccgcgcagcaacagatggaaggcctcctggcgccgcaccggcccaaggagcccgcgtggttcctggccaccgtcggcgtctcgcccgaccaccagggcaagggtctgggcagcgccgtcgtgctccccggagtggaggcggccgagcgcgccggggtgcccgccttcctggagacctccgcgccccgcaacctccccttctacgagcggctcggcttcaccgtcaccgccgacgtcgaggtgcccgaaggaccgcgcacctggtgcatgacccgcaagcccggtgcctga

SEQ ID NO: 37425 - DNA, 2913 bp, synthetic construct
  source 1..2913: mol_type = other DNA
atggccttaccagtgaccgccttgctcctgccgctggccttgctgctccacgccgccaggccgctcgagatccagaaccctgatcctgccgtgtaccagctgcgggatagcaagagcagcgacaagagcgtgtgtctgttcaccgacttcgacagccagaccaacgtgtcccagagcaaggactccgacgtgtacatcaccgataagtgcgtgctggacatgcggagcatggacttcaagagcaactccgccgtggcctggtccaacaagtccgatttcgcctgcgccaacgccttcaacaacagcattatccccgaggacacattcttcccaagccccgagagcagcgactccaccgaccacgtgaagcccaaagagacagagaacaccaagcagcccagcaagagctgccacaagcccaaggccatcgtgcacaccgagaaagtgaacatgatgagcctgaccgtgctgggcctgcggatgctgttcgccaaaaccgtggccgtgaacttcctgctgaccgccaagctgttcttcctcagggccaagcgatctggatctggagcaacaaacttctcactactcaaacaagcaggtgacgtggaggagaatcccgggcctactagcatggccttaccagtgaccgccttgctcctgccgctggccttgctgctccacgccgccaggccggacatccagatgacacagagccctagcagcctgtctgccagcgtgggagacagagtgaccatcacatgcaagagcagccagagcctgctggactccgatggcaagacctacctgaactggtatcagcagaagcccggcaaggcccctaagctgctgatctacctggtgtccaagctggatagcggcgtgcccagcagattttctggcagcggcagcggaaccgacttcaccctgacaatatccagcctccagcctgaggacttcgccacctactactgcttccaaggcacccactttccattcaccttcggccagggcaccaaggtggaaatcaaaagaggcggaggcggaagtggaggcggaggatctggcggcggaggctctgaagtgcagctggttgaatcaggcggaggactggttcagcctggcggatctctgagactgtcttgtgccgccagcggctacaccttcaccaactactggatgaactgggtccgacaggcccctggcaaaggactggaatgggtcggaatgatcgaccccagcgacagcgagacacactacaaccacatcttcaaggaccgcttcaccatcagcgccgacaccagcaagaataccgcctacctccagatgaactccctgagagccgaggacaccgccgtgtactactgcgccagaaacctgtatctgtggggccagggaaccctggtcacagtgtcatctacgcgtgaggacctgaagaacgtgttcccacctgaggtggccgtgttcgagcctagcgaggccgagatcagccacacccagaaagccaccctcgtgtgcctggctaccggcttctaccccgaccatgtggaactgtcttggtgggtcaacggcaaagaggtgcacagcggcgtgtgtaccgacccccagccactgaaagaacagcccgccctgaacgacagccggtactgcctgagcagcagactgagagtgtccgccaccttctggcagaacccccggaaccacttcagatgccaggtgcagttctacggcctgagcgagaacgacgagtggacccaggacagagccaagcccgtgacccagatcgtgtctgccgaagcctggggcagagccgatgatgtgattaagatccactggcaggaaaagaagtccaacaccatcctgggcagccaggaaggcaacaccatgaagaccaacgacacctacatgaagttcagctggctgaccgtgcccgagaagtccctggacaaagaacacagatgcatcgtgcggcacgaaaacaacaagaacggcgtggaccaggaaatcatcttcccacccatcaagaccgatgtgattacaatggaccccaaggacaactgctccaaggacgccaacgataccctgctgctccagctgaccaacaccagcgcctactacatgtacttgttgctgctgctgaagtccgtggtgtacttcgccatcatcacatgctgcctgctgcggagaaccgccttctgctgcaacggcgagaagtctcgcgccaagagaagcggatctggcgtgaagcagaccctgaatttcgacctgctgaagctggctggcgacgtggaatccaacccaggcccttctagaggccatatgaccgagtacaagcccacggtgcgcctcgccacccgcgacgacgtccccagggccgtacgcaccctcgccgccgcgttcgccgactaccccgccacgcgccacaccgtcgatccggaccgccacatcgagcgggtcaccgagctgcaagaactcttcctcacgcgcgtcgggctcgacatcggcaaggtgtgggtcgcggacgacggcgccgcggtggcggtctggaccacgccggagagcgtcgaagcgggggcggtgttcgccgagatcggcccgcgcatggccgagttgagcggttcccggctggccgcgcagcaacagatggaaggcctcctggcgccgcaccggcccaaggagcccgcgtggttcctggccaccgtcggcgtctcgcccgaccaccagggcaagggtctgggcagcgccgtcgtgctccccggagtggaggcggccgagcgcgccggggtgcccgccttcctggagacctccgcgccccgcaacctccccttctacgagcggctcggcttcaccgtcaccgccgacgtcgaggtgcccgaaggaccgcgcacctggtgcatgacccgcaagcccggtgcctga

SEQ ID NO: 37426 - DNA, 2913 bp, synthetic construct
  source 1..2913: mol_type = other DNA
atggccttaccagtgaccgccttgctcctgccgctggccttgctgctccacgccgccaggccgctcgaggaggacctgaagaacgtgttcccacctgaggtggccgtgttcgagcctagcgaggccgagatcagccacacccagaaagccaccctcgtgtgcctggctaccggcttctaccccgaccatgtggaactgtcttggtgggtcaacggcaaagaggtgcacagcggcgtgtctaccgacccccagccactgaaagaacagcccgccctgaacgacagccggtactgcctgagcagcagactgagagtgtccgccaccttctggcagaacccccggaaccacttcagatgccaggtgcagttctacggcctgagcgagaacgacgagtggacccaggacagagccaagcccgtgacccagatcgtgtctgccgaagcctggggcagagccgatgatgtgattaagatccactggcaggaaaagaagtccaacaccatcctgggcagccaggaaggcaacaccatgaagaccaacgacacctacatgaagttcagctggctgaccgtgcccgagaagtccctggacaaagaacacagatgcatcgtgcggcacgaaaacaacaagaacggcgtggaccaggaaatcatcttcccacccatcaagaccgatgtgattacaatggaccccaaggacaactgctccaaggacgccaacgataccctgctgctccagctgaccaacaccagcgcctactacatgtacttgttgctgctgctgaagtccgtggtgtacttcgccatcatcacatgctgcctgctgcggagaaccgccttctgctgcaacggcgagaagtctagggccaagcgatctggatctggagcaacaaacttctcactactcaaacaagcaggtgacgtggaggagaatcccgggcctactagcatggccttaccagtgaccgccttgctcctgccgctggccttgctgctccacgccgccaggccggacatccagatgacacagagccctagcagcctgtctgccagcgtgggagacagagtgaccatcacatgcaagagcagccagagcctgctggactccgatggcaagacctacctgaactggtatcagcagaagcccggcaaggcccctaagctgctgatctacctggtgtccaagctggatagcggcgtgcccagcagattttctggcagcggcagcggaaccgacttcaccctgacaatatccagcctccagcctgaggacttcgccacctactactgcttccaaggcacccactttccattcaccttcggccagggcaccaaggtggaaatcaaaagaggcggaggcggaagtggaggcggaggatctggcggcggaggctctgaagtgcagctggttgaatcaggcggaggactggttcagcctggcggatctctgagactgtcttgtgccgccagcggctacaccttcaccaactactggatgaactgggtccgacaggcccctggcaaaggactggaatgggtcggaatgatcgaccccagcgacagcgagacacactacaaccacatcttcaaggaccgcttcaccatcagcgccgacaccagcaagaataccgcctacctccagatgaactccctgagagccgaggacaccgccgtgtactactgcgccagaaacctgtatctgtggggccagggaaccctggtcacagtgtcatctacgcgtatccagaaccctgatcctgccgtgtaccagctgcgggatagcaagagcagcgacaagagcgtgtgtctgttcaccgacttcgacagccagaccaacgtgtcccagagcaaggactccgacgtgtacatcaccgataagaccgtgctggacatgcggagcatggacttcaagagcaactccgccgtggcctggtccaacaagtccgatttcgcctgcgccaacgccttcaacaacagcattatccccgaggacacattcttcccaagccccgagagcagcgactccaccgaccacgtgaagcccaaagagacagagaacaccaagcagcccagcaagagctgccacaagcccaaggccatcgtgcacaccgagaaagtgaacatgatgagcctgaccgtgctgggcctgcggatgctgttcgccaaaaccgtggccgtgaacttcctgctgaccgccaagctgttcttcctccgcgccaagagaagcggatctggcgtgaagcagaccctgaatttcgacctgctgaagctggctggcgacgtggaatccaacccaggcccttctagaggccatatgaccgagtacaagcccacggtgcgcctcgccacccgcgacgacgtccccagggccgtacgcaccctcgccgccgcgttcgccgactaccccgccacgcgccacaccgtcgatccggaccgccacatcgagcgggtcaccgagctgcaagaactcttcctcacgcgcgtcgggctcgacatcggcaaggtgtgggtcgcggacgacggcgccgcggtggcggtctggaccacgccggagagcgtcgaagcgggggcggtgttcgccgagatcggcccgcgcatggccgagttgagcggttcccggctggccgcgcagcaacagatggaaggcctcctggcgccgcaccggcccaaggagcccgcgtggttcctggccaccgtcggcgtctcgcccgaccaccagggcaagggtctgggcagcgccgtcgtgctccccggagtggaggcggccgagcgcgccggggtgcccgccttcctggagacctccgcgccccgcaacctccccttctacgagcggctcggcttcaccgtcaccgccgacgtcgaggtgcccgaaggaccgcgcacctggtgcatgacccgcaagcccggtgcctga

SEQ ID NO: 37427 - DNA, 2913 bp, synthetic construct
  source 1..2913: mol_type = other DNA
atggccttaccagtgaccgccttgctcctgccgctggccttgctgctccacgccgccaggccgctcgagatccagaaccctgatcctgccgtgtaccagctgcgggatagcaagagcagcgacaagagcgtgtgtctgttcaccgacttcgacagccagaccaacgtgtcccagagcaaggactccgacgtgtacatcaccgataagaccgtgctggacatgcggagcatggacttcaagagcaactccgccgtggcctggtccaacaagtccgatttcgcctgcgccaacgccttcaacaacagcattatccccgaggacacattcttcccaagccccgagagcagcgactccaccgaccacgtgaagcccaaagagacagagaacaccaagcagcccagcaagagctgccacaagcccaaggccatcgtgcacaccgagaaagtgaacatgatgagcctgaccgtgctgggcctgcggatgctgttcgccaaaaccgtggccgtgaacttcctgctgaccgccaagctgttcttcctcagggccaagcgatctggatctggagcaacaaacttctcactactcaaacaagcaggtgacgtggaggagaatcccgggcctactagcatggccttaccagtgaccgccttgctcctgccgctggccttgctgctccacgccgccaggccggacatccagatgacacagagccctagcagcctgtctgccagcgtgggagacagagtgaccatcacatgcaagagcagccagagcctgctggactccgatggcaagacctacctgaactggtatcagcagaagcccggcaaggcccctaagctgctgatctacctggtgtccaagctggatagcggcgtgcccagcagattttctggcagcggcagcggaaccgacttcaccctgacaatatccagcctccagcctgaggacttcgccacctactactgcttccaaggcacccactttccattcaccttcggccagggcaccaaggtggaaatcaaaagaggcggaggcggaagtggaggcggaggatctggcggcggaggctctgaagtgcagctggttgaatcaggcggaggactggttcagcctggcggatctctgagactgtcttgtgccgccagcggctacaccttcaccaactactggatgaactgggtccgacaggcccctggcaaaggactggaatgggtcggaatgatcgaccccagcgacagcgagacacactacaaccacatcttcaaggaccgcttcaccatcagcgccgacaccagcaagaataccgcctacctccagatgaactccctgagagccgaggacaccgccgtgtactactgcgccagaaacctgtatctgtggggccagggaaccctggtcacagtgtcatctacgcgtgaggacctgaagaacgtgttcccacctgaggtggccgtgttcgagcctagcgaggccgagatcagccacacccagaaagccaccctcgtgtgcctggctaccggcttctaccccgaccatgtggaactgtcttggtgggtcaacggcaaagaggtgcacagcggcgtgtctaccgacccccagccactgaaagaacagcccgccctgaacgacagccggtactgcctgagcagcagactgagagtgtccgccaccttctggcagaacccccggaaccacttcagatgccaggtgcagttctacggcctgagcgagaacgacgagtggacccaggacagagccaagcccgtgacccagatcgtgtctgccgaagcctggggcagagccgatgatgtgattaagatccactggcaggaaaagaagtccaacaccatcctgggcagccaggaaggcaacaccatgaagaccaacgacacctacatgaagttcagctggctgaccgtgcccgagaagtccctggacaaagaacacagatgcatcgtgcggcacgaaaacaacaagaacggcgtggaccaggaaatcatcttcccacccatcaagaccgatgtgattacaatggaccccaaggacaactgctccaaggacgccaacgataccctgctgctccagctgaccaacaccagcgcctactacatgtacttgttgctgctgctgaagtccgtggtgtacttcgccatcatcacatgctgcctgctgcggagaaccgccttctgctgcaacggcgagaagtctcgcgccaagagaagcggatctggcgtgaagcagaccctgaatttcgacctgctgaagctggctggcgacgtggaatccaacccaggcccttctagaggccatatgaccgagtacaagcccacggtgcgcctcgccacccgcgacgacgtccccagggccgtacgcaccctcgccgccgcgttcgccgactaccccgccacgcgccacaccgtcgatccggaccgccacatcgagcgggtcaccgagctgcaagaactcttcctcacgcgcgtcgggctcgacatcggcaaggtgtgggtcgcggacgacggcgccgcggtggcggtctggaccacgccggagagcgtcgaagcgggggcggtgttcgccgagatcggcccgcgcatggccgagttgagcggttcccggctggccgcgcagcaacagatggaaggcctcctggcgccgcaccggcccaaggagcccgcgtggttcctggccaccgtcggcgtctcgcccgaccaccagggcaagggtctgggcagcgccgtcgtgctccccggagtggaggcggccgagcgcgccggggtgcccgccttcctggagacctccgcgccccgcaacctccccttctacgagcggctcggcttcaccgtcaccgccgacgtcgaggtgcccgaaggaccgcgcacctggtgcatgacccgcaagcccggtgcctga

SEQ ID NO: 37428 - DNA, 2607 bp, synthetic construct
  source 1..2607: mol_type = other DNA
atggccttaccagtgaccgccttgctcctgccgctggccttgctgctccacgccgccaggccgctcgaggaggacctgaagaacgtgttcccacctgaggtggccgtgttcgagcctagcaaggccgagatcgcccacacccagaaagccaccctcgtgtgcctggctaccggcttctaccccgaccatgtggaactgtcttggtgggtcaacggcaaagaggtgcacagcggcgtgtgtaccgacccccagccactgaaagaacagcccgccctgaacgacagccggtactgcctgagcagcagactgagagtgtccgccaccttctggcagaacccccggaaccacttcagatgccaggtgcagttctacggcctgagcgagaacgacgagtggacccaggacagagccaagcccgtgacccagatcgtgtctgccgaagcctggggcagagccgattgcggcatcaccagcgccagctaccaccagggcgtgctgagcgccaccatcctgtacgagatcctgctgggcaaggccaccctgtacgccgtgctggtgtctgccctggtgctgatggctatggtcaagcggaaggacagccggggaagggccaagcgatctggatctggagcaacaaacttctcactactcaaacaagcaggtgacgtggaggagaatcccgggcctactagcatggccttaccagtgaccgccttgctcctgccgctggccttgctgctccacgccgccaggccggacatccagatgacacagagccctagcagcctgtctgccagcgtgggagacagagtgaccatcacatgcaagagcagccagagcctgctggactccgatggcaagacctacctgaactggtatcagcagaagcccggcaaggcccctaagctgctgatctacctggtgtccaagctggatagcggcgtgcccagcagattttctggcagcggcagcggaaccgacttcaccctgacaatatccagcctccagcctgaggacttcgccacctactactgcttccaaggcacccactttccattcaccttcggccagggcaccaaggtggaaatcaaaagaggcggaggcggaagtggaggcggaggatctggcggcggaggctctgaagtgcagctggttgaatcaggcggaggactggttcagcctggcggatctctgagactgtcttgtgccgccagcggctacaccttcaccaactactggatgaactgggtccgacaggcccctggcaaaggactggaatgggtcggaatgatcgaccccagcgacagcgagacacactacaaccacatcttcaaggaccgcttcaccatcagcgccgacaccagcaagaataccgcctacctccagatgaactccctgagagccgaggacaccgccgtgtactactgcgccagaaacctgtatctgtggggccagggaaccctggtcacagtgtcatctacgcgtatccagaaccctgatcctgccgtgtaccagctgcgggatagcaagagcagcgacaagagcgtgtgtctgttcaccgacttcgacagccagaccaacgtgtcccagagcaaggactccgacgtgtacatcaccgataagtgcgtgctggacatgcggagcatggacttcaagagcaactccgccgtggcctggtccaacaagtccgatttcgcctgcgccaacgccttcaacaacagcattatccccgaggacacattcttcccaagcagcgacgtgccctgcgacgtgaagctggtggaaaagagcttcgagacagacaccaacctgaacttccagaacctgagcgtgatcggcttcagaatcctgctgctgaaagtggccggctttaacctgctgatgaccctgcggctgtggtccagccgcgccaagagaagcggatctggcgtgaagcagaccctgaatttcgacctgctgaagctggctggcgacgtggaatccaacccaggcccttctagaggccatatgaccgagtacaagcccacggtgcgcctcgccacccgcgacgacgtccccagggccgtacgcaccctcgccgccgcgttcgccgactaccccgccacgcgccacaccgtcgatccggaccgccacatcgagcgggtcaccgagctgcaagaactcttcctcacgcgcgtcgggctcgacatcggcaaggtgtgggtcgcggacgacggcgccgcggtggcggtctggaccacgccggagagcgtcgaagcgggggcggtgttcgccgagatcggcccgcgcatggccgagttgagcggttcccggctggccgcgcagcaacagatggaaggcctcctggcgccgcaccggcccaaggagcccgcgtggttcctggccaccgtcggcgtctcgcccgaccaccagggcaagggtctgggcagcgccgtcgtgctccccggagtggaggcggccgagcgcgccggggtgcccgccttcctggagacctccgcgccccgcaacctccccttctacgagcggctcggcttcaccgtcaccgccgacgtcgaggtgcccgaaggaccgcgcacctggtgcatgacccgcaagcccggtgcctga

SEQ ID NO: 37429 - DNA, 2607 bp, synthetic construct
  source 1..2607: mol_type = other DNA
atggccttaccagtgaccgccttgctcctgccgctggccttgctgctccacgccgccaggccgctcgagatccagaaccctgatcctgccgtgtaccagctgcgggatagcaagagcagcgacaagagcgtgtgtctgttcaccgacttcgacagccagaccaacgtgtcccagagcaaggactccgacgtgtacatcaccgataagtgcgtgctggacatgcggagcatggacttcaagagcaactccgccgtggcctggtccaacaagtccgatttcgcctgcgccaacgccttcaacaacagcattatccccgaggacacattcttcccaagcagcgacgtgccctgcgacgtgaagctggtggaaaagagcttcgagacagacaccaacctgaacttccagaacctgagcgtgatcggcttcagaatcctgctgctgaaagtggccggctttaacctgctgatgaccctgcggctgtggtccagcagggccaagcgatctggatctggagcaacaaacttctcactactcaaacaagcaggtgacgtggaggagaatcccgggcctactagcatggccttaccagtgaccgccttgctcctgccgctggccttgctgctccacgccgccaggccggacatccagatgacacagagccctagcagcctgtctgccagcgtgggagacagagtgaccatcacatgcaagagcagccagagcctgctggactccgatggcaagacctacctgaactggtatcagcagaagcccggcaaggcccctaagctgctgatctacctggtgtccaagctggatagcggcgtgcccagcagattttctggcagcggcagcggaaccgacttcaccctgacaatatccagcctccagcctgaggacttcgccacctactactgcttccaaggcacccactttccattcaccttcggccagggcaccaaggtggaaatcaaaagaggcggaggcggaagtggaggcggaggatctggcggcggaggctctgaagtgcagctggttgaatcaggcggaggactggttcagcctggcggatctctgagactgtcttgtgccgccagcggctacaccttcaccaactactggatgaactgggtccgacaggcccctggcaaaggactggaatgggtcggaatgatcgaccccagcgacagcgagacacactacaaccacatcttcaaggaccgcttcaccatcagcgccgacaccagcaagaataccgcctacctccagatgaactccctgagagccgaggacaccgccgtgtactactgcgccagaaacctgtatctgtggggccagggaaccctggtcacagtgtcatctacgcgtgaggacctgaagaacgtgttcccacctgaggtggccgtgttcgagcctagcaaggccgagatcgcccacacccagaaagccaccctcgtgtgcctggctaccggcttctaccccgaccatgtggaactgtcttggtgggtcaacggcaaagaggtgcacagcggcgtgtgtaccgacccccagccactgaaagaacagcccgccctgaacgacagccggtactgcctgagcagcagactgagagtgtccgccaccttctggcagaacccccggaaccacttcagatgccaggtgcagttctacggcctgagcgagaacgacgagtggacccaggacagagccaagcccgtgacccagatcgtgtctgccgaagcctggggcagagccgattgcggcatcaccagcgccagctaccaccagggcgtgctgagcgccaccatcctgtacgagatcctgctgggcaaggccaccctgtacgccgtgctggtgtctgccctggtgctgatggctatggtcaagcggaaggacagccggggacgcgccaagagaagcggatctggcgtgaagcagaccctgaatttcgacctgctgaagctggctggcgacgtggaatccaacccaggcccttctagaggccatatgaccgagtacaagcccacggtgcgcctcgccacccgcgacgacgtccccagggccgtacgcaccctcgccgccgcgttcgccgactaccccgccacgcgccacaccgtcgatccggaccgccacatcgagcgggtcaccgagctgcaagaactcttcctcacgcgcgtcgggctcgacatcggcaaggtgtgggtcgcggacgacggcgccgcggtggcggtctggaccacgccggagagcgtcgaagcgggggcggtgttcgccgagatcggcccgcgcatggccgagttgagcggttcccggctggccgcgcagcaacagatggaaggcctcctggcgccgcaccggcccaaggagcccgcgtggttcctggccaccgtcggcgtctcgcccgaccaccagggcaagggtctgggcagcgccgtcgtgctccccggagtggaggcggccgagcgcgccggggtgcccgccttcctggagacctccgcgccccgcaacctccccttctacgagcggctcggcttcaccgtcaccgccgacgtcgaggtgcccgaaggaccgcgcacctggtgcatgacccgcaagcccggtgcctga

SEQ ID NO: 37430 - DNA, 2286 bp, synthetic construct
  source 1..2286: mol_type = other DNA
atggccttaccagtgaccgccttgctcctgccgctggccttgctgctccacgccgccaggccgctcgagcagagttttgggttgttggaccctaaattgtgctatctgttggacggaatcctgttcatttacggagtgatcctgaccgcattgttcctgcgggttaagttttccagatccgcagacgcacccgcttaccaacaagggcagaaccaactctacaatgaacttaatttggggcggagggaagagtacgacgttctggacaaaaggaggggacgagatcccgagatgggcggaaagcctcagcgaaggaagaatccgcaagaggggctttataacgaactccagaaagataaaatggcagaagcctatagtgagattgggatgaagggagaaaggaggaggggtaaaggtcacgatgggttgtaccaaggattgagcacagccactaaagatacctatgatgcgctccacatgcaggccctgccgccaagaagggccaagcgatctggatctggagcaacaaacttctcactactcaaacaagcaggtgacgtggaggagaatcccgggcctactagcatggccttaccagtgaccgccttgctcctgccgctggccttgctgctccacgccgccaggccggacatccagatgacacagagccctagcagcctgtctgccagcgtgggagacagagtgaccatcacatgcaagagcagccagagcctgctggactccgatggcaagacctacctgaactggtatcagcagaagcccggcaaggcccctaagctgctgatctacctggtgtccaagctggatagcggcgtgcccagcagattttctggcagcggcagcggaaccgacttcaccctgacaatatccagcctccagcctgaggacttcgccacctactactgcttccaaggcacccactttccattcaccttcggccagggcaccaaggtggaaatcaaaagaggcggaggcggaagtggaggcggaggatctggcggcggaggctctgaagtgcagctggttgaatcaggcggaggactggttcagcctggcggatctctgagactgtcttgtgccgccagcggctacaccttcaccaactactggatgaactgggtccgacaggcccctggcaaaggactggaatgggtcggaatgatcgaccccagcgacagcgagacacactacaaccacatcttcaaggaccgcttcaccatcagcgccgacaccagcaagaataccgcctacctccagatgaactccctgagagccgaggacaccgccgtgtactactgcgccagaaacctgtatctgtggggccagggaaccctggtcacagtgtcatctacgcgtgagctgggagagcctcagctgtgctatatcctggacgccatcctgtttctgtacggcatcgtgctgaccctgctgtactgccggctgaagatccaagtgcggaaggccgccatcaccagctacgagaaatccgacggcgtgtacaccggcctgagcaccagaaatcaagagacatacgagacactgaagcacgaaaagcctccacaacgcgccaagagaagcggatctggcgtgaagcagaccctgaatttcgacctgctgaagctggctggcgacgtggaatccaacccaggcccttctagaggccatatgaccgagtacaagcccacggtgcgcctcgccacccgcgacgacgtccccagggccgtacgcaccctcgccgccgcgttcgccgactaccccgccacgcgccacaccgtcgatccggaccgccacatcgagcgggtcaccgagctgcaagaactcttcctcacgcgcgtcgggctcgacatcggcaaggtgtgggtcgcggacgacggcgccgcggtggcggtctggaccacgccggagagcgtcgaagcgggggcggtgttcgccgagatcggcccgcgcatggccgagttgagcggttcccggctggccgcgcagcaacagatggaaggcctcctggcgccgcaccggcccaaggagcccgcgtggttcctggccaccgtcggcgtctcgcccgaccaccagggcaagggtctgggcagcgccgtcgtgctccccggagtggaggcggccgagcgcgccggggtgcccgccttcctggagacctccgcgccccgcaacctccccttctacgagcggctcggcttcaccgtcaccgccgacgtcgaggtgcccgaaggaccgcgcacctggtgcatgacccgcaagcccggtgcctga

SEQ ID NO: 37431 - DNA, 2919 bp, synthetic construct; identical to SEQ ID NO: 37422
  source 1..2919: mol_type = other DNA

SEQ ID NO: 37432 - DNA, 2919 bp, synthetic construct; identical to SEQ ID NO: 37423
  source 1..2919: mol_type = other DNA

SEQ ID NO: 37433 - DNA, 2916 bp, synthetic construct
  source 1..2916: mol_type = other DNA
atggccttaccagtgaccgccttgctcctgccgctggccttgctgctccacgccgccaggccgctcgaggaggaggacctgaagaacgtgttcccacctgaggtggccgtgttcgagcctagcgaggccgagatcagccacacccagaaagccaccctcgtgtgcctggctaccggcttctaccccgaccatgtggaactgtcttggtgggtcaacggcaaagaggtgcacagcggcgtgtgtaccgacccccagccactgaaagaacagcccgccctgaacgacagccggtactgcctgagcagcagactgagagtgtccgccaccttctggcagaacccccggaaccacttcagatgccaggtgcagttctacggcctgagcgagaacgacgagtggacccaggacagagccaagcccgtgacccagatcgtgtctgccgaagcctggggcagagccgatgatgtgattaagatccactggcaggaaaagaagtccaacaccatcctgggcagccaggaaggcaacaccatgaagaccaacgacacctacatgaagttcagctggctgaccgtgcccgagaagtccctggacaaagaacacagatgcatcgtgcggcacgaaaacaacaagaacggcgtggaccaggaaatcatcttcccacccatcaagaccgatgtgattacaatggaccccaaggacaactgctccaaggacgccaacgataccctgctgctccagctgaccaacaccagcgcctactacatgtacttgttgctgctgctgaagtccgtggtgtacttcgccatcatcacatgctgcctgctgcggagaaccgccttctgctgcaacggcgagaagtctagggccaagcgatctggatctggagcaacaaacttctcactactcaaacaagcaggtgacgtggaggagaatcccgggcctactagcatggccttaccagtgaccgccttgctcctgccgctggccttgctgctccacgccgccaggccggacatccagatgacacagagccctagcagcctgtctgccagcgtgggagacagagtgaccatcacatgcaagagcagccagagcctgctggactccgatggcaagacctacctgaactggtatcagcagaagcccggcaaggcccctaagctgctgatctacctggtgtccaagctggatagcggcgtgcccagcagattttctggcagcggcagcggaaccgacttcaccctgacaatatccagcctccagcctgaggacttcgccacctactactgcttccaaggcacccactttccattcaccttcggccagggcaccaaggtggaaatcaaaagaggcggaggcggaagtggaggcggaggatctggcggcggaggctctgaagtgcagctggttgaatcaggcggaggactggttcagcctggcggatctctgagactgtcttgtgccgccagcggctacaccttcaccaactactggatgaactgggtccgacaggcccctggcaaaggactggaatgggtcggaatgatcgaccccagcgacagcgagacacactacaaccacatcttcaaggaccgcttcaccatcagcgccgacaccagcaagaataccgcctacctccagatgaactccctgagagccgaggacaccgccgtgtactactgcgccagaaacctgtatctgtggggccagggaaccctggtcacagtgtcatctacgcgtatccagaaccctgatcctgccgtgtaccagctgcgggatagcaagagcagcgacaagagcgtgtgtctgttcaccgacttcgacagccagaccaacgtgtcccagagcaaggactccgacgtgtacatcaccgataagtgcgtgctggacatgcggagcatggacttcaagagcaactccgccgtggcctggtccaacaagtccgatttcgcctgcgccaacgccttcaacaacagcattatccccgaggacacattcttcccaagccccgagagcagcgactccaccgaccacgtgaagcccaaagagacagagaacaccaagcagcccagcaagagctgccacaagcccaaggccatcgtgcacaccgagaaagtgaacatgatgagcctgaccgtgctgggcctgcggatgctgttcgccaaaaccgtggccgtgaacttcctgctgaccgccaagctgttcttcctccgcgccaagagaagcggatctggcgtgaagcagaccctgaatttcgacctgctgaagctggctggcgacgtggaatccaacccaggcccttctagaggccatatgaccgagtacaagcccacggtgcgcctcgccacccgcgacgacgtccccagggccgtacgcaccctcgccgccgcgttcgccgactaccccgccacgcgccacaccgtcgatccggaccgccacatcgagcgggtcaccgagctgcaagaactcttcctcacgcgcgtcgggctcgacatcggcaaggtgtgggtcgcggacgacggcgccgcggtggcggtctggaccacgccggagagcgtcgaagcgggggcggtgttcgccgagatcggcccgcgcatggccgagttgagcggttcccggctggccgcgcagcaacagatggaaggcctcctggcgccgcaccggcccaaggagcccgcgtggttcctggccaccgtcggcgtctcgcccgaccaccagggcaagggtctgggcagcgccgtcgtgctccccggagtggaggcggccgagcgcgccggggtgcccgccttcctggagacctccgcgccccgcaacctccccttctacgagcggctcggcttcaccgtcaccgccgacgtcgaggtgcccgaaggaccgcgcacctggtgcatgacccgcaagcccggtgcctga

SEQ ID NO: 37434 - DNA, 2916 bp, synthetic construct
  source 1..2916: mol_type = other DNA
atggccttaccagtgaccgccttgctcctgccgctggccttgctgctccacgccgccaggccgctcgagatccagaaccctgatcctgccgtgtaccagctgcgggatagcaagagcagcgacaagagcgtgtgtctgttcaccgacttcgacagccagaccaacgtgtcccagagcaaggactccgacgtgtacatcaccgataagtgcgtgctggacatgcggagcatggacttcaagagcaactccgccgtggcctggtccaacaagtccgatttcgcctgcgccaacgccttcaacaacagcattatccccgaggacacattcttcccaagccccgagagcagcgactccaccgaccacgtgaagcccaaagagacagagaacaccaagcagcccagcaagagctgccacaagcccaaggccatcgtgcacaccgagaaagtgaacatgatgagcctgaccgtgctgggcctgcggatgctgttcgccaaaaccgtggccgtgaacttcctgctgaccgccaagctgttcttcctcagggccaagcgatctggatctggagcaacaaacttctcactactcaaacaagcaggtgacgtggaggagaatcccgggcctactagcatggccttaccagtgaccgccttgctcctgccgctggccttgctgctccacgccgccaggccggacatccagatgacacagagccctagcagcctgtctgccagcgtgggagacagagtgaccatcacatgcaagagcagccagagcctgctggactccgatggcaagacctacctgaactggtatcagcagaagcccggcaaggcccctaagctgctgatctacctggtgtccaagctggatagcggcgtgcccagcagattttctggcagcggcagcggaaccgacttcaccctgacaatatccagcctccagcctgaggacttcgccacctactactgcttccaaggcacccactttccattcaccttcggccagggcaccaaggtggaaatcaaaagaggcggaggcggaagtggaggcggaggatctggcggcggaggctctgaagtgcagctggttgaatcaggcggaggactggttcagcctggcggatctctgagactgtcttgtgccgccagcggctacaccttcaccaactactggatgaactgggtccgacaggcccctggcaaaggactggaatgggtcggaatgatcgaccccagcgacagcgagacacactacaaccacatcttcaaggaccgcttcaccatcagcgccgacaccagcaagaataccgcctacctccagatgaactccctgagagccgaggacaccgccgtgtactactgcgccagaaacctgtatctgtggggccagggaaccctggtcacagtgtcatctacgcgtgaggaggacctgaagaacgtgttcccacctgaggtggccgtgttcgagcctagcgaggccgagatcagccacacccagaaagccaccctcgtgtgcctggctaccggcttctaccccgaccatgtggaactgtcttggtgggtcaacggcaaagaggtgcacagcggcgtgtgtaccgacccccagccactgaaagaacagcccgccctgaacgacagccggtactgcctgagcagcagactgagagtgtccgccaccttctggcagaacccccggaaccacttcagatgccaggtgcagttctacggcctgagcgagaacgacgagtggacccaggacagagccaagcccgtgacccagatcgtgtctgccgaagcctggggcagagccgatgatgtgattaagatccactggcaggaaaagaagtccaacaccatcctgggcagccaggaaggcaacaccatgaagaccaacgacacctacatgaagttcagctggctgaccgtgcccgagaagtccctggacaaagaacacagatgcatcgtgcggcacgaaaacaacaagaacggcgtggaccaggaaatcatcttcccacccatcaagaccgatgtgattacaatggaccccaaggacaactgctccaaggacgccaacgataccctgctgctccagctgaccaacaccagcgcctactacatgtacttgttgctgctgctgaagtccgtggtgtacttcgccatcatcacatgctgcctgctgcggagaaccgccttctgctgcaacggcgagaagtctcgcgccaagagaagcggatctggcgtgaagcagaccctgaatttcgacctgctgaagctggctggcgacgtggaatccaacccaggcccttctagaggccatatgaccgagtacaagcccacggtgcgcctcgccacccgcgacgacgtccccagggccgtacgcaccctcgccgccgcgttcgccgactaccccgccacgcgccacaccgtcgatccggaccgccacatcgagcgggtcaccgagctgcaagaactcttcctcacgcgcgtcgggctcgacatcggcaaggtgtgggtcgcggacgacggcgccgcggtggcggtctggaccacgccggagagcgtcgaagcgggggcggtgttcgccgagatcggcccgcgcatggccgagttgagcggttcccggctggccgcgcagcaacagatggaaggcctcctggcgccgcaccggcccaaggagcccgcgtggttcctggccaccgtcggcgtctcgcccgaccaccagggcaagggtctgggcagcgccgtcgtgctccccggagtggaggcggccgagcgcgccggggtgcccgccttcctggagacctccgcgccccgcaacctccccttctacgagcggctcggcttcaccgtcaccgccgacgtcgaggtgcccgaaggaccgcgcacctggtgcatgacccgcaagcccggtgcctga

SEQ ID NO: 37435 - DNA, 2607 bp, synthetic construct
  source 1..2607: mol_type = other DNA
atggccttaccagtgaccgccttgctcctgccgctggccttgctgctccacgccgccaggccgctcgaggaggacctgaagaacgtgttcccacctgaggtggccgtgttcgagcctagcgaggccgagatcagccacacccagaaagccaccctcgtgtgcctggctaccggcttctaccccgaccatgtggaactgtcttggtgggtcaacggcaaagaggtgcacagcggcgtgtctaccgacccccagccactgaaagaacagcccgccctgaacgacagccggtactgcctgagcagcagactgagagtgtccgccaccttctggcagaacccccggaaccacttcagatgccaggtgcagttctacggcctgagcgagaacgacgagtggacccaggacagagccaagcccgtgacccagatcgtgtctgccgaagcctggggcagagccgattgcggctttaccagcgagagctaccagcagggcgtgctgagcgccaccaacctgagcgtgatcggcttcagaatcctgctgctgaaagtggccggctttaacctgctgatgaccctgcggctgtggtccagcagggccaagcgatctggatctggagcaacaaacttctcactactcaaacaagcaggtgacgtggaggagaatcccgggcctactagcatggccttaccagtgaccgccttgctcctgccgctggccttgctgctccacgccgccaggccggacatccagatgacacagagccctagcagcctgtctgccagcgtgggagacagagtgaccatcacatgcaagagcagccagagcctgctggactccgatggcaagacctacctgaactggtatcagcagaagcccggcaaggcccctaagctgctgatctacctggtgtccaagctggatagcggcgtgcccagcagattttctggcagcggcagcggaaccgacttcaccctgacaatatccagcctccagcctgaggacttcgccacctactactgcttccaaggcacccactttccattcaccttcggccagggcaccaaggtggaaatcaaaagaggcggaggcggaagtggaggcggaggatctggcggcggaggctctgaagtgcagctggttgaatcaggcggaggactggttcagcctggcggatctctgagactgtcttgtgccgccagcggctacaccttcaccaactactggatgaactgggtccgacaggcccctggcaaaggactggaatgggtcggaatgatcgaccccagcgacagcgagacacactacaaccacatcttcaaggaccgcttcaccatcagcgccgacaccagcaagaataccgcctacctccagatgaactccctgagagccgaggacaccgccgtgtactactgcgccagaaacctgtatctgtggggccagggaaccctggtcacagtgtcatctacgcgtatccagaaccctgatcctgccgtgtaccagctgcgggatagcaagagcagcgacaagagcgtgtgtctgttcaccgacttcgacagccagaccaacgtgtcccagagcaaggactccgacgtgtacatcaccgataagaccgtgctggacatgcggagcatggacttcaagagcaactccgccgtggcctggtccaacaagtccgatttcgcctgcgccaacgccttcaacaacagcattatccccgaggacacattcttcccaagccccgagagcagctgcgacgtgaagctggtggaaaagagcttcgagacagacaccaacctgaacttccagatcctgtacgagatcctgctgggcaaggccaccctgtacgccgtgctggtgtctgccctggtgctgatggctatggtcaagcggaaggacagccggggacgcgccaagagaagcggatctggcgtgaagcagaccctgaatttcgacctgctgaagctggctggcgacgtggaatccaacccaggcccttctagaggccatatgaccgagtacaagcccacggtgcgcctcgccacccgcgacgacgtccccagggccgtacgcaccctcgccgccgcgttcgccgactaccccgccacgcgccacaccgtcgatccggaccgccacatcgagcgggtcaccgagctgcaagaactcttcctcacgcgcgtcgggctcgacatcggcaaggtgtgggtcgcggacgacggcgccgcggtggcggtctggaccacgccggagagcgtcgaagcgggggcggtgttcgccgagatcggcccgcgcatggccgagttgagcggttcccggctggccgcgcagcaacagatggaaggcctcctggcgccgcaccggcccaaggagcccgcgtggttcctggccaccgtcggcgtctcgcccgaccaccagggcaagggtctgggcagcgccgtcgtgctccccggagtggaggcggccgagcgcgccggggtgcccgccttcctggagacctccgcgccccgcaacctccccttctacgagcggctcggcttcaccgtcaccgccgacgtcgaggtgcccgaaggaccgcgcacctggtgcatgacccgcaagcccggtgcctga

SEQ ID NO: 37436 - DNA, 2607 bp, synthetic construct
  source 1..2607: mol_type = other DNA
atggccttaccagtgaccgccttgctcctgccgctggccttgctgctccacgccgccaggccgctcgagatccagaaccctgatcctgccgtgtaccagctgcgggatagcaagagcagcgacaagagcgtgtgtctgttcaccgacttcgacagccagaccaacgtgtcccagagcaaggactccgacgtgtacatcaccgataagaccgtgctggacatgcggagcatggacttcaagagcaactccgccgtggcctggtccaacaagtccgatttcgcctgcgccaacgccttcaacaacagcattatccccgaggacacattcttcccaagccccgagagcagctgcgacgtgaagctggtggaaaagagcttcgagacagacaccaacctgaacttccagatcctgtacgagatcctgctgggcaaggccaccctgtacgccgtgctggtgtctgccctggtgctgatggctatggtcaagcggaaggacagccggggaagggccaagcgatctggatctggagcaacaaacttctcactactcaaacaagcaggtgacgtggaggagaatcccgggcctactagcatggccttaccagtgaccgccttgctcctgccgctggccttgctgctccacgccgccaggccggacatccagatgacacagagccctagcagcctgtctgccagcgtgggagacagagtgaccatcacatgcaagagcagccagagcctgctggactccgatggcaagacctacctgaactggtatcagcagaagcccggcaaggcccctaagctgctgatctacctggtgtccaagctggatagcggcgtgcccagcagattttctggcagcggcagcggaaccgacttcaccctgacaatatccagcctccagcctgaggacttcgccacctactactgcttccaaggcacccactttccattcaccttcggccagggcaccaaggtggaaatcaaaagaggcggaggcggaagtggaggcggaggatctggcggcggaggctctgaagtgcagctggttgaatcaggcggaggactggttcagcctggcggatctctgagactgtcttgtgccgccagcggctacaccttcaccaactactggatgaactgggtccgacaggcccctggcaaaggactggaatgggtcggaatgatcgaccccagcgacagcgagacacactacaaccacatcttcaaggaccgcttcaccatcagcgccgacaccagcaagaataccgcctacctccagatgaactccctgagagccgaggacaccgccgtgtactactgcgccagaaacctgtatctgtggggccagggaaccctggtcacagtgtcatctacgcgtgaggacctgaagaacgtgttcccacctgaggtggccgtgttcgagcctagcgaggccgagatcagccacacccagaaagccaccctcgtgtgcctggctaccggcttctaccccgaccatgtggaactgtcttggtgggtcaacggcaaagaggtgcacagcggcgtgtctaccgacccccagccactgaaagaacagcccgccctgaacgacagccggtactgcctgagcagcagactgagagtgtccgccaccttctggcagaacccccggaaccacttcagatgccaggtgcagttctacggcctgagcgagaacgacgagtggacccaggacagagccaagcccgtgacccagatcgtgtctgccgaagcctggggcagagccgattgcggctttaccagcgagagctaccagcagggcgtgctgagcgccaccaacctgagcgtgatcggcttcagaatcctgctgctgaaagtggccggctttaacctgctgatgaccctgcggctgtggtccagccgcgccaagagaagcggatctggcgtgaagcagaccctgaatttcgacctgctgaagctggctggcgacgtggaatccaacccaggcccttctagaggccatatgaccgagtacaagcccacggtgcgcctcgccacccgcgacgacgtccccagggccgtacgcaccctcgccgccgcgttcgccgactaccccgccacgcgccacaccgtcgatccggaccgccacatcgagcgggtcaccgagctgcaagaactcttcctcacgcgcgtcgggctcgacatcggcaaggtgtgggtcgcggacgacggcgccgcggtggcggtctggaccacgccggagagcgtcgaagcgggggcggtgttcgccgagatcggcccgcgcatggccgagttgagcggttcccggctggccgcgcagcaacagatggaaggcctcctggcgccgcaccggcccaaggagcccgcgtggttcctggccaccgtcggcgtctcgcccgaccaccagggcaagggtctgggcagcgccgtcgtgctccccggagtggaggcggccgagcgcgccggggtgcccgccttcctggagacctccgcgccccgcaacctccccttctacgagcggctcggcttcaccgtcaccgccgacgtcgaggtgcccgaaggaccgcgcacctggtgcatgacccgcaagcccggtgcctga

SEQ ID NO: 37437 - DNA, 2607 bp, synthetic construct
  source 1..2607: mol_type = other DNA
atggccttaccagtgaccgccttgctcctgccgctggccttgctgctccacgccgccaggccgctcgaggaggacctgaagaacgtgttcccacctgaggtggccgtgttcgagcctagcgaggccgagatcagccacacccagaaagccaccctcgtgtgcctggctaccggcttctaccccgaccatgtggaactgtcttggtgggtcaacggcaaagaggtgcacagcggcgtgtgtaccgacccccagccactgaaagaacagcccgccctgaacgacagccggtactgcctgagcagcagactgagagtgtccgccaccttctggcagaacccccggaaccacttcagatgccaggtgcagttctacggcctgagcgagaacgacgagtggacccaggacagagccaagcccgtgacccagatcgtgtctgccgaagcctggggcagagccgattgcgacgtgaagctggtggaaaagagcttcgagacagacaccaacctgaacttccagaacctgagcgtgatcggcttcagaatcctgctgctgaaagtggccggctttaacctgctgatgaccctgcggctgtggtccagcagggccaagcgatctggatctggagcaacaaacttctcactactcaaacaagcaggtgacgtggaggagaatcccgggcctactagcatggccttaccagtgaccgccttgctcctgccgctggccttgctgctccacgccgccaggccggacatccagatgacacagagccctagcagcctgtctgccagcgtgggagacagagtgaccatcacatgcaagagcagccagagcctgctggactccgatggcaagacctacctgaactggtatcagcagaagcccggcaaggcccctaagctgctgatctacctggtgtccaagctggatagcggcgtgcccagcagattttctggcagcggcagcggaaccgacttcaccctgacaatatccagcctccagcctgaggacttcgccacctactactgcttccaaggcacccactttccattcaccttcggccagggcaccaaggtggaaatcaaaagaggcggaggcggaagtggaggcggaggatctggcggcggaggctctgaagtgcagctggttgaatcaggcggaggactggttcagcctggcggatctctgagactgtcttgtgccgccagcggctacaccttcaccaactactggatgaactgggtccgacaggcccctggcaaaggactggaatgggtcggaatgatcgaccccagcgacagcgagacacactacaaccacatcttcaaggaccgcttcaccatcagcgccgacaccagcaagaataccgcctacctccagatgaactccctgagagccgaggacaccgccgtgtactactgcgccagaaacctgtatctgtggggccagggaaccctggtcacagtgtcatctacgcgtatccagaaccctgatcctgccgtgtaccagctgcgggatagcaagagcagcgacaagagcgtgtgtctgttcaccgacttcgacagccagaccaacgtgtcccagagcaaggactccgacgtgtacatcaccgataagtgcgtgctggacatgcggagcatggacttcaagagcaactccgccgtggcctggtccaacaagtccgatttcgcctgcgccaacgccttcaacaacagcattatccccgaggacacattcttcccaagccccgagagcagctgcggctttaccagcgagagctaccagcagggcgtgctgagcgccaccatcctgtacgagatcctgctgggcaaggccaccctgtacgccgtgctggtgtctgccctggtgctgatggctatggtcaagcggaaggacagccggggacgcgccaagagaagcggatctggcgtgaagcagaccctgaatttcgacctgctgaagctggctggcgacgtggaatccaacccaggcccttctagaggccatatgaccgagtacaagcccacggtgcgcctcgccacccgcgacgacgtccccagggccgtacgcaccctcgccgccgcgttcgccgactaccccgccacgcgccacaccgtcgatccggaccgccacatcgagcgggtcaccgagctgcaagaactcttcctcacgcgcgtcgggctcgacatcggcaaggtgtgggtcgcggacgacggcgccgcggtggcggtctggaccacgccggagagcgtcgaagcgggggcggtgttcgccgagatcggcccgcgcatggccgagttgagcggttcccggctggccgcgcagcaacagatggaaggcctcctggcgccgcaccggcccaaggagcccgcgtggttcctggccaccgtcggcgtctcgcccgaccaccagggcaagggtctgggcagcgccgtcgtgctccccggagtggaggcggccgagcgcgccggggtgcccgccttcctggagacctccgcgccccgcaacctccccttctacgagcggctcggcttcaccgtcaccgccgacgtcgaggtgcccgaaggaccgcgcacctggtgcatgacccgcaagcccggtgcctga

SEQ ID NO: 37438 - DNA, 2607 bp, synthetic construct
  source 1..2607: mol_type = other DNA
atggccttaccagtgaccgccttgctcctgccgctggccttgctgctccacgccgccaggccgctcgaggaggacctgaagaacgtgttcccacctgaggtggccgtgttcgagcctagcgaggccgagatcagccacacccagaaagccaccctcgtgtgcctggctaccggcttctaccccgaccatgtggaactgtcttggtgggtcaacggcaaagaggtgcacagcggcgtgtctaccgacccccagccactgaaagaacagcccgccctgaacgacagccggtactgcctgagcagcagactgagagtgtccgccaccttctggcagaacccccggaaccacttcagatgccaggtgcagttctacggcctgagcgagaacgacgagtggacccaggacagagccaagcccgtgacccagatcgtgtctgccgaagcctggggcagagccgattgcgacgtgaagctggtggaaaagagcttcgagacagacaccaacctgaacttccagaacctgagcgtgatcggcttcagaatcctgctgctgaaagtggccggctttaacctgctgatgaccctgcggctgtggtccagcagggccaagcgatctggatctggagcaacaaacttctcactactcaaacaagcaggtgacgtggaggagaatcccgggcctactagcatggccttaccagtgaccgccttgctcctgccgctggccttgctgctccacgccgccaggccggacatccagatgacacagagccctagcagcctgtctgccagcgtgggagacagagtgaccatcacatgcaagagcagccagagcctgctggactccgatggcaagacctacctgaactggtatcagcagaagcccggcaaggcccctaagctgctgatctacctggtgtccaagctggatagcggcgtgcccagcagattttctggcagcggcagcggaaccgacttcaccctgacaatatccagcctccagcctgaggacttcgccacctactactgcttccaaggcacccactttccattcaccttcggccagggcaccaaggtggaaatcaaaagaggcggaggcggaagtggaggcggaggatctggcggcggaggctctgaagtgcagctggttgaatcaggcggaggactggttcagcctggcggatctctgagactgtcttgtgccgccagcggctacaccttcaccaactactggatgaactgggtccgacaggcccctggcaaaggactggaatgggtcggaatgatcgaccccagcgacagcgagacacactacaaccacatcttcaaggaccgcttcaccatcagcgccgacaccagcaagaataccgcctacctccagatgaactccctgagagccgaggacaccgccgtgtactactgcgccagaaacctgtatctgtggggccagggaaccctggtcacagtgtcatctacgcgtatccagaaccctgatcctgccgtgtaccagctgcgggatagcaagagcagcgacaagagcgtgtgtctgttcaccgacttcgacagccagaccaacgtgtcccagagcaaggactccgacgtgtacatcaccgataagaccgtgctggacatgcggagcatggacttcaagagcaactccgccgtggcctggtccaacaagtccgatttcgcctgcgccaacgccttcaacaacagcattatccccgaggacacattcttcccaagccccgagagcagctgcggctttaccagcgagagctaccagcagggcgtgctgagcgccaccatcctgtacgagatcctgctgggcaaggccaccctgtacgccgtgctggtgtctgccctggtgctgatggctatggtcaagcggaaggacagccggggacgcgccaagagaagcggatctggcgtgaagcagaccctgaatttcgacctgctgaagctggctggcgacgtggaatccaacccaggcccttctagaggccatatgaccgagtacaagcccacggtgcgcctcgccacccgcgacgacgtccccagggccgtacgcaccctcgccgccgcgttcgccgactaccccgccacgcgccacaccgtcgatccggaccgccacatcgagcgggtcaccgagctgcaagaactcttcctcacgcgcgtcgggctcgacatcggcaaggtgtgggtcgcggacgacggcgccgcggtggcggtctggaccacgccggagagcgtcgaagcgggggcggtgttcgccgagatcggcccgcgcatggccgagttgagcggttcccggctggccgcgcagcaacagatggaaggcctcctggcgccgcaccggcccaaggagcccgcgtggttcctggccaccgtcggcgtctcgcccgaccaccagggcaagggtctgggcagcgccgtcgtgctccccggagtggaggcggccgagcgcgccggggtgcccgccttcctggagacctccgcgccccgcaacctccccttctacgagcggctcggcttcaccgtcaccgccgacgtcgaggtgcccgaaggaccgcgcacctggtgcatgacccgcaagcccggtgcctga

SEQ ID NO: 37439 - DNA, 2916 bp, synthetic construct
  source 1..2916: mol_type = other DNA
atggccttaccagtgaccgccttgctcctgccgctggccttgctgctccacgccgccaggccgctcgaggaggaggacctgaagaacgtgttcccacctgaggtggccgtgttcgagcctagcgaggccgagatcagccacacccagaaagccaccctcgtgtgcctggctaccggcttctaccccgaccatgtggaactgtcttggtgggtcaacggcaaagaggtgcacagcggcgtgtctaccgacccccagccactgaaagaacagcccgccctgaacgacagccggtactgcctgagcagcagactgagagtgtccgccaccttctggcagaacccccggaaccacttcagatgccaggtgcagttctacggcctgagcgagaacgacgagtggacccaggacagagccaagcccgtgacccagatcgtgtctgccgaagcctggggcagagccgatgatgtgattaagatccactggcaggaaaagaagtccaacaccatcctgggcagccaggaaggcaacaccatgaagaccaacgacacctacatgaagttcagctggctgaccgtgcccgagaagtccctggacaaagaacacagatgcatcgtgcggcacgaaaacaacaagaacggcgtggaccaggaaatcatcttcccacccatcaagaccgatgtgattacaatggaccccaaggacaactgctccaaggacgccaacgataccctgctgctccagctgaccaacaccagcgcctactacatgtacttgttgctgctgctgaagtccgtggtgtacttcgccatcatcacatgctgcctgctgcggagaaccgccttctgctgcaacggcgagaagtctagggccaagcgatctggatctggagcaacaaacttctcactactcaaacaagcaggtgacgtggaggagaatcccgggcctactagcatggccttaccagtgaccgccttgctcctgccgctggccttgctgctccacgccgccaggccggacatccagatgacacagagccctagcagcctgtctgccagcgtgggagacagagtgaccatcacatgcaagagcagccagagcctgctggactccgatggcaagacctacctgaactggtatcagcagaagcccggcaaggcccctaagctgctgatctacctggtgtccaagctggatagcggcgtgcccagcagattttctggcagcggcagcggaaccgacttcaccctgacaatatccagcctccagcctgaggacttcgccacctactactgcttccaaggcacccactttccattcaccttcggccagggcaccaaggtggaaatcaaaagaggcggaggcggaagtggaggcggaggatctggcggcggaggctctgaagtgcagctggttgaatcaggcggaggactggttcagcctggcggatctctgagactgtcttgtgccgccagcggctacaccttcaccaactactggatgaactgggtccgacaggcccctggcaaaggactggaatgggtcggaatgatcgaccccagcgacagcgagacacactacaaccacatcttcaaggaccgcttcaccatcagcgccgacaccagcaagaataccgcctacctccagatgaactccctgagagccgaggacaccgccgtgtactactgcgccagaaacctgtatctgtggggccagggaaccctggtcacagtgtcatctacgcgtatccagaaccctgatcctgccgtgtaccagctgcgggatagcaagagcagcgacaagagcgtgtgtctgttcaccgacttcgacagccagaccaacgtgtcccagagcaaggactccgacgtgtacatcaccgataagaccgtgctggacatgcggagcatggacttcaagagcaactccgccgtggcctggtccaacaagtccgatttcgcctgcgccaacgccttcaacaacagcattatccccgaggacacattcttcccaagccccgagagcagcgactccaccgaccacgtgaagcccaaagagacagagaacaccaagcagcccagcaagagctgccacaagcccaaggccatcgtgcacaccgagaaagtgaacatgatgagcctgaccgtgctgggcctgcggatgctgttcgccaaaaccgtggccgtgaacttcctgctgaccgccaagctgttcttcctccgcgccaagagaagcggatctggcgtgaagcagaccctgaatttcgacctgctgaagctggctggcgacgtggaatccaacccaggcccttctagaggccatatgaccgagtacaagcccacggtgcgcctcgccacccgcgacgacgtccccagggccgtacgcaccctcgccgccgcgttcgccgactaccccgccacgcgccacaccgtcgatccggaccgccacatcgagcgggtcaccgagctgcaagaactcttcctcacgcgcgtcgggctcgacatcggcaaggtgtgggtcgcggacgacggcgccgcggtggcggtctggaccacgccggagagcgtcgaagcgggggcggtgttcgccgagatcggcccgcgcatggccgagttgagcggttcccggctggccgcgcagcaacagatggaaggcctcctggcgccgcaccggcccaaggagcccgcgtggttcctggccaccgtcggcgtctcgcccgaccaccagggcaagggtctgggcagcgccgtcgtgctccccggagtggaggcggccgagcgcgccggggtgcccgccttcctggagacctccgcgccccgcaacctccccttctacgagcggctcggcttcaccgtcaccgccgacgtcgaggtgcccgaaggaccgcgcacctggtgcatgacccgcaagcccggtgcctga

SEQ ID NO: 37440 - DNA, 2607 bp, synthetic construct
  source 1..2607: mol_type = other DNA
atggccttaccagtgaccgccttgctcctgccgctggccttgctgctccacgccgccaggccgctcgaggaggacctgaagaacgtgttcccacctgaggtggccgtgttcgagcctagcgaggccgagatcagccacacccagaaagccaccctcgtgtgcctggctaccggcttctaccccgaccatgtggaactgtcttggtgggtcaacggcaaagaggtgcacagcggcgtgtgtaccgacccccagccactgaaagaacagcccgccctgaacgacagccggtactgcctgagcagcagactgagagtgtccgccaccttctggcagaacccccggaaccacttcagatgccaggtgcagttctacggcctgagcgagaacgacgagtggacccaggacagagccaagcccgtgacccagatcgtgtctgccgaagcctggggcagagccgattgcggctttaccagcgagagctaccagcagggcgtgctgagcgccaccaacctgagcgtgatcggcttcagaatcctgctgctgaaagtggccggctttaacctgctgatgaccctgcggctgtggtccagcagggccaagcgatctggatctggagcaacaaacttctcactactcaaacaagcaggtgacgtggaggagaatcccgggcctactagcatggccttaccagtgaccgccttgctcctgccgctggccttgctgctccacgccgccaggccggacatccagatgacacagagccctagcagcctgtctgccagcgtgggagacagagtgaccatcacatgcaagagcagccagagcctgctggactccgatggcaagacctacctgaactggtatcagcagaagcccggcaaggcccctaagctgctgatctacctggtgtccaagctggatagcggcgtgcccagcagattttctggcagcggcagcggaaccgacttcaccctgacaatatccagcctccagcctgaggacttcgccacctactactgcttccaaggcacccactttccattcaccttcggccagggcaccaaggtggaaatcaaaagaggcggaggcggaagtggaggcggaggatctggcggcggaggctctgaagtgcagctggttgaatcaggcggaggactggttcagcctggcggatctctgagactgtcttgtgccgccagcggctacaccttcaccaactactggatgaactgggtccgacaggcccctggcaaaggactggaatgggtcggaatgatcgaccccagcgacagcgagacacactacaaccacatcttcaaggaccgcttcaccatcagcgccgacaccagcaagaataccgcctacctccagatgaactccctgagagccgaggacaccgccgtgtactactgcgccagaaacctgtatctgtggggccagggaaccctggtcacagtgtcatctacgcgtatccagaaccctgatcctgccgtgtaccagctgcgggatagcaagagcagcgacaagagcgtgtgtctgttcaccgacttcgacagccagaccaacgtgtcccagagcaaggactccgacgtgtacatcaccgataagtgcgtgctggacatgcggagcatggacttcaagagcaactccgccgtggcctggtccaacaagtccgatttcgcctgcgccaacgccttcaacaacagcattatccccgaggacacattcttcccaagccccgagagcagctgcgacgtgaagctggtggaaaagagcttcgagacagacaccaacctgaacttccagatcctgtacgagatcctgctgggcaaggccaccctgtacgccgtgctggtgtctgccctggtgctgatggctatggtcaagcggaaggacagccggggacgcgccaagagaagcggatctggcgtgaagcagaccctgaatttcgacctgctgaagctggctggcgacgtggaatccaacccaggcccttctagaggccatatgaccgagtacaagcccacggtgcgcctcgccacccgcgacgacgtccccagggccgtacgcaccctcgccgccgcgttcgccgactaccccgccacgcgccacaccgtcgatccggaccgccacatcgagcgggtcaccgagctgcaagaactcttcctcacgcgcgtcgggctcgacatcggcaaggtgtgggtcgcggacgacggcgccgcggtggcggtctggaccacgccggagagcgtcgaagcgggggcggtgttcgccgagatcggcccgcgcatggccgagttgagcggttcccggctggccgcgcagcaacagatggaaggcctcctggcgccgcaccggcccaaggagcccgcgtggttcctggccaccgtcggcgtctcgcccgaccaccagggcaagggtctgggcagcgccgtcgtgctccccggagtggaggcggccgagcgcgccggggtgcccgccttcctggagacctccgcgccccgcaacctccccttctacgagcggctcggcttcaccgtcaccgccgacgtcgaggtgcccgaaggaccgcgcacctggtgcatgacccgcaagcccggtgcctga

SEQ ID NO: 37441 - DNA, 2694 bp, synthetic construct
  source 1..2694: mol_type = other DNA
atggccttaccagtgaccgccttgctcctgccgctggccttgctgctccacgccgccaggccgctcgaggaggaggacctgaagaacgtgttcccacctgaggtggccgtgttcgagcctagcgaggccgagatcagccacacccagaaagccaccctcgtgtgcctggctaccggcttctaccccgaccatgtggaactgtcttggtgggtcaacggcaaagaggtgcacagcggcgtgtgtaccgacccccagccactgaaagaacagcccgccctgaacgacagccggtactgcctgagcagcagactgagagtgtccgccaccttctggcagaacccccggaaccacttcagatgccaggtgcagttctacggcctgagcgagaacgacgagtggacccaggacagagccaagcccgtgacccagatcgtgtctgccgaagcctggggcagagccgattgcggctttaccagcgagagctaccagcagggcgtgctgagcgccaccaacctgagcgtgatcggcttcagaatcctgctgctgaaagtggccggctttaacctgctgatgaccctgcggctgtggtccagcagggccaagcgatctggatctggagcaacaaacttctcactactcaaacaagcaggtgacgtggaggagaatcccgggcctactagcatggccttaccagtgaccgccttgctcctgccgctggccttgctgctccacgccgccaggccggacatccagatgacacagagccctagcagcctgtctgccagcgtgggagacagagtgaccatcacatgcaagagcagccagagcctgctggactccgatggcaagacctacctgaactggtatcagcagaagcccggcaaggcccctaagctgctgatctacctggtgtccaagctggatagcggcgtgcccagcagattttctggcagcggcagcggaaccgacttcaccctgacaatatccagcctccagcctgaggacttcgccacctactactgcttccaaggcacccactttccattcaccttcggccagggcaccaaggtggaaatcaaaagaggcggaggcggaagtggaggcggaggatctggcggcggaggctctgaagtgcagctggttgaatcaggcggaggactggttcagcctggcggatctctgagactgtcttgtgccgccagcggctacaccttcaccaactactggatgaactgggtccgacaggcccctggcaaaggactggaatgggtcggaatgatcgaccccagcgacagcgagacacactacaaccacatcttcaaggaccgcttcaccatcagcgccgacaccagcaagaataccgcctacctccagatgaactccctgagagccgaggacaccgccgtgtactactgcgccagaaacctgtatctgtggggccagggaaccctggtcacagtgtcatctacgcgtggacagcctaaggccaatcctaccgtgacactgttccctccaagcagcgaagaactccaggccaacaaggccacacttgtgtgcctgatctccgacttctaccctggggctgtgacagtggcttggaaggccgatggatctcctgtgaaagccggcgtggaaaccaccaagccatccaagcagagcaacaacaaatacgccgccagctcctacctgagcctgacacctgagcagtggaagtcccacagatcctacagctgccaagtgacccacgaaggcagcaccgtggaaaagacagtggcccctacagagtgcagccccatcaagaccgatgtgattacaatggaccccaaggacaactgctccaaggacgccaacgataccctgctgctccagctgaccaacaccagcgcctactacatgtacttgttgctgctgctgaagtccgtggtgtacttcgccatcatcacatgctgcctgctgcggagaaccgccttctgctgcaacggcgagaagtctcgcgccaagagaagcggatctggcgtgaagcagaccctgaatttcgacctgctgaagctggctggcgacgtggaatccaacccaggcccttctagaggccatatgaccgagtacaagcccacggtgcgcctcgccacccgcgacgacgtccccagggccgtacgcaccctcgccgccgcgttcgccgactaccccgccacgcgccacaccgtcgatccggaccgccacatcgagcgggtcaccgagctgcaagaactcttcctcacgcgcgtcgggctcgacatcggcaaggtgtgggtcgcggacgacggcgccgcggtggcggtctggaccacgccggagagcgtcgaagcgggggcggtgttcgccgagatcggcccgcgcatggccgagttgagcggttcccggctggccgcgcagcaacagatggaaggcctcctggcgccgcaccggcccaaggagcccgcgtggttcctggccaccgtcggcgtctcgcccgaccaccagggcaagggtctgggcagcgccgtcgtgctccccggagtggaggcggccgagcgcgccggggtgcccgccttcctggagacctccgcgccccgcaacctccccttctacgagcggctcggcttcaccgtcaccgccgacgtcgaggtgcccgaaggaccgcgcacctggtgcatgacccgcaagcccggtgcctga

SEQ ID NO: 37442 - DNA, 2694 bp, synthetic construct
  source 1..2694: mol_type = other DNA
atggccttaccagtgaccgccttgctcctgccgctggccttgctgctccacgccgccaggccgctcgagggacagcctaaggccaatcctaccgtgacactgttccctccaagcagcgaagaactccaggccaacaaggccacacttgtgtgcctgatctccgacttctaccctggggctgtgacagtggcttggaaggccgatggatctcctgtgaaagccggcgtggaaaccaccaagccatccaagcagagcaacaacaaatacgccgccagctcctacctgagcctgacacctgagcagtggaagtcccacagatcctacagctgccaagtgacccacgaaggcagcaccgtggaaaagacagtggcccctacagagtgcagccccatcaagaccgatgtgattacaatggaccccaaggacaactgctccaaggacgccaacgataccctgctgctccagctgaccaacaccagcgcctactacatgtacttgttgctgctgctgaagtccgtggtgtacttcgccatcatcacatgctgcctgctgcggagaaccgccttctgctgcaacggcgagaagtctagggccaagcgatctggatctggagcaacaaacttctcactactcaaacaagcaggtgacgtggaggagaatcccgggcctactagcatggccttaccagtgaccgccttgctcctgccgctggccttgctgctccacgccgccaggccggacatccagatgacacagagccctagcagcctgtctgccagcgtgggagacagagtgaccatcacatgcaagagcagccagagcctgctggactccgatggcaagacctacctgaactggtatcagcagaagcccggcaaggcccctaagctgctgatctacctggtgtccaagctggatagcggcgtgcccagcagattttctggcagcggcagcggaaccgacttcaccctgacaatatccagcctccagcctgaggacttcgccacctactactgcttccaaggcacccactttccattcaccttcggccagggcaccaaggtggaaatcaaaagaggcggaggcggaagtggaggcggaggatctggcggcggaggctctgaagtgcagctggttgaatcaggcggaggactggttcagcctggcggatctctgagactgtcttgtgccgccagcggctacaccttcaccaactactggatgaactgggtccgacaggcccctggcaaaggactggaatgggtcggaatgatcgaccccagcgacagcgagacacactacaaccacatcttcaaggaccgcttcaccatcagcgccgacaccagcaagaataccgcctacctccagatgaactccctgagagccgaggacaccgccgtgtactactgcgccagaaacctgtatctgtggggccagggaaccctggtcacagtgtcatctacgcgtgaggaggacctgaagaacgtgttcccacctgaggtggccgtgttcgagcctagcgaggccgagatcagccacacccagaaagccaccctcgtgtgcctggctaccggcttctaccccgaccatgtggaactgtcttggtgggtcaacggcaaagaggtgcacagcggcgtgtgtaccgacccccagccactgaaagaacagcccgccctgaacgacagccggtactgcctgagcagcagactgagagtgtccgccaccttctggcagaacccccggaaccacttcagatgccaggtgcagttctacggcctgagcgagaacgacgagtggacccaggacagagccaagcccgtgacccagatcgtgtctgccgaagcctggggcagagccgattgcggctttaccagcgagagctaccagcagggcgtgctgagcgccaccaacctgagcgtgatcggcttcagaatcctgctgctgaaagtggccggctttaacctgctgatgaccctgcggctgtggtccagccgcgccaagagaagcggatctggcgtgaagcagaccctgaatttcgacctgctgaagctggctggcgacgtggaatccaacccaggcccttctagaggccatatgaccgagtacaagcccacggtgcgcctcgccacccgcgacgacgtccccagggccgtacgcaccctcgccgccgcgttcgccgactaccccgccacgcgccacaccgtcgatccggaccgccacatcgagcgggtcaccgagctgcaagaactcttcctcacgcgcgtcgggctcgacatcggcaaggtgtgggtcgcggacgacggcgccgcggtggcggtctggaccacgccggagagcgtcgaagcgggggcggtgttcgccgagatcggcccgcgcatggccgagttgagcggttcccggctggccgcgcagcaacagatggaaggcctcctggcgccgcaccggcccaaggagcccgcgtggttcctggccaccgtcggcgtctcgcccgaccaccagggcaagggtctgggcagcgccgtcgtgctccccggagtggaggcggccgagcgcgccggggtgcccgccttcctggagacctccgcgccccgcaacctccccttctacgagcggctcggcttcaccgtcaccgccgacgtcgaggtgcccgaaggaccgcgcacctggtgcatgacccgcaagcccggtgcctga

SEQ ID NO: 37443 - DNA, 2685 bp, synthetic construct
  source 1..2685: mol_type = other DNA
atggccttaccagtgaccgccttgctcctgccgctggccttgctgctccacgccgccaggccgctcgaggaggcctctacaaagggaccctccgtgtttcctctggctcccagcagcaagtctacaagcggaggaacagccgctctgggctgcctggtcaaggattactttcccgagcctgtgaccgtgtcctggaatagcggagcactgacaagcggcgtgcacacctttccagccgtgctgcaaagcagcggcctgtactctctgagcagcgtggtcacagtgcctagctctagcctgggcacccagacctacatctgcaatgtgaaccacaagcctagcaacaccaaggtggacaagagagtggaacccaagagctgtcccatcaagaccgatgtgattacaatggaccccaaggacaactgctccaaggacgccaacgataccctgctgctccagctgaccaacaccagcgcctactacatgtacttgttgctgctgctgaagtccgtggtgtacttcgccatcatcacatgctgcctgctgcggagaaccgccttctgctgcaacggcgagaagtctagggccaagcgatctggatctggagcaacaaacttctcactactcaaacaagcaggtgacgtggaggagaatcccgggcctactagcatggccttaccagtgaccgccttgctcctgccgctggccttgctgctccacgccgccaggccggacatccagatgacacagagccctagcagcctgtctgccagcgtgggagacagagtgaccatcacatgcaagagcagccagagcctgctggactccgatggcaagacctacctgaactggtatcagcagaagcccggcaaggcccctaagctgctgatctacctggtgtccaagctggatagcggcgtgcccagcagattttctggcagcggcagcggaaccgacttcaccctgacaatatccagcctccagcctgaggacttcgccacctactactgcttccaaggcacccactttccattcaccttcggccagggcaccaaggtggaaatcaaaagaggcggaggcggaagtggaggcggaggatctggcggcggaggctctgaagtgcagctggttgaatcaggcggaggactggttcagcctggcggatctctgagactgtcttgtgccgccagcggctacaccttcaccaactactggatgaactgggtccgacaggcccctggcaaaggactggaatgggtcggaatgatcgaccccagcgacagcgagacacactacaaccacatcttcaaggaccgcttcaccatcagcgccgacaccagcaagaataccgcctacctccagatgaactccctgagagccgaggacaccgccgtgtactactgcgccagaaacctgtatctgtggggccagggaaccctggtcacagtgtcatctacgcgtggacagcctaaggccaatcctaccgtgacactgttccctccaagcagcgaagaactccaggccaacaaggccacacttgtgtgcctgatctccgacttctaccctggggctgtgacagtggcttggaaggccgatggatctcctgtgaaagccggcgtggaaaccaccaagccatccaagcagagcaacaacaaatacgccgccagctcctacctgagcctgacacctgagcagtggaagtcccacagatcctacagctgccaagtgacccacgaaggcagcaccgtggaaaagacagtggcccctacagagtgcagcgaagtgaaaaccgactccaccgaccacgtgaagcccaaagagacagagaacaccaagcagcccagcaagagctgccacaagcccaaggccatcgtgcacaccgagaaagtgaacatgatgagcctgaccgtgctgggcctgcggatgctgttcgccaaaaccgtggccgtgaacttcctgctgaccgccaagctgttcttcctccgcgccaagagaagcggatctggcgtgaagcagaccctgaatttcgacctgctgaagctggctggcgacgtggaatccaacccaggcccttctagaggccatatgaccgagtacaagcccacggtgcgcctcgccacccgcgacgacgtccccagggccgtacgcaccctcgccgccgcgttcgccgactaccccgccacgcgccacaccgtcgatccggaccgccacatcgagcgggtcaccgagctgcaagaactcttcctcacgcgcgtcgggctcgacatcggcaaggtgtgggtcgcggacgacggcgccgcggtggcggtctggaccacgccggagagcgtcgaagcgggggcggtgttcgccgagatcggcccgcgcatggccgagttgagcggttcccggctggccgcgcagcaacagatggaaggcctcctggcgccgcaccggcccaaggagcccgcgtggttcctggccaccgtcggcgtctcgcccgaccaccagggcaagggtctgggcagcgccgtcgtgctccccggagtggaggcggccgagcgcgccggggtgcccgccttcctggagacctccgcgccccgcaacctccccttctacgagcggctcggcttcaccgtcaccgccgacgtcgaggtgcccgaaggaccgcgcacctggtgcatgacccgcaagcccggtgcctga

SEQ ID NO: 37444 - DNA, 2619 bp, synthetic construct
  source 1..2619: mol_type = other DNA
atggccttaccagtgaccgccttgctcctgccgctggccttgctgctccacgccgccaggccgctcgaggaggcctctacaaagggaccctccgtgtttcctctggctcccagcagcaagtctacaagcggaggaacagccgctctgggctgcctggtcaaggattactttcccgagcctgtgaccgtgtcctggaatagcggagcactgacaagcggcgtgcacacctttccagccgtgctgcaaagcagcggcctgtactctctgagcagcgtggtcacagtgcctagctctagcctgggcacccagacctacatctgcaatgtgaaccacaagcctagcaacaccaaggtggacaagagagtggaacccaagagctgtggcagagccgattgcggctttaccagcgagagctaccagcagggcgtgctgagcgccaccatcctgtacgagatcctgctgggcaaggccaccctgtacgccgtgctggtgtctgccctggtgctgatggctatggtcaagcggaaggacagccggggaagggccaagcgatctggatctggagcaacaaacttctcactactcaaacaagcaggtgacgtggaggagaatcccgggcctactagcatggccttaccagtgaccgccttgctcctgccgctggccttgctgctccacgccgccaggccggacatccagatgacacagagccctagcagcctgtctgccagcgtgggagacagagtgaccatcacatgcaagagcagccagagcctgctggactccgatggcaagacctacctgaactggtatcagcagaagcccggcaaggcccctaagctgctgatctacctggtgtccaagctggatagcggcgtgcccagcagattttctggcagcggcagcggaaccgacttcaccctgacaatatccagcctccagcctgaggacttcgccacctactactgcttccaaggcacccactttccattcaccttcggccagggcaccaaggtggaaatcaaaagaggcggaggcggaagtggaggcggaggatctggcggcggaggctctgaagtgcagctggttgaatcaggcggaggactggttcagcctggcggatctctgagactgtcttgtgccgccagcggctacaccttcaccaactactggatgaactgggtccgacaggcccctggcaaaggactggaatgggtcggaatgatcgaccccagcgacagcgagacacactacaaccacatcttcaaggaccgcttcaccatcagcgccgacaccagcaagaataccgcctacctccagatgaactccctgagagccgaggacaccgccgtgtactactgcgccagaaacctgtatctgtggggccagggaaccctggtcacagtgtcatctacgcgtggacagcctaaggccaatcctaccgtgacactgttccctccaagcagcgaagaactccaggccaacaaggccacacttgtgtgcctgatctccgacttctaccctggggctgtgacagtggcttggaaggccgatggatctcctgtgaaagccggcgtggaaaccaccaagccatccaagcagagcaacaacaaatacgccgccagctcctacctgagcctgacacctgagcagtggaagtcccacagatcctacagctgccaagtgacccacgaaggcagcaccgtggaaaagacagtggcccctacagagtgcagcatccccgaggacacattcttcccaagccccgagagcagctgcgacgtgaagctggtggaaaagagcttcgagacagacaccaacctgaacttccagaacctgagcgtgatcggcttcagaatcctgctgctgaaagtggccggctttaacctgctgatgaccctgcggctgtggtccagccgcgccaagagaagcggatctggcgtgaagcagaccctgaatttcgacctgctgaagctggctggcgacgtggaatccaacccaggcccttctagaggccatatgaccgagtacaagcccacggtgcgcctcgccacccgcgacgacgtccccagggccgtacgcaccctcgccgccgcgttcgccgactaccccgccacgcgccacaccgtcgatccggaccgccacatcgagcgggtcaccgagctgcaagaactcttcctcacgcgcgtcgggctcgacatcggcaaggtgtgggtcgcggacgacggcgccgcggtggcggtctggaccacgccggagagcgtcgaagcgggggcggtgttcgccgagatcggcccgcgcatggccgagttgagcggttcccggctggccgcgcagcaacagatggaaggcctcctggcgccgcaccggcccaaggagcccgcgtggttcctggccaccgtcggcgtctcgcccgaccaccagggcaagggtctgggcagcgccgtcgtgctccccggagtggaggcggccgagcgcgccggggtgcccgccttcctggagacctccgcgccccgcaacctccccttctacgagcggctcggcttcaccgtcaccgccgacgtcgaggtgcccgaaggaccgcgcacctggtgcatgacccgcaagcccggtgcctga

SEQ ID NO: 37445 - DNA, 2619 bp, synthetic construct
  source 1..2619: mol_type = other DNA
atggccttaccagtgaccgccttgctcctgccgctggccttgctgctccacgccgccaggccgctcgaggaggcctctacaaagggaccctccgtgtttcctctggctcccagcagcaagtctacaagcggaggaacagccgctctgggctgcctggtcaaggattactttcccgagcctgtgaccgtgtcctggaatagcggagcactgacaagcggcgtgcacacctttccagccgtgctgcaaagcagcggcctgtactctctgagcagcgtggtcacagtgcctagctctagcctgggcacccagacctacatctgcaatgtgaaccacaagcctagcaacaccaaggtggacaagagagtggaacccaagagctgtatccccgaggacacattcttcccaagccccgagagcagctgcgacgtgaagctggtggaaaagagcttcgagacagacaccaacctgaacttccagaacctgagcgtgatcggcttcagaatcctgctgctgaaagtggccggctttaacctgctgatgaccctgcggctgtggtccagcagggccaagcgatctggatctggagcaacaaacttctcactactcaaacaagcaggtgacgtggaggagaatcccgggcctactagcatggccttaccagtgaccgccttgctcctgccgctggccttgctgctccacgccgccaggccggacatccagatgacacagagccctagcagcctgtctgccagcgtgggagacagagtgaccatcacatgcaagagcagccagagcctgctggactccgatggcaagacctacctgaactggtatcagcagaagcccggcaaggcccctaagctgctgatctacctggtgtccaagctggatagcggcgtgcccagcagattttctggcagcggcagcggaaccgacttcaccctgacaatatccagcctccagcctgaggacttcgccacctactactgcttccaaggcacccactttccattcaccttcggccagggcaccaaggtggaaatcaaaagaggcggaggcggaagtggaggcggaggatctggcggcggaggctctgaagtgcagctggttgaatcaggcggaggactggttcagcctggcggatctctgagactgtcttgtgccgccagcggctacaccttcaccaactactggatgaactgggtccgacaggcccctggcaaaggactggaatgggtcggaatgatcgaccccagcgacagcgagacacactacaaccacatcttcaaggaccgcttcaccatcagcgccgacaccagcaagaataccgcctacctccagatgaactccctgagagccgaggacaccgccgtgtactactgcgccagaaacctgtatctgtggggccagggaaccctggtcacagtgtcatctacgcgtggacagcctaaggccaatcctaccgtgacactgttccctccaagcagcgaagaactccaggccaacaaggccacacttgtgtgcctgatctccgacttctaccctggggctgtgacagtggcttggaaggccgatggatctcctgtgaaagccggcgtggaaaccaccaagccatccaagcagagcaacaacaaatacgccgccagctcctacctgagcctgacacctgagcagtggaagtcccacagatcctacagctgccaagtgacccacgaaggcagcaccgtggaaaagacagtggcccctacagagtgcagcggcagagccgattgcggctttaccagcgagagctaccagcagggcgtgctgagcgccaccatcctgtacgagatcctgctgggcaaggccaccctgtacgccgtgctggtgtctgccctggtgctgatggctatggtcaagcggaaggacagccggggacgcgccaagagaagcggatctggcgtgaagcagaccctgaatttcgacctgctgaagctggctggcgacgtggaatccaacccaggcccttctagaggccatatgaccgagtacaagcccacggtgcgcctcgccacccgcgacgacgtccccagggccgtacgcaccctcgccgccgcgttcgccgactaccccgccacgcgccacaccgtcgatccggaccgccacatcgagcgggtcaccgagctgcaagaactcttcctcacgcgcgtcgggctcgacatcggcaaggtgtgggtcgcggacgacggcgccgcggtggcggtctggaccacgccggagagcgtcgaagcgggggcggtgttcgccgagatcggcccgcgcatggccgagttgagcggttcccggctggccgcgcagcaacagatggaaggcctcctggcgccgcaccggcccaaggagcccgcgtggttcctggccaccgtcggcgtctcgcccgaccaccagggcaagggtctgggcagcgccgtcgtgctccccggagtggaggcggccgagcgcgccggggtgcccgccttcctggagacctccgcgccccgcaacctccccttctacgagcggctcggcttcaccgtcaccgccgacgtcgaggtgcccgaaggaccgcgcacctggtgcatgacccgcaagcccggtgcctga

SEQ ID NO: 37446 - DNA, 1857 bp, synthetic construct
  source 1..1857: mol_type = other DNA
atggccttaccagtgaccgccttgctcctgccgctggccttgctgctccacgccgccaggccggacatccagatgacacagagccctagcagcctgtctgccagcgtgggagacagagtgaccatcacatgcaagagcagccagagcctgctggactccgatggcaagacctacctgaactggtatcagcagaagcccggcaaggcccctaagctgctgatctacctggtgtccaagctggatagcggcgtgcccagcagattttctggcagcggcagcggaaccgacttcaccctgacaatatccagcctccagcctgaggacttcgccacctactactgcttccaaggcacccactttccattcaccttcggccagggcaccaaggtggaaatcaaaagactcgaggacctgaagaacgtgttcccacctgaggtggccgtgttcgagcctagcgaggccgagatcagccacacccagaaagccaccctcgtgtgcctggctaccggcttctaccccgaccatgtggaactgtcttggtgggtcaacggcaaagaggtgcacagcggcgtgtgtaccgacccccagccactgaaagaacagcccgccctgaacgacagccggtactgcctgagcagcagactgagagtgtccgccaccttctggcagaacccccggaaccacttcagatgccaggtgcagttctacggcctgagcgagaacgacgagtggacccaggacagagccaagcccgtgacccagatcgtgtctgccgaagcctggggcagagccgatagcggctttaccagcgagagctaccagcagggcgtgctgagcgccaccatcctgtacgagatcctgctgggcaaggccaccctgtacgccgtgctggtgtctgccctggtgctgatggctatggtcaagcggaaggacagccggggaagggccaagcgatctggatctggagcaacaaacttctcactactcaaacaagcaggtgacgtggaggagaatcccgggcctactagtatggactggatttggcgcatccttttccttgtcggcgctgctaccggcgcgcattccttcgaagaagtgcagctggttgaatcaggcggaggactggttcagcctggcggatctctgagactgtcttgtgccgccagcggctacaccttcaccaactactggatgaactgggtccgacaggcccctggcaaaggactggaatgggtcggaatgatcgaccccagcgacagcgagacacactacaaccacatcttcaaggaccgcttcaccatcagcgccgacaccagcaagaataccgcctacctccagatgaactccctgagagccgaggacaccgccgtgtactactgcgccagaaacctgtatctgtggggccagggaaccctggtcacagtgtcatctacgcgtatccagaaccctgatcctgccgtgtaccagctgcgggatagcaagagcagcgacaagagcgtgtgtctgttcaccgacttcgacagccagaccaacgtgtcccagagcaaggactccgacgtgtacatcaccgataagtgcgtgctggacatgcggagcatggacttcaagagcaactccgccgtggcctggtccaacaagtccgatttcgcctgcgccaacgccttcaacaacagcattatccccgaggacacattcttcccaagccccgagagcagcagcgacgtgaagctggtggaaaagagcttcgagacagacaccaacctgaacttccagaacctgagcgtgatcggcttcagaatcctgctgctgaaagtggccggctttaacctgctgatgaccctgcggctgtggtccagc

SEQ ID NO: 37447 - DNA, 2697 bp, synthetic construct
  source 1..2697: mol_type = other DNA
atggccttaccagtgaccgccttgctcctgccgctggccttgctgctccacgccgccaggccggaggttcagctgcttgagtctggcggaggactggttcaacctggcggaagcctgagactgtcttgtgccgcctctggcagaaccttcagcatgggctggtatagacaggcccctggcaagggcctcgaatttgtgtctgccatcacatacagcggcggcagcccttactacgccgattctgtgaagggcagattcaccatcagccgggacaacagcaagaacaccgtgtacctccagatgaacagcctgagagccgaggacaccgccgtgtactactgtgccgccaatccaacctacggcagcgactggaatgccgagaattggggccagggcacactggtcacagtgtctagtggtaccggcggaggcggatctggcggcggaggtagcggtggcggaggatctgaattcgacatccagatgacacagagccctagcagcctgtctgccagcgtgggagacagagtgaccatcacatgcaagagcagccagagcctgctggactccgatggcaagacctacctgaactggtatcagcagaagcccggcaaggcccctaagctgctgatctacctggtgtccaagctggatagcggcgtgcccagcagattttctggcagcggcagcggaaccgacttcaccctgacaatatccagcctccagcctgaggacttcgccacctactactgcttccaaggcacccactttccattcaccttcggccagggcaccaaggtggaaatcaaaagactcgagatccagaaccctgatcctgccgtgtaccagctgcgggatagcaagagcagcgacaagagcgtgtgtctgttcaccgacttcgacagccagaccaacgtgtcccagagcaaggactccgacgtgtacatcaccgataagtgcgtgctggacatgcggagcatggacttcaagagcaactccgccgtggcctggtccaacaagtccgatttcgcctgcgccaacgccttcaacaacagcattatccccgaggacacattcttcccaagcagcgacgtgccctgcgacgtgaagctggtggaaaagagcttcgagacagacaccaacctgaacttccagaacctgagcgtgatcggcttcagaatcctgctgctgaaagtggccggctttaacctgctgatgaccctgcggctgtggtccagccgcgccaagagaagcggatctggcgtgaagcagaccctgaatttcgacctgctgaagctggctggcgacgtggaatccaacccaggccctactagtaccatggactggatttggcgcatccttttccttgtcggcgctgctaccggcacccattccgggcccgaagtgcaactggttgaatccggtggcggcctggtgcaacccggcggatctctcagacttagctgtgccgcctccggcagaaccttcacaatgggatggtacaggcaggctccagggaaagagagagagttcgtcgccgccatctctctgtctcccacactggcctactacgccgactctgtgaaaggccggttcaccatctccagagataatagcaagaacaccgtggtgctgcaaatgaactctctgagagccgaggatacagccctgtactattgtgccgctgaccggaagtccgtgatgagcatcagacccgattactggggacagggcacactggtcacagtgtctagtggatccggcggcggaggatctggcggaggcggatctgggggcggaggctctttcgaagaagtgcagctggttgaatcaggcggaggactggttcagcctggcggatctctgagactgtcttgtgccgccagcggctacaccttcaccaactactggatgaactgggtccgacaggcccctggcaaaggactggaatgggtcggaatgatcgaccccagcgacagcgagacacactacaaccacatcttcaaggaccgcttcaccatcagcgccgacaccagcaagaataccgcctacctccagatgaactccctgagagccgaggacaccgccgtgtactactgcgccagaaacctgtatctgtggggccagggaaccctggtcacagtgtcatctacgcgtgaggacctgaagaacgtgttcccacctgaggtggccgtgttcgagcctagcaaggccgagatcgcccacacccagaaagccaccctcgtgtgcctggctaccggcttctaccccgaccatgtggaactgtcttggtgggtcaacggcaaagaggtgcacagcggcgtgtgtaccgacccccagccactgaaagaacagcccgccctgaacgacagccggtactgcctgagcagcagactgagagtgtccgccaccttctggcagaacccccggaaccacttcagatgccaggtgcagttctacggcctgagcgagaacgacgagtggacccaggacagagccaagcccgtgacccagatcgtgtctgccgaagcctggggcagagccgattgcggcatcaccagcgccagctaccaccagggcgtgctgagcgccaccatcctgtacgagatcctgctgggcaaggccaccctgtacgccgtgctggtgtctgccctggtgctgatggctatggtcaagcggaaggacagccggggataa

SEQ ID NO: 37448 - DNA, 2697 bp, synthetic construct
  source 1..2697: mol_type = other DNA
atggccttaccagtgaccgccttgctcctgccgctggccttgctgctccacgccgccaggccggaagtgcagctggttgaatctggcggaggactggttcaggctggcggatctctgagactgtcttgtgccgccagcggcagaacctttagcatgggctggtttagacaggcccctggcaaagagagagagttcgtcgccgccatcacatactctggcggcagcccttactacgccgactctgtgaagggcagattcaccatcagccgggacaacgccaagaacaccgtgtacctccagatgaacagcctgaagcctgaggacaccgccgtgtactactgcgccgccaatccaacatacggcagcgactggaacgccgagaattggggccagggaacccaagtgacagtgtctagcggtaccggcggaggcggatctggcggcggaggtagcggtggcggaggatctgaattcgacatccagatgacacagagccctagcagcctgtctgccagcgtgggagacagagtgaccatcacatgcaagagcagccagagcctgctggactccgatggcaagacctacctgaactggtatcagcagaagcccggcaaggcccctaagctgctgatctacctggtgtccaagctggatagcggcgtgcccagcagattttctggcagcggcagcggaaccgacttcaccctgacaatatccagcctccagcctgaggacttcgccacctactactgcttccaaggcacccactttccattcaccttcggccagggcaccaaggtggaaatcaaaagactcgagatccagaaccctgatcctgccgtgtaccagctgcgggatagcaagagcagcgacaagagcgtgtgtctgttcaccgacttcgacagccagaccaacgtgtcccagagcaaggactccgacgtgtacatcaccgataagtgcgtgctggacatgcggagcatggacttcaagagcaactccgccgtggcctggtccaacaagtccgatttcgcctgcgccaacgccttcaacaacagcattatccccgaggacacattcttcccaagcagcgacgtgccctgcgacgtgaagctggtggaaaagagcttcgagacagacaccaacctgaacttccagaacctgagcgtgatcggcttcagaatcctgctgctgaaagtggccggctttaacctgctgatgaccctgcggctgtggtccagccgcgccaagagaagcggatctggcgtgaagcagaccctgaatttcgacctgctgaagctggctggcgacgtggaatccaacccaggccctactagtaccatggactggatttggcgcatccttttccttgtcggcgctgctaccggcgcccattccgggcccgaagtgcaactggttgaatccggtggcggcctggtgcaacccggcggatctctcagacttagctgtgccgcctccggcagaaccttcacaatgggatggtacaggcaggctccagggaaagagagagagttcgtcgccgccatctctctgtctcccacactggcctactacgccgactctgtgaaaggccggttcaccatctccagagataatagcaagaacaccgtggtgctgcaaatgaactctctgagagccgaggatacagccctgtactattgtgccgctgaccggaagtccgtgatgagcatcagacccgattactggggacagggcacactggtcacagtgtctagtggatccggcggcggaggatctggcggaggcggatctgggggcggaggctctttcgaagaagtgcagctggttgaatcaggcggaggactggttcagcctggcggatctctgagactgtcttgtgccgccagcggctacaccttcaccaactactggatgaactgggtccgacaggcccctggcaaaggactggaatgggtcggaatgatcgaccccagcgacagcgagacacactacaaccacatcttcaaggaccgcttcaccatcagcgccgacaccagcaagaataccgcctacctccagatgaactccctgagagccgaggacaccgccgtgtactactgcgccagaaacctgtatctgtggggccagggaaccctggtcacagtgtcatctacgcgtgaggacctgaagaacgtgttcccacctgaggtggccgtgttcgagcctagcaaggccgagatcgcccacacccagaaagccaccctcgtgtgcctggctaccggcttctaccccgaccatgtggaactgtcttggtgggtcaacggcaaagaggtgcacagcggcgtgtgtaccgacccccagccactgaaagaacagcccgccctgaacgacagccggtactgcctgagcagcagactgagagtgtccgccaccttctggcagaacccccggaaccacttcagatgccaggtgcagttctacggcctgagcgagaacgacgagtggacccaggacagagccaagcccgtgacccagatcgtgtctgccgaagcctggggcagagccgattgcggcatcaccagcgccagctaccaccagggcgtgctgagcgccaccatcctgtacgagatcctgctgggcaaggccaccctgtacgccgtgctggtgtctgccctggtgctgatggctatggtcaagcggaaggacagccggggataa

SEQ ID NO: 37449 - DNA, 2688 bp, synthetic construct
  source 1..2688: mol_type = other DNA
atggccttaccagtgaccgccttgctcctgccgctggccttgctgctccacgccgccaggccggaagtgcagctggttgaatctggcggaggactggttcaggctggcggatctctgagactgtcttgtgccgccagcggcagaacctttagcatgggctggtttagacaggcccctggcaaagagagagagttcgtcgccgccatcacatactctggcggcagcccttactacgccgactctgtgaagggcagattcaccatcagccgggacaacgccaagaacaccgtgtacctccagatgaacagcctgaagcctgaggacaccgccgtgtactactgcgccgccaatccaacatacggcagcgactggaacgccgagaattggggccagggaacccaagtgacagtgtctagcggtaccggcggaggcggatctggcggcggaggtagcggtggcggaggatctgaattcgacatccagatgacacagagccctagcagcctgtctgccagcgtgggagacagagtgaccatcacatgcaagagcagccagagcctgctggactccgatggcaagacctacctgaactggtatcagcagaagcccggcaaggcccctaagctgctgatctacctggtgtccaagctggatagcggcgtgcccagcagattttctggcagcggcagcggaaccgacttcaccctgacaatatccagcctccagcctgaggacttcgccacctactactgcttccaaggcacccactttccattcaccttcggccagggcaccaaggtggaaatcaaaagactcgaggacctgaagaacgtgttcccacctgaggtggccgtgttcgagcctagcgaggccgagatcagccacacccagaaagccaccctcgtgtgcctggctaccggcttctaccccgaccatgtggaactgtcttggtgggtcaacggcaaagaggtgcacagcggcgtgtgtaccgacccccagccactgaaagaacagcccgccctgaacgacagccggtactgcctgagcagcagactgagagtgtccgccaccttctggcagaacccccggaaccacttcagatgccaggtgcagttctacggcctgagcgagaacgacgagtggacccaggacagagccaagcccgtgacccagatcgtgtctgccgaagcctggggcagagccgattgcggctttaccagcgagagctaccagcagggcgtgctgagcgccaccatcctgtacgagatcctgctgggcaaggccaccctgtacgccgtgctggtgtctgccctggtgctgatggctatggtcaagcggaaggacagccggggaagggccaagcgatctggatctggagcaacaaacttctcactactcaaacaagcaggtgacgtggaggagaatcccgggcctactagtgccaccatggactggatttggcgcatccttttccttgtcggcgctgctaccggcgcccattccgggcccgaagtgcaactggttgaatccggtggcggcctggtgcaagcaggcggatctctcagacttagctgtgccgcctccggcagaaccttcacaatgggatggtttaggcaggctccagggaaagagagagagttcgtcgccgccatctctctgtctcccacactggcctactacgccgactctgtgaaaggccggttcaccatctccagagataatgccaagaacaccgtggtgctgcaaatgaactctctgaaacccgaggatacagccctgtactattgtgccgctgaccggaagtccgtgatgagcatcagacccgattactggggacagggcacacaagtcacagtgtcctctggatccggcggcggaggatctggcggaggcggatctgggggcggaggctctttcgaagaagtgcagctggttgaatcaggcggaggactggttcagcctggcggatctctgagactgtcttgtgccgccagcggctacaccttcaccaactactggatgaactgggtccgacaggcccctggcaaaggactggaatgggtcggaatgatcgaccccagcgacagcgagacacactacaaccacatcttcaaggaccgcttcaccatcagcgccgacaccagcaagaataccgcctacctccagatgaactccctgagagccgaggacaccgccgtgtactactgcgccagaaacctgtatctgtggggccagggaaccctggtcacagtgtcatctacgcgtatccagaaccctgatcctgccgtgtaccagctgcgggatagcaagagcagcgacaagagcgtgtgtctgttcaccgacttcgacagccagaccaacgtgtcccagagcaaggactccgacgtgtacatcaccgataagtgcgtgctggacatgcggagcatggacttcaagagcaactccgccgtggcctggtccaacaagtccgatttcgcctgcgccaacgccttcaacaacagcattatccccgaggacacattcttcccaagccccgagagcagctgcgacgtgaagctggtggaaaagagcttcgagacagacaccaacctgaacttccagaacctgagcgtgatcggcttcagaatcctgctgctgaaagtggccggctttaacctgctgatgaccctgcggctgtggtccagctaa

SEQ ID NO: 37450 - DNA, 2301 bp, synthetic construct
  source 1..2301: mol_type = other DNA
atggccttaccagtgaccgccttgctcctgccgctggccttgctgctccacgccgccaggccggaagtgcagctggttgaatctggcggaggactggttcagcctggcggatctctgagactgagctgtgaagccagcggcttcgccagcgacgattacatcatcggctggttcagacaggcccctggcaaagagagagagggcgtcagctgcatcagctctaagtacgccaacaccgtgtacaccgacagcgtgaagggcagattcagactgagcagaggcaccgccaagaataccgtgtacctccagatgagcgccctgaagcctgaggataccgccgtgtactactgcgctatggacagccgcagagtgacatgccctgagatcagcaccatgcaccggaacttcgattcttggggccagggcacactggtcacagtgtcatctggtaccggcggaggcggatctggcggcggaggtagcggtggcggaggatctgaattcgacatccagatgacacagagccctagcagcctgtctgccagcgtgggagacagagtgaccatcacatgcaagagcagccagagcctgctggactccgatggcaagacctacctgaactggtatcagcagaagcccggcaaggcccctaagctgctgatctacctggtgtccaagctggatagcggcgtgcccagcagattttctggcagcggcagcggaaccgacttcaccctgacaatatccagcctccagcctgaggacttcgccacctactactgcttccaaggcacccactttccattcaccttcggccagggcaccaaggtggaaatcaaaagactcgaggacctgaagaacgtgttcccacctgaggtggccgtgttcgagcctagcaaggccgagatcgcccacacccagaaagccaccctcgtgtgcctggctaccggcttctaccccgaccatgtggaactgtcttggtgggtcaacggcaaagaggtgcacagcggcgtgtgtaccgacccccagccactgaaagaacagcccgccctgaacgacagccggtactgcctgagcagcagactgagagtgtccgccaccttctggcagaacccccggaaccacttcagatgccaggtgcagttctacggcctgagcgagaacgacgagtggacccaggacagagccaagcccgtgacccagatcgtgtctgccgaagcctggggcagagccgattgcggcatcaccagcgccagctaccaccagggcgtgctgagcgccaccatcctgtacgagatcctgctgggcaaggccaccctgtacgccgtgctggtgtctgccctggtgctgatggctatggtcaagcggaaggacagccggggaagggccaagcgatctggatctggagcaacaaacttctcactactcaaacaagcaggtgacgtggaggagaatcccgggcctactagtatggactggatttggcgcatccttttccttgtcggcgctgctaccggcgcgcattccttcgaagaagtgcagctggttgaatcaggcggaggactggttcagcctggcggatctctgagactgtcttgtgccgccagcggctacaccttcaccaactactggatgaactgggtccgacaggcccctggcaaaggactggaatgggtcggaatgatcgaccccagcgacagcgagacacactacaaccacatcttcaaggaccgcttcaccatcagcgccgacaccagcaagaataccgcctacctccagatgaactccctgagagccgaggacaccgccgtgtactactgcgccagaaacctgtatctgtggggccagggaaccctggtcacagtgtcatctacgcgtatccagaaccctgatcctgccgtgtaccagctgcgggatagcaagagcagcgacaagagcgtgtgtctgttcaccgacttcgacagccagaccaacgtgtcccagagcaaggactccgacgtgtacatcaccgataagtgcgtgctggacatgcggagcatggacttcaagagcaactccgccgtggcctggtccaacaagtccgatttcgcctgcgccaacgccttcaacaacagcattatccccgaggacacattcttcccaagcagcgacgtgccctgcgacgtgaagctggtggaaaagagcttcgagacagacaccaacctgaacttccagaacctgagcgtgatcggcttcagaatcctgctgctgaaagtggccggctttaacctgctgatgaccctgcggctgtggtccagctaa

SEQ ID NO: 37451 - DNA, 2274 bp, synthetic construct
  source 1..2274: mol_type = other DNA
atggccttaccagtgaccgccttgctcctgccgctggccttgctgctccacgccgccaggccggacatccagatgacacagagccctagcagcctgtctgccagcgtgggagacagagtgaccatcacatgcaagagcagccagagcctgctggactccgatggcaagacctacctgaactggtatcagcagaagcccggcaaggcccctaagctgctgatctacctggtgtccaagctggatagcggcgtgcccagcagattttctggcagcggcagcggaaccgacttcaccctgacaatatccagcctccagcctgaggacttcgccacctactactgcttccaaggcacccactttccattcaccttcggccagggcaccaaggtggaaatcaaaagactcgaggacctgaagaacgtgttcccacctgaggtggccgtgttcgagcctagcgaggccgagatcagccacacccagaaagccaccctcgtgtgcctggctaccggcttctaccccgaccatgtggaactgtcttggtgggtcaacggcaaagaggtgcacagcggcgtgtgtaccgacccccagccactgaaagaacagcccgccctgaacgacagccggtactgcctgagcagcagactgagagtgtccgccaccttctggcagaacccccggaaccacttcagatgccaggtgcagttctacggcctgagcgagaacgacgagtggacccaggacagagccaagcccgtgacccagatcgtgtctgccgaagcctggggcagagccgattgcggctttaccagcgagagctaccagcagggcgtgctgagcgccaccatcctgtacgagatcctgctgggcaaggccaccctgtacgccgtgctggtgtctgccctggtgctgatggctatggtcaagcggaaggacagccggggaagggccaagcgatctggatctggagcaacaaacttctcactactcaaacaagcaggtgacgtggaggagaatcccgggcctactagtaccatggactggatttggcgcatccttttccttgtcggcgctgctaccggcgcccattccgggcccgaagtgcaactggttgaatccggtggcggcctggtgcaacccggcggatctctcagacttagctgtgccgcctccggcagaaccttcacaatgggatggtacaggcaggctccagggaaagagagagagttcgtcgccgccatctctctgtctcccacactggcctactacgccgactctgtgaaaggccggttcaccatctccagagataatagcaagaacaccgtggtgctgcaaatgaactctctgagagccgaggatacagccctgtactattgtgccgctgaccggaagtccgtgatgagcatcagacccgattactggggacagggcacactggtcacagtgtctagtggatccggcggcggaggatctggcggaggcggatctgggggcggaggctctttcgaagaagtgcagctggttgaatcaggcggaggactggttcagcctggcggatctctgagactgtcttgtgccgccagcggctacaccttcaccaactactggatgaactgggtccgacaggcccctggcaaaggactggaatgggtcggaatgatcgaccccagcgacagcgagacacactacaaccacatcttcaaggaccgcttcaccatcagcgccgacaccagcaagaataccgcctacctccagatgaactccctgagagccgaggacaccgccgtgtactactgcgccagaaacctgtatctgtggggccagggaaccctggtcacagtgtcatctacgcgtatccagaaccctgatcctgccgtgtaccagctgcgggatagcaagagcagcgacaagagcgtgtgtctgttcaccgacttcgacagccagaccaacgtgtcccagagcaaggactccgacgtgtacatcaccgataagtgcgtgctggacatgcggagcatggacttcaagagcaactccgccgtggcctggtccaacaagtccgatttcgcctgcgccaacgccttcaacaacagcattatccccgaggacacattcttcccaagccccgagagcagctgcgacgtgaagctggtggaaaagagcttcgagacagacaccaacctgaacttccagaacctgagcgtgatcggcttcagaatcctgctgctgaaagtggccggctttaacctgctgatgaccctgcggctgtggtccagctaa

SEQ ID NO: 37452 - DNA, 2292 bp, synthetic construct
  source 1..2292: mol_type = other DNA
atggccttaccagtgaccgccttgctcctgccgctggccttgctgctccacgccgccaggccggacatccagatgacacagagccctagcagcctgtctgccagcgtgggagacagagtgaccatcacatgcaagagcagccagagcctgctggactccgatggcaagacctacctgaactggtatcagcagaagcccggcaaggcccctaagctgctgatctacctggtgtccaagctggatagcggcgtgcccagcagattttctggcagcggcagcggaaccgacttcaccctgacaatatccagcctccagcctgaggacttcgccacctactactgcttccaaggcacccactttccattcaccttcggccagggcaccaaggtggaaatcaaaagactcgaggacctgaagaacgtgttcccacctgaggtggccgtgttcgagcctagcgaggccgagatcagccacacccagaaagccaccctcgtgtgcctggctaccggcttctaccccgaccatgtggaactgtcttggtgggtcaacggcaaagaggtgcacagcggcgtgtgtaccgacccccagccactgaaagaacagcccgccctgaacgacagccggtactgcctgagcagcagactgagagtgtccgccaccttctggcagaacccccggaaccacttcagatgccaggtgcagttctacggcctgagcgagaacgacgagtggacccaggacagagccaagcccgtgacccagatcgtgtctgccgaagcctggggcagagccgattgcggctttaccagcgagagctaccagcagggcgtgctgagcgccaccatcctgtacgagatcctgctgggcaaggccaccctgtacgccgtgctggtgtctgccctggtgctgatggctatggtcaagcggaaggacagccggggaagggccaagcgatctggatctggagcaacaaacttctcactactcaaacaagcaggtgacgtggaggagaatcccgggcctactagtaccatggactggatttggcgcatccttttccttgtcggcgctgctaccggcgcccattccgggccccaggtgcagctggttgaatctggcggaggactggttcagcctggcggatctctgagactgtcttgtgccgccagcggcaacatcaacagcagaaactgcatgggctggttcagacaggcccctggcaagggaagagaaggcgtggcagctatcggccaagtgaccggcagaacctactacgtggacagcgtgaagggcagattcaccatcagcctggacaacagcaagaacaccctgtacctccagatgaacagcctgagagccgaggacaccgccgtgtactattgtgctgctgcccctggctgtctgctgtctgcacttagaagcgccgactacagaaactggggccagggcacactggtcaccgtttcttctggatccggcggcggaggatctggcggaggcggatctgggggcggaggctctttcgaagaagtgcagctggttgaatcaggcggaggactggttcagcctggcggatctctgagactgtcttgtgccgccagcggctacaccttcaccaactactggatgaactgggtccgacaggcccctggcaaaggactggaatgggtcggaatgatcgaccccagcgacagcgagacacactacaaccacatcttcaaggaccgcttcaccatcagcgccgacaccagcaagaataccgcctacctccagatgaactccctgagagccgaggacaccgccgtgtactactgcgccagaaacctgtatctgtggggccagggaaccctggtcacagtgtcatctacgcgtatccagaaccctgatcctgccgtgtaccagctgcgggatagcaagagcagcgacaagagcgtgtgtctgttcaccgacttcgacagccagaccaacgtgtcccagagcaaggactccgacgtgtacatcaccgataagtgcgtgctggacatgcggagcatggacttcaagagcaactccgccgtggcctggtccaacaagtccgatttcgcctgcgccaacgccttcaacaacagcattatccccgaggacacattcttcccaagccccgagagcagctgcgacgtgaagctggtggaaaagagcttcgagacagacaccaacctgaacttccagaacctgagcgtgatcggcttcagaatcctgctgctgaaagtggccggctttaacctgctgatgaccctgcggctgtggtccagc

SEQ ID NO: 37453 - DNA, 2295 bp, synthetic construct
  source 1..2295: mol_type = other DNA
atggccttaccagtgaccgccttgctcctgccgctggccttgctgctccacgccgccaggccggacatccagatgacacagagccctagcagcctgtctgccagcgtgggagacagagtgaccatcacatgcaagagcagccagagcctgctggactccgatggcaagacctacctgaactggtatcagcagaagcccggcaaggcccctaagctgctgatctacctggtgtccaagctggatagcggcgtgcccagcagattttctggcagcggcagcggaaccgacttcaccctgacaatatccagcctccagcctgaggacttcgccacctactactgcttccaaggcacccactttccattcaccttcggccagggcaccaaggtggaaatcaaaagactcgaggacctgaagaacgtgttcccacctgaggtggccgtgttcgagcctagcgaggccgagatcagccacacccagaaagccaccctcgtgtgcctggctaccggcttctaccccgaccatgtggaactgtcttggtgggtcaacggcaaagaggtgcacagcggcgtgtgtaccgacccccagccactgaaagaacagcccgccctgaacgacagccggtactgcctgagcagcagactgagagtgtccgccaccttctggcagaacccccggaaccacttcagatgccaggtgcagttctacggcctgagcgagaacgacgagtggacccaggacagagccaagcccgtgacccagatcgtgtctgccgaagcctggggcagagccgattgcggctttaccagcgagagctaccagcagggcgtgctgagcgccaccatcctgtacgagatcctgctgggcaaggccaccctgtacgccgtgctggtgtctgccctggtgctgatggctatggtcaagcggaaggacagccggggaagggccaagcgatctggatctggagcaacaaacttctcactactcaaacaagcaggtgacgtggaggagaatcccgggcctactagtaccatggactggatttggcgcatccttttccttgtcggcgctgctaccggcgcccattccgggccccaggtgcagctggttgaatctggcggaggatctgttcaggctggcggctctctgagactgtcttgtggcgcttccggcaacatcagcagcagaaactgcatgggctggttcagacaggcccctggcaaagagagagaaggcgttgccgccatcggacaagtgaccggcagatcctactacgtggacagcgtgaagggcagattcaccatcagcctggacaacgccaagaacaccctgtacctccagatgaacacactgaagcccgaggacaccgccatgtactactgtgctgctgcccctggctgtctgctgtctgcacttagaagcgccgactacagaaactggggccagggaacccaagtgacagtgtctagtggatccggcggcggaggatctggcggaggcggatctgggggcggaggctctttcgaagaagtgcagctggttgaatcaggcggaggactggttcagcctggcggatctctgagactgtcttgtgccgccagcggctacaccttcaccaactactggatgaactgggtccgacaggcccctggcaaaggactggaatgggtcggaatgatcgaccccagcgacagcgagacacactacaaccacatcttcaaggaccgcttcaccatcagcgccgacaccagcaagaataccgcctacctccagatgaactccctgagagccgaggacaccgccgtgtactactgcgccagaaacctgtatctgtggggccagggaaccctggtcacagtgtcatctacgcgtatccagaaccctgatcctgccgtgtaccagctgcgggatagcaagagcagcgacaagagcgtgtgtctgttcaccgacttcgacagccagaccaacgtgtcccagagcaaggactccgacgtgtacatcaccgataagtgcgtgctggacatgcggagcatggacttcaagagcaactccgccgtggcctggtccaacaagtccgatttcgcctgcgccaacgccttcaacaacagcattatccccgaggacacattcttcccaagccccgagagcagctgcgacgtgaagctggtggaaaagagcttcgagacagacaccaacctgaacttccagaacctgagcgtgatcggcttcagaatcctgctgctgaaagtggccggctttaacctgctgatgaccctgcggctgtggtccagctaa

SEQ ID NO: 37454 - DNA, 2718 bp, synthetic construct
  source 1..2718: mol_type = other DNA
atggccttaccagtgaccgccttgctcctgccgctggccttgctgctccacgccgccaggccggaagtgcagctggttgaatctggcggaggactggttcaggctggcggatctctgagactgtcttgtgccgccagcggcagaacctttagcatgggctggtttagacaggcccctggcaaagagagagagttcgtcgccgccatcacatactctggcggcagcccttactacgccgactctgtgaagggcagattcaccatcagccgggacaacgccaagaacaccgtgtacctccagatgaacagcctgaagcctgaggacaccgccgtgtactactgcgccgccaatccaacatacggcagcgactggaacgccgagaattggggccagggaacccaagtgacagtgtctagcggtaccggcggaggcggatctggcggcggaggtagcggtggcggaggatctgaattcgacatccagatgacacagagccctagcagcctgtctgccagcgtgggagacagagtgaccatcacatgcaagagcagccagagcctgctggactccgatggcaagacctacctgaactggtatcagcagaagcccggcaaggcccctaagctgctgatctacctggtgtccaagctggatagcggcgtgcccagcagattttctggcagcggcagcggaaccgacttcaccctgacaatatccagcctccagcctgaggacttcgccacctactactgcttccaaggcacccactttccattcaccttcggccagggcaccaaggtggaaatcaaaagactcgagatccagaaccctgatcctgccgtgtaccagctgcgggatagcaagagcagcgacaagagcgtgtgtctgttcaccgacttcgacagccagaccaacgtgtcccagagcaaggactccgacgtgtacatcaccgataagtgcgtgctggacatgcggagcatggacttcaagagcaactccgccgtggcctggtccaacaagtccgatttcgcctgcgccaacgccttcaacaacagcattatccccgaggacacattcttcccaagcagcgacgtgccctgcgacgtgaagctggtggaaaagagcttcgagacagacaccaacctgaacttccagaacctgagcgtgatcggcttcagaatcctgctgctgaaagtggccggctttaacctgctgatgaccctgcggctgtggtccagccgcgccaagagaagcggatctggcgtgaagcagaccctgaatttcgacctgctgaagctggctggcgacgtggaatccaacccaggccctactagtaccatggactggatttggcgcatccttttccttgtcggcgctgctaccggcgcccattccgggccccaggtgcagctggttgaatctggcggaggatctgttcaggctggcggctctctgagactgtcttgtggcgcttccggcaacatcagcagcagaaactgcatgggctggttcagacaggcccctggcaaagagagagaaggcgttgccgccatcggacaagtgaccggcagatcctactacgtggacagcgtgaagggcagattcaccatcagcctggacaacgccaagaacaccctgtacctccagatgaacacactgaagcccgaggacaccgccatgtactactgtgctgctgcccctggctgtctgctgtctgcacttagaagcgccgactacagaaactggggccagggaacccaagtgacagtgtctagtggatccggcggcggaggatctggcggaggcggatctgggggcggaggctctttcgaagaagtgcagctggttgaatcaggcggaggactggttcagcctggcggatctctgagactgtcttgtgccgccagcggctacaccttcaccaactactggatgaactgggtccgacaggcccctggcaaaggactggaatgggtcggaatgatcgaccccagcgacagcgagacacactacaaccacatcttcaaggaccgcttcaccatcagcgccgacaccagcaagaataccgcctacctccagatgaactccctgagagccgaggacaccgccgtgtactactgcgccagaaacctgtatctgtggggccagggaaccctggtcacagtgtcatctacgcgtgaggacctgaagaacgtgttcccacctgaggtggccgtgttcgagcctagcaaggccgagatcgcccacacccagaaagccaccctcgtgtgcctggctaccggcttctaccccgaccatgtggaactgtcttggtgggtcaacggcaaagaggtgcacagcggcgtgtgtaccgacccccagccactgaaagaacagcccgccctgaacgacagccggtactgcctgagcagcagactgagagtgtccgccaccttctggcagaacccccggaaccacttcagatgccaggtgcagttctacggcctgagcgagaacgacgagtggacccaggacagagccaagcccgtgacccagatcgtgtctgccgaagcctggggcagagccgattgcggcatcaccagcgccagctaccaccagggcgtgctgagcgccaccatcctgtacgagatcctgctgggcaaggccaccctgtacgccgtgctggtgtctgccctggtgctgatggctatggtcaagcggaaggacagccggggataa

SEQ ID NO: 37455 - DNA, 2709 bp, synthetic construct
  source 1..2709: mol_type = other DNA
atggccttaccagtgaccgccttgctcctgccgctggccttgctgctccacgccgccaggccgcaggtgcagctggttgaatctggcggaggatctgttcaggctggcggctctctgagactgtcttgtggcgcttccggcaacatcagcagcagaaactgcatgggctggttcagacaggcccctggcaaagagagagaaggcgttgccgccatcggacaagtgaccggcagatcctactacgtggacagcgtgaagggcagattcaccatcagcctggacaacgccaagaacaccctgtacctccagatgaacacactgaagcccgaggacaccgccatgtactactgtgctgctgcccctggctgtctgctgtctgcacttagaagcgccgactacagaaactggggccagggaacccaagtgacagtgtctagtggtaccggcggaggcggatctggcggcggaggtagcggtggcggaggatctgaattcgacatccagatgacacagagccctagcagcctgtctgccagcgtgggagacagagtgaccatcacatgcaagagcagccagagcctgctggactccgatggcaagacctacctgaactggtatcagcagaagcccggcaaggcccctaagctgctgatctacctggtgtccaagctggatagcggcgtgcccagcagattttctggcagcggcagcggaaccgacttcaccctgacaatatccagcctccagcctgaggacttcgccacctactactgcttccaaggcacccactttccattcaccttcggccagggcaccaaggtggaaatcaaaagactcgaggacctgaagaacgtgttcccacctgaggtggccgtgttcgagcctagcgaggccgagatcagccacacccagaaagccaccctcgtgtgcctggctaccggcttctaccccgaccatgtggaactgtcttggtgggtcaacggcaaagaggtgcacagcggcgtgtgtaccgacccccagccactgaaagaacagcccgccctgaacgacagccggtactgcctgagcagcagactgagagtgtccgccaccttctggcagaacccccggaaccacttcagatgccaggtgcagttctacggcctgagcgagaacgacgagtggacccaggacagagccaagcccgtgacccagatcgtgtctgccgaagcctggggcagagccgattgcggctttaccagcgagagctaccagcagggcgtgctgagcgccaccatcctgtacgagatcctgctgggcaaggccaccctgtacgccgtgctggtgtctgccctggtgctgatggctatggtcaagcggaaggacagccggggaagggccaagcgatctggatctggagcaacaaacttctcactactcaaacaagcaggtgacgtggaggagaatcccgggcctactagtgccaccatggactggatttggcgcatccttttccttgtcggcgctgctaccggcgcccattccgggcccgaagtgcaactggttgaatccggtggcggcctggtgcaagcaggcggatctctcagacttagctgtgccgcctccggcagaaccttcacaatgggatggtttaggcaggctccagggaaagagagagagttcgtcgccgccatctctctgtctcccacactggcctactacgccgactctgtgaaaggccggttcaccatctccagagataatgccaagaacaccgtggtgctgcaaatgaactctctgaaacccgaggatacagccctgtactattgtgccgctgaccggaagtccgtgatgagcatcagacccgattactggggacagggcacacaagtcacagtgtcctctggatccggcggcggaggatctggcggaggcggatctgggggcggaggctctttcgaagaagtgcagctggttgaatcaggcggaggactggttcagcctggcggatctctgagactgtcttgtgccgccagcggctacaccttcaccaactactggatgaactgggtccgacaggcccctggcaaaggactggaatgggtcggaatgatcgaccccagcgacagcgagacacactacaaccacatcttcaaggaccgcttcaccatcagcgccgacaccagcaagaataccgcctacctccagatgaactccctgagagccgaggacaccgccgtgtactactgcgccagaaacctgtatctgtggggccagggaaccctggtcacagtgtcatctacgcgtatccagaaccctgatcctgccgtgtaccagctgcgggatagcaagagcagcgacaagagcgtgtgtctgttcaccgacttcgacagccagaccaacgtgtcccagagcaaggactccgacgtgtacatcaccgataagtgcgtgctggacatgcggagcatggacttcaagagcaactccgccgtggcctggtccaacaagtccgatttcgcctgcgccaacgccttcaacaacagcattatccccgaggacacattcttcccaagccccgagagcagctgcgacgtgaagctggtggaaaagagcttcgagacagacaccaacctgaacttccagaacctgagcgtgatcggcttcagaatcctgctgctgaaagtggccggctttaacctgctgatgaccctgcggctgtggtccagctaa

SEQ ID NO: 37456 - DNA, 2298 bp, synthetic construct
  source 1..2298: mol_type = other DNA
atggccttaccagtgaccgccttgctcctgccgctggccttgctgctccacgccgccaggccgcaggtgcagctggttgaatctggcggaggatctgttcaggctggcggctctctgagactgtcttgtggcgcttccggcaacatcagcagcagaaactgcatgggctggttcagacaggcccctggcaaagagagagaaggcgttgccgccatcggacaagtgaccggcagatcctactacgtggacagcgtgaagggcagattcaccatcagcctggacaacgccaagaacaccctgtacctccagatgaacacactgaagcccgaggacaccgccatgtactactgtgctgctgcccctggctgtctgctgtctgcacttagaagcgccgactacagaaactggggccagggaacccaagtgacagtgtctagtggtaccggcggaggcggatctggcggcggaggtagcggtggcggaggatctgaattcgacatccagatgacacagagccctagcagcctgtctgccagcgtgggagacagagtgaccatcacatgcaagagcagccagagcctgctggactccgatggcaagacctacctgaactggtatcagcagaagcccggcaaggcccctaagctgctgatctacctggtgtccaagctggatagcggcgtgcccagcagattttctggcagcggcagcggaaccgacttcaccctgacaatatccagcctccagcctgaggacttcgccacctactactgcttccaaggcacccactttccattcaccttcggccagggcaccaaggtggaaatcaaaagactcgaggacctgaagaacgtgttcccacctgaggtggccgtgttcgagcctagcgaggccgagatcagccacacccagaaagccaccctcgtgtgcctggctaccggcttctaccccgaccatgtggaactgtcttggtgggtcaacggcaaagaggtgcacagcggcgtgtgtaccgacccccagccactgaaagaacagcccgccctgaacgacagccggtactgcctgagcagcagactgagagtgtccgccaccttctggcagaacccccggaaccacttcagatgccaggtgcagttctacggcctgagcgagaacgacgagtggacccaggacagagccaagcccgtgacccagatcgtgtctgccgaagcctggggcagagccgattgcggctttaccagcgagagctaccagcagggcgtgctgagcgccaccatcctgtacgagatcctgctgggcaaggccaccctgtacgccgtgctggtgtctgccctggtgctgatggctatggtcaagcggaaggacagccggggaagggccaagcgatctggatctggagcaacaaacttctcactactcaaacaagcaggtgacgtggaggagaatcccgggcctactagtgccaccatggactggatttggcgcatccttttccttgtcggcgctgctaccggcgcccattccttcgaagaagtgcagctggttgaatcaggcggaggactggttcagcctggcggatctctgagactgtcttgtgccgccagcggctacaccttcaccaactactggatgaactgggtccgacaggcccctggcaaaggactggaatgggtcggaatgatcgaccccagcgacagcgagacacactacaaccacatcttcaaggaccgcttcaccatcagcgccgacaccagcaagaataccgcctacctccagatgaactccctgagagccgaggacaccgccgtgtactactgcgccagaaacctgtatctgtggggccagggaaccctggtcacagtgtcatctacgcgtatccagaaccctgatcctgccgtgtaccagctgcgggatagcaagagcagcgacaagagcgtgtgtctgttcaccgacttcgacagccagaccaacgtgtcccagagcaaggactccgacgtgtacatcaccgataagtgcgtgctggacatgcggagcatggacttcaagagcaactccgccgtggcctggtccaacaagtccgatttcgcctgcgccaacgccttcaacaacagcattatccccgaggacacattcttcccaagccccgagagcagctgcgacgtgaagctggtggaaaagagcttcgagacagacaccaacctgaacttccagaacctgagcgtgatcggcttcagaatcctgctgctgaaagtggccggctttaacctgctgatgaccctgcggctgtggtccagctaa

SEQ ID NO: 37457 - DNA, 2298 bp, synthetic construct
  source 1..2298: mol_type = other DNA
atggccttaccagtgaccgccttgctcctgccgctggccttgctgctccacgccgccaggccgcaagttcagctggtggaaagcggtggtggcgttgtgcaacctggtggaagtctgaggctgagctgtgccgcttctggcctgagctttagcacctacactgtggcctggttcaggcaggctcccggaaagggtcttgaaggcgtggccgccattccttacaccagccagcacatggtgtacacagacagcgtcagaggccggttcaccatcagcagagacaactccaagaatacgctctatctccagatgaactctctgcgcgccgaagatacagccgtgtattactgcgccaccgacagacggcctggcacctctatgctggctatcaacggctacaacagatggggacagggaaccaccgtgaccgtgtcatctggtaccggcggaggcggatctggcggcggaggtagcggtggcggaggatctgaattcgacatccagatgacacagagccctagcagcctgtctgccagcgtgggagacagagtgaccatcacatgcaagagcagccagagcctgctggactccgatggcaagacctacctgaactggtatcagcagaagcccggcaaggcccctaagctgctgatctacctggtgtccaagctggatagcggcgtgcccagcagattttctggcagcggcagcggaaccgacttcaccctgacaatatccagcctccagcctgaggacttcgccacctactactgcttccaaggcacccactttccattcaccttcggccagggcaccaaggtggaaatcaaaagactcgaggacctgaagaacgtgttcccacctgaggtggccgtgttcgagcctagcgaggccgagatcagccacacccagaaagccaccctcgtgtgcctggctaccggcttctaccccgaccatgtggaactgtcttggtgggtcaacggcaaagaggtgcacagcggcgtgtgtaccgacccccagccactgaaagaacagcccgccctgaacgacagccggtactgcctgagcagcagactgagagtgtccgccaccttctggcagaacccccggaaccacttcagatgccaggtgcagttctacggcctgagcgagaacgacgagtggacccaggacagagccaagcccgtgacccagatcgtgtctgccgaagcctggggcagagccgattgcggctttaccagcgagagctaccagcagggcgtgctgagcgccaccatcctgtacgagatcctgctgggcaaggccaccctgtacgccgtgctggtgtctgccctggtgctgatggctatggtcaagcggaaggacagccggggaagggccaagcgatctggatctggagcaacaaacttctcactactcaaacaagcaggtgacgtggaggagaatcccgggcctactagtgccaccatggactggatttggcgcatccttttccttgtcggcgctgctaccggcgcccattccttcgaagaagtgcagctggttgaatcaggcggaggactggttcagcctggcggatctctgagactgtcttgtgccgccagcggctacaccttcaccaactactggatgaactgggtccgacaggcccctggcaaaggactggaatgggtcggaatgatcgaccccagcgacagcgagacacactacaaccacatcttcaaggaccgcttcaccatcagcgccgacaccagcaagaataccgcctacctccagatgaactccctgagagccgaggacaccgccgtgtactactgcgccagaaacctgtatctgtggggccagggaaccctggtcacagtgtcatctacgcgtatccagaaccctgatcctgccgtgtaccagctgcgggatagcaagagcagcgacaagagcgtgtgtctgttcaccgacttcgacagccagaccaacgtgtcccagagcaaggactccgacgtgtacatcaccgataagtgcgtgctggacatgcggagcatggacttcaagagcaactccgccgtggcctggtccaacaagtccgatttcgcctgcgccaacgccttcaacaacagcattatccccgaggacacattcttcccaagccccgagagcagctgcgacgtgaagctggtggaaaagagcttcgagacagacaccaacctgaacttccagaacctgagcgtgatcggcttcagaatcctgctgctgaaagtggccggctttaacctgctgatgaccctgcggctgtggtccagctaa

SEQ ID NO: 37458 - DNA, 2295 bp, synthetic construct
  source 1..2295: mol_type = other DNA
atggccttaccagtgaccgccttgctcctgccgctggccttgctgctccacgccgccaggccggacatccagatgacacagagccctagcagcctgtctgccagcgtgggagacagagtgaccatcacatgcaagagcagccagagcctgctggactccgatggcaagacctacctgaactggtatcagcagaagcccggcaaggcccctaagctgctgatctacctggtgtccaagctggatagcggcgtgcccagcagattttctggcagcggcagcggaaccgacttcaccctgacaatatccagcctccagcctgaggacttcgccacctactactgcttccaaggcacccactttccattcaccttcggccagggcaccaaggtggaaatcaaaagactcgaggacctgaagaacgtgttcccacctgaggtggccgtgttcgagcctagcgaggccgagatcagccacacccagaaagccaccctcgtgtgcctggctaccggcttctaccccgaccatgtggaactgtcttggtgggtcaacggcaaagaggtgcacagcggcgtgtgtaccgacccccagccactgaaagaacagcccgccctgaacgacagccggtactgcctgagcagcagactgagagtgtccgccaccttctggcagaacccccggaaccacttcagatgccaggtgcagttctacggcctgagcgagaacgacgagtggacccaggacagagccaagcccgtgacccagatcgtgtctgccgaagcctggggcagagccgattgcggctttaccagcgagagctaccagcagggcgtgctgagcgccaccatcctgtacgagatcctgctgggcaaggccaccctgtacgccgtgctggtgtctgccctggtgctgatggctatggtcaagcggaaggacagccggggaagggccaagcgatctggatctggagcaacaaacttctcactactcaaacaagcaggtgacgtggaggagaatcccgggcctactagtaccatggactggatttggcgcatccttttccttgtcggcgctgctaccggcgcccattccgggccccaagttcagctggtggaaagcggtggtggcgttgtgcaacctggtggaagtctgaggctgagctgtgccgcttctggcctgagctttagcacctacactgtggcctggttcaggcaggctcccggaaagggtcttgaaggcgtggccgccattccttacaccagccagcacatggtgtacacagacagcgtcagaggccggttcaccatcagcagagacaactccaagaatacgctctatctccagatgaactctctgcgcgccgaagatacagccgtgtattactgcgccaccgacagacggcctggcacctctatgctggctatcaacggctacaacagatggggacagggaaccaccgtgaccgtgtcatctggatccggcggcggaggatctggcggaggcggatctgggggcggaggctctttcgaagaagtgcagctggttgaatcaggcggaggactggttcagcctggcggatctctgagactgtcttgtgccgccagcggctacaccttcaccaactactggatgaactgggtccgacaggcccctggcaaaggactggaatgggtcggaatgatcgaccccagcgacagcgagacacactacaaccacatcttcaaggaccgcttcaccatcagcgccgacaccagcaagaataccgcctacctccagatgaactccctgagagccgaggacaccgccgtgtactactgcgccagaaacctgtatctgtggggccagggaaccctggtcacagtgtcatctacgcgtatccagaaccctgatcctgccgtgtaccagctgcgggatagcaagagcagcgacaagagcgtgtgtctgttcaccgacttcgacagccagaccaacgtgtcccagagcaaggactccgacgtgtacatcaccgataagtgcgtgctggacatgcggagcatggacttcaagagcaactccgccgtggcctggtccaacaagtccgatttcgcctgcgccaacgccttcaacaacagcattatccccgaggacacattcttcccaagccccgagagcagctgcgacgtgaagctggtggaaaagagcttcgagacagacaccaacctgaacttccagaacctgagcgtgatcggcttcagaatcctgctgctgaaagtggccggctttaacctgctgatgaccctgcggctgtggtccagctaa

SEQ ID NO: 37459 - DNA, 2301 bp, synthetic construct
  source 1..2301: mol_type = other DNA
atggccttaccagtgaccgccttgctcctgccgctggccttgctgctccacgccgccaggccggacatccagatgacacagagccctagcagcctgtctgccagcgtgggagacagagtgaccatcacatgcaagagcagccagagcctgctggactccgatggcaagacctacctgaactggtatcagcagaagcccggcaaggcccctaagctgctgatctacctggtgtccaagctggatagcggcgtgcccagcagattttctggcagcggcagcggaaccgacttcaccctgacaatatccagcctccagcctgaggacttcgccacctactactgcttccaaggcacccactttccattcaccttcggccagggcaccaaggtggaaatcaaaagactcgaggacctgaagaacgtgttcccacctgaggtggccgtgttcgagcctagcgaggccgagatcagccacacccagaaagccaccctcgtgtgcctggctaccggcttctaccccgaccatgtggaactgtcttggtgggtcaacggcaaagaggtgcacagcggcgtgtgtaccgacccccagccactgaaagaacagcccgccctgaacgacagccggtactgcctgagcagcagactgagagtgtccgccaccttctggcagaacccccggaaccacttcagatgccaggtgcagttctacggcctgagcgagaacgacgagtggacccaggacagagccaagcccgtgacccagatcgtgtctgccgaagcctggggcagagccgattgcggctttaccagcgagagctaccagcagggcgtgctgagcgccaccatcctgtacgagatcctgctgggcaaggccaccctgtacgccgtgctggtgtctgccctggtgctgatggctatggtcaagcggaaggacagccggggaagggccaagcgatctggatctggagcaacaaacttctcactactcaaacaagcaggtgacgtggaggagaatcccgggcctactagtaccatggactggatttggcgcatccttttccttgtcggcgctgctaccggcgcccattccgggcccgaggtgcagctggttgaatctggcggaggatctgttcaggctggcggctctctgagactgtcttgtgccgccagcggctacacctacagcatcaactgcatgggctggttcagacaggcccctggcaaagagagagaaggcgttgccgccatctctaccggcggaggcagaaccgattaccgggattctgtgaagggcagattcaccatcagccaggacaacgccaagaacaccgtgtacctccagatgaacagcctgaagcctgaggacaccgccatgtactactgtgccggcaagaccacctatcctggctacggatgtggcctgggcagaagcgcctacaattattggggccagggcacccaagtgaccgtgtcatctggatccggcggcggaggatctggcggaggcggatctgggggcggaggctctttcgaagaagtgcagctggttgaatcaggcggaggactggttcagcctggcggatctctgagactgtcttgtgccgccagcggctacaccttcaccaactactggatgaactgggtccgacaggcccctggcaaaggactggaatgggtcggaatgatcgaccccagcgacagcgagacacactacaaccacatcttcaaggaccgcttcaccatcagcgccgacaccagcaagaataccgcctacctccagatgaactccctgagagccgaggacaccgccgtgtactactgcgccagaaacctgtatctgtggggccagggaaccctggtcacagtgtcatctacgcgtatccagaaccctgatcctgccgtgtaccagctgcgggatagcaagagcagcgacaagagcgtgtgtctgttcaccgacttcgacagccagaccaacgtgtcccagagcaaggactccgacgtgtacatcaccgataagtgcgtgctggacatgcggagcatggacttcaagagcaactccgccgtggcctggtccaacaagtccgatttcgcctgcgccaacgccttcaacaacagcattatccccgaggacacattcttcccaagccccgagagcagctgcgacgtgaagctggtggaaaagagcttcgagacagacaccaacctgaacttccagaacctgagcgtgatcggcttcagaatcctgctgctgaaagtggccggctttaacctgctgatgaccctgcggctgtggtccagctaa

SEQ ID NO: 37460 - DNA, 1857 bp, synthetic construct
  source 1..1857: mol_type = other DNA
atggccttaccagtgaccgccttgctcctgccgctggccttgctgctccacgccgccaggccggacatccagatgacacagagccctagcagcctgtctgccagcgtgggagacagagtgaccatcacatgcaagagcagccagagcctgctggactccgatggcaagacctacctgaactggtatcagcagaagcccggcaaggcccctaagctgctgatctacctggtgtccaagctggatagcggcgtgcccagcagattttctggcagcggcagcggaaccgacttcaccctgacaatatccagcctccagcctgaggacttcgccacctactactgcttccaaggcacccactttccattcaccttcggccagggcaccaaggtggaaatcaaaagactcgaggacctgaagcacgtgttcccacctgaggtggccgtgttcgagcctagcgacgccgagatctggcacacccagaaagccaccctcgtgtgcctggctaccggcttctaccccgaccatgtggaactgtcttggtgggtcaacggcaaagaggtgcacagcggcgtgtctaccgacccccagccactgaaagaacagcccgccctgaacgacagccggtactgcctgagcagcagactgagagtgtccgccaccttctggcagaacccccggaaccacttcagatgccaggtgcagttctacggcctgagcgagaacgacgagtggacccaggacagagccaagcccgtgacccagatcgtgtctgccgaagcctggggcagagccgattgcggctttaccagcgagagctaccagcagggcgtgctgagcgccaccatcctgtacgagatcctgctgggcaaggccaccctgtacgccgtgctggtgtctgccctggtgctgatggctatggtcaagcggaaggacagccggggaagggccaagcgatctggatctggagcaacaaacttctcactactcaaacaagcaggtgacgtggaggagaatcccgggcctactagtatggactggatttggcgcatccttttccttgtcggcgctgctaccggcgcgcattccttcgaagaagtgcagctggttgaatcaggcggaggactggttcagcctggcggatctctgagactgtcttgtgccgccagcggctacaccttcaccaactactggatgaactgggtccgacaggcccctggcaaaggactggaatgggtcggaatgatcgaccccagcgacagcgagacacactacaaccacatcttcaaggaccgcttcaccatcagcgccgacaccagcaagaataccgcctacctccagatgaactccctgagagccgaggacaccgccgtgtactactgcgccagaaacctgtatctgtggggccagggaaccctggtcacagtgtcatctacgcgtatccagaaccctgatcctgccgtgtaccagctgcgggatagcaagagcagcgacaagagcgtgtgtctgttcaccgacttcgacagccagaccaacgtgtcccagagcaaggactccgacgtgtacatcaccgataagaccgtgctggacatgcggagcatggacttcaagagcaactccgccgtggcctggtccagcaagtccgatttcgcctgcgccaacgccttcaacaacagcattatccccgaggacacattcttcccaagccccgagatggcctgcgacgtgaagctggtggaaaagagcttcgagacagacaccaacctgaacttccagaacctgctcgtgatctggctgagaatcctgctgctgaaagtggccggctttaacctgctgatgaccctgcggctgtggtccagc

SEQ ID NO: 37461 - DNA, 1857 bp, synthetic construct
  source 1..1857: mol_type = other DNA
atggccttaccagtgaccgccttgctcctgccgctggccttgctgctccacgccgccaggccggacatccagatgacacagagccctagcagcctgtctgccagcgtgggagacagagtgaccatcacatgcaagagcagccagagcctgctggactccgatggcaagacctacctgaactggtatcagcagaagcccggcaaggcccctaagctgctgatctacctggtgtccaagctggatagcggcgtgcccagcagattttctggcagcggcagcggaaccgacttcaccctgacaatatccagcctccagcctgaggacttcgccacctactactgcttccaaggcacccactttccattcaccttcggccagggcaccaaggtggaaatcaaaagactcgaggacctgaagcacgtgttcccacctgaggtggccgtgttcgagcctagcgacgccgagatctggcacacccagaaagccaccctcgtgtgcctggctaccggcttctaccccgaccatgtggaactgtcttggtgggtcaacggcaaagaggtgcacagcggcgtgtctaccgacccccagccactgaaagaacagcccgccctgaacgacagccggtactgcctgagcagcagactgagagtgtccgccaccttctggcagaacccccggaaccacttcagatgccaggtgcagttctacggcctgagcgagaacgacgagtggacccaggacagagccaagcccgtgacccagatcgtgtctgccgaagcctggggcagagccgattgcggctttaccagcgagagctaccagcagggcgtgctgagcgccaccatcctgtacgagatcctgctgggcaaggccaccctgtacgccgtgctggtgtctgccctggtgctgatggctatggtcaagcggaaggacagccggggaagggccaagcgatctggatctggagcaacaaacttctcactactcaaacaagcaggtgacgtggaggagaatcccgggcctactagtatggactggatttggcgcatccttttccttgtcggcgctgctaccggcgcgcattccttcgaagaagtgcagctggttgaatcaggcggaggactggttcagcctggcggatctctgagactgtcttgtgccgccagcggctacaccttcaccaactactggatgaactgggtccgacaggcccctggcaaaggactggaatgggtcggaatgatcgaccccagcgacagcgagacacactacaaccacatcttcaaggaccgcttcaccatcagcgccgacaccagcaagaataccgcctacctccagatgaactccctgagagccgaggacaccgccgtgtactactgcgccagaaacctgtatctgtggggccagggaaccctggtcacagtgtcatctacgcgtatccagaaccctgatcctgccgtgtaccagctgcgggatagcaagagcagcgacaagagcgtgtgtctgttcaccgacttcgacagccagaccaacgtgtcccagagcaaggactccgacgtgtacatcaccgataagaccgtgctggacatgcggagcatggacttcaagagcaactccgccgtggcctggtccaccaagtccgatttcgcctgcgccaacgccttcaacaacagcattatccccgaggacacattcttcccaagccccgaggtggtgtgcgacgtgaagctggtggaaaagagcttcgagacagacaccaacctgaacttccagaacctggtggtgatcggcgccagaatcctgctgctgaaagtggccggctttaacctgctgatgaccctgcggctgtggtccagc

SEQ ID NO: 37462 - DNA, 1857 bp, synthetic construct
  source 1..1857: mol_type = other DNA
atggccttaccagtgaccgccttgctcctgccgctggccttgctgctccacgccgccaggccggacatccagatgacacagagccctagcagcctgtctgccagcgtgggagacagagtgaccatcacatgcaagagcagccagagcctgctggactccgatggcaagacctacctgaactggtatcagcagaagcccggcaaggcccctaagctgctgatctacctggtgtccaagctggatagcggcgtgcccagcagattttctggcagcggcagcggaaccgacttcaccctgacaatatccagcctccagcctgaggacttcgccacctactactgcttccaaggcacccactttccattcaccttcggccagggcaccaaggtggaaatcaaaagactcgaggacctgaagaacgtgttcccacctgaggtggccgtgttcgagcctagcaaggccgagatcagcagaacccagaaagccaccctcgtgtgcctggctaccggcttctaccctcctcatgtggaactgtcttggtgggtcaacggcaaagaggtgcacgacggcgtgtgtaccgacccccagccactgaaagaacagcccgccctgaacgacagccggtactgcctgagcagcagactgagagtgtccgccaccttctggcagaacccccggaaccacttcagatgccaggtgcagttctacggcctgagcgagaacgacgagtggacccaggacagagccaagcccgtgacccagatcgtgtctgccgaagcctggggcagagccgattgcggctttaccagcgagagctaccagcagggcgtgctgagcgccaccatcctgtacgagatcctgctgggcaaggccaccctgtacgccgtgctggtgtctgccctggtgctgatggctatggtcaagcggaaggacagccggggaagggccaagcgatctggatctggagcaacaaacttctcactactcaaacaagcaggtgacgtggaggagaatcccgggcctactagtatggactggatttggcgcatccttttccttgtcggcgctgctaccggcgcgcattccttcgaagaagtgcagctggttgaatcaggcggaggactggttcagcctggcggatctctgagactgtcttgtgccgccagcggctacaccttcaccaactactggatgaactgggtccgacaggcccctggcaaaggactggaatgggtcggaatgatcgaccccagcgacagcgagacacactacaaccacatcttcaaggaccgcttcaccatcagcgccgacaccagcaagaataccgcctacctccagatgaactccctgagagccgaggacaccgccgtgtactactgcgccagaaacctgtatctgtggggccagggaaccctggtcacagtgtcatctacgcgtatccagaaccctgatcctgccgtgtaccagctgcgggatagcaagagcagcgacaagttcgtgtgtctgttcaccgacttcgacagccagatcaacgtgtcccagagcaaggactccgacgtgtacatcaccgataagtgcgtgctggacatgcggagcatggacttcaagagcaactccgccgtggcctggtccaacaagtccgatttcacctgcgccaacgccttcaacaacagcattatccccgaggacacattcttcccaagccccgagagcagctgcgacgtgaagctggtggaaaagagcttcgagacagacaccaacctgaacttccagaacctgagcgtgatcggcttcagaatcctgctgctgaaagtggccggctttaacctgctgatgaccctgcggctgtggtccagc

SEQ ID NO: 37463 - DNA, 2283 bp, synthetic construct
  source 1..2283: mol_type = other DNA
atggccttaccagtgaccgccttgctcctgccgctggccttgctgctccacgccgccaggccggacatccagatgacacagagccctagcagcctgtctgccagcgtgggagacagagtgaccatcacatgcaagagcagccagagcctgctggactccgatggcaagacctacctgaactggtatcagcagaagcccggcaaggcccctaagctgctgatctacctggtgtccaagctggatagcggcgtgcccagcagattttctggcagcggcagcggaaccgacttcaccctgacaatatccagcctccagcctgaggacttcgccacctactactgcttccaaggcacccactttccattcaccttcggccagggcaccaaggtggaaatcaaaagactcgaggacctgaagaacgtgttcccacctgaggtggccgtgttcgagcctagcgaggccgagatcagccacacccagaaagccaccctcgtgtgcctggctaccggcttctaccccgaccatgtggaactgtcttggtgggtcaacggcaaagaggtgcacagcggcgtgtgtaccgacccccagccactgaaagaacagcccgccctgaacgacagccggtactgcctgagcagcagactgagagtgtccgccaccttctggcagaacccccggaaccacttcagatgccaggtgcagttctacggcctgagcgagaacgacgagtggacccaggacagagccaagcccgtgacccagatcgtgtctgccgaagcctggggcagagccgattgcggctttaccagcgagagctaccagcagggcgtgctgagcgccaccatcctgtacgagatcctgctgggcaaggccaccctgtacgccgtgctggtgtctgccctggtgctgatggctatggtcaagcggaaggacagccggggaagggccaagcgatctggatctggagcaacaaacttctcactactcaaacaagcaggtgacgtggaggagaatcccgggcctactagtaccatggactggatttggcgcatccttttccttgtcggcgctgctaccggcgcccattccgggccccaggtgcagctccaagaaagcggacccggactggttaagccctctcagaccctgtctctgacctgcacagttagcggagccagcattaccacaggcgagtattattggaattggtttcggcagccaccaggcaaggggcttgagtggatgggtgctattgctgcctctggcagcaccacctactctcccagctttgagagcagaacctccatcagccgggacacctccaaaaaccagttctctctgaagctgtcctccgtgaccgctgctgacaccgccgtctattattgtggccggtctttcggcgtggcagctgtgaccacaggacagaacagaggccagggaacacttgtgaccgtgtcctctggatccggcggcggaggatctggcggaggcggatctgggggcggaggctctttcgaagaagtgcagctggttgaatcaggcggaggactggttcagcctggcggatctctgagactgtcttgtgccgccagcggctacaccttcaccaactactggatgaactgggtccgacaggcccctggcaaaggactggaatgggtcggaatgatcgaccccagcgacagcgagacacactacaaccacatcttcaaggaccgcttcaccatcagcgccgacaccagcaagaataccgcctacctccagatgaactccctgagagccgaggacaccgccgtgtactactgcgccagaaacctgtatctgtggggccagggaaccctggtcacagtgtcatctacgcgtatccagaaccctgatcctgccgtgtaccagctgcgggatagcaagagcagcgacaagagcgtgtgtctgttcaccgacttcgacagccagaccaacgtgtcccagagcaaggactccgacgtgtacatcaccgataagtgcgtgctggacatgcggagcatggacttcaagagcaactccgccgtggcctggtccaacaagtccgatttcgcctgcgccaacgccttcaacaacagcattatccccgaggacacattcttcccaagccccgagagcagctgcgacgtgaagctggtggaaaagagcttcgagacagacaccaacctgaacttccagaacctgagcgtgatcggcttcagaatcctgctgctgaaagtggccggctttaacctgctgatgaccctgcggctgtggtccagc

SEQ ID NO: 37464 - DNA, 2706 bp, synthetic construct
  source 1..2706: mol_type = other DNA
atggccttaccagtgaccgccttgctcctgccgctggccttgctgctccacgccgccaggccgcaggttcagctgcaagagtctggccctggcctggtcaagcctagccaaacactgagcctgacctgtaccgtgtctggcggctctatcaccaccggcgagttctactggaactggttcagacagcctcctggcaaaggactggaatggatgggagccattgccgccagcggcagcacaacatacagccctagcttcgagagccggaccagcatcagcagagacaccagcaagaatcagttcagcctgaagctgagcagcgtgacagccgccgatacagccgtgtattactgcggcagatcctttggagtggccgccgtgacaaccggccagaatagaggacagggcaccctggtcacagtgtctagcggtaccggcggaggcggatctggcggcggaggtagcggtggcggaggatctgaattcgacatccagatgacacagagccctagcagcctgtctgccagcgtgggagacagagtgaccatcacatgcaagagcagccagagcctgctggactccgatggcaagacctacctgaactggtatcagcagaagcccggcaaggcccctaagctgctgatctacctggtgtccaagctggatagcggcgtgcccagcagattttctggcagcggcagcggaaccgacttcaccctgacaatatccagcctccagcctgaggacttcgccacctactactgcttccaaggcacccactttccattcaccttcggccagggcaccaaggtggaaatcaaaagactcgagatccagaaccctgatcctgccgtgtaccagctgcgggatagcaagagcagcgacaagagcgtgtgtctgttcaccgacttcgacagccagaccaacgtgtcccagagcaaggactccgacgtgtacatcaccgataagtgcgtgctggacatgcggagcatggacttcaagagcaactccgccgtggcctggtccaacaagtccgatttcgcctgcgccaacgccttcaacaacagcattatccccgaggacacattcttcccaagcagcgacgtgccctgcgacgtgaagctggtggaaaagagcttcgagacagacaccaacctgaacttccagaacctgagcgtgatcggcttcagaatcctgctgctgaaagtggccggctttaacctgctgatgaccctgcggctgtggtccagccgcgccaagagaagcggatctggcgtgaagcagaccctgaatttcgacctgctgaagctggctggcgacgtggaatccaacccaggccctactagtaccatggactggatttggcgcatccttttccttgtcggcgctgctaccggcgcccattccgggcccgaagtgcaactggttgaatccggtggcggcctggtgcaacccggcggatctctcagacttagctgtgccgcctccggcagaaccttcacaatgggatggtacaggcaggctccagggaaagagagagagttcgtcgccgccatctctctgtctcccacactggcctactacgccgactctgtgaaaggccggttcaccatctccagagataatagcaagaacaccgtggtgctgcaaatgaactctctgagagccgaggatacagccctgtactattgtgccgctgaccggaagtccgtgatgagcatcagacccgattactggggacagggcacactggtcacagtgtctagtggatccggcggcggaggatctggcggaggcggatctgggggcggaggctctttcgaagaagtgcagctggttgaatcaggcggaggactggttcagcctggcggatctctgagactgtcttgtgccgccagcggctacaccttcaccaactactggatgaactgggtccgacaggcccctggcaaaggactggaatgggtcggaatgatcgaccccagcgacagcgagacacactacaaccacatcttcaaggaccgcttcaccatcagcgccgacaccagcaagaataccgcctacctccagatgaactccctgagagccgaggacaccgccgtgtactactgcgccagaaacctgtatctgtggggccagggaaccctggtcacagtgtcatctacgcgtgaggacctgaagaacgtgttcccacctgaggtggccgtgttcgagcctagcaaggccgagatcgcccacacccagaaagccaccctcgtgtgcctggctaccggcttctaccccgaccatgtggaactgtcttggtgggtcaacggcaaagaggtgcacagcggcgtgtgtaccgacccccagccactgaaagaacagcccgccctgaacgacagccggtactgcctgagcagcagactgagagtgtccgccaccttctggcagaacccccggaaccacttcagatgccaggtgcagttctacggcctgagcgagaacgacgagtggacccaggacagagccaagcccgtgacccagatcgtgtctgccgaagcctggggcagagccgattgcggcatcaccagcgccagctaccaccagggcgtgctgagcgccaccatcctgtacgagatcctgctgggcaaggccaccctgtacgccgtgctggtgtctgccctggtgctgatggctatggtcaagcggaaggacagccgggga

SEQ ID NO: 37465 - DNA, 2295 bp, synthetic construct
  source 1..2295: mol_type = other DNA
atggccttaccagtgaccgccttgctcctgccgctggccttgctgctccacgccgccaggccgcaggttcagctgcaagagtctggccctggcctggtcaagcctagccaaacactgagcctgacctgtaccgtgtctggcggctctatcaccaccggcgagttctactggaactggttcagacagcctcctggcaaaggactggaatggatgggagccattgccgccagcggcagcacaacatacagccctagcttcgagagccggaccagcatcagcagagacaccagcaagaatcagttcagcctgaagctgagcagcgtgacagccgccgatacagccgtgtattactgcggcagatcctttggagtggccgccgtgacaaccggccagaatagaggacagggcaccctggtcacagtgtctagcggtaccggcggaggcggatctggcggcggaggtagcggtggcggaggatctgaattcgacatccagatgacacagagccctagcagcctgtctgccagcgtgggagacagagtgaccatcacatgcaagagcagccagagcctgctggactccgatggcaagacctacctgaactggtatcagcagaagcccggcaaggcccctaagctgctgatctacctggtgtccaagctggatagcggcgtgcccagcagattttctggcagcggcagcggaaccgacttcaccctgacaatatccagcctccagcctgaggacttcgccacctactactgcttccaaggcacccactttccattcaccttcggccagggcaccaaggtggaaatcaaaagactcgagatccagaaccctgatcctgccgtgtaccagctgcgggatagcaagagcagcgacaagagcgtgtgtctgttcaccgacttcgacagccagaccaacgtgtcccagagcaaggactccgacgtgtacatcaccgataagtgcgtgctggacatgcggagcatggacttcaagagcaactccgccgtggcctggtccaacaagtccgatttcgcctgcgccaacgccttcaacaacagcattatccccgaggacacattcttcccaagcagcgacgtgccctgcgacgtgaagctggtggaaaagagcttcgagacagacaccaacctgaacttccagaacctgagcgtgatcggcttcagaatcctgctgctgaaagtggccggctttaacctgctgatgaccctgcggctgtggtccagccgcgccaagagaagcggatctggcgtgaagcagaccctgaatttcgacctgctgaagctggctggcgacgtggaatccaacccaggccctactagtaccatggactggatttggcgcatccttttccttgtcggcgctgctaccggcgcccattccttcgaagaagtgcagctggttgaatcaggcggaggactggttcagcctggcggatctctgagactgtcttgtgccgccagcggctacaccttcaccaactactggatgaactgggtccgacaggcccctggcaaaggactggaatgggtcggaatgatcgaccccagcgacagcgagacacactacaaccacatcttcaaggaccgcttcaccatcagcgccgacaccagcaagaataccgcctacctccagatgaactccctgagagccgaggacaccgccgtgtactactgcgccagaaacctgtatctgtggggccagggaaccctggtcacagtgtcatctacgcgtgaggacctgaagaacgtgttcccacctgaggtggccgtgttcgagcctagcaaggccgagatcgcccacacccagaaagccaccctcgtgtgcctggctaccggcttctaccccgaccatgtggaactgtcttggtgggtcaacggcaaagaggtgcacagcggcgtgtgtaccgacccccagccactgaaagaacagcccgccctgaacgacagccggtactgcctgagcagcagactgagagtgtccgccaccttctggcagaacccccggaaccacttcagatgccaggtgcagttctacggcctgagcgagaacgacgagtggacccaggacagagccaagcccgtgacccagatcgtgtctgccgaagcctggggcagagccgattgcggcatcaccagcgccagctaccaccagggcgtgctgagcgccaccatcctgtacgagatcctgctgggcaaggccaccctgtacgccgtgctggtgtctgccctggtgctgatggctatggtcaagcggaaggacagccgggga

SEQ ID NO: 37466 - DNA, 2694 bp, synthetic construct
  source 1..2694: mol_type = other DNA
atggccttaccagtgaccgccttgctcctgccgctggccttgctgctccacgccgccaggccggaagtgcagctggttgaatctggcggaggactggttcaggctggcggatctctgagactgtcttgtgccgccagcggcagaacctttagcatgggctggtttagacaggcccctggcaaagagagagagttcgtcgccgccatcacatactctggcggcagcccttactacgccgactctgtgaagggcagattcaccatcagccgggacaacgccaagaacaccgtgtacctccagatgaacagcctgaagcctgaggacaccgccgtgtactactgcgccgccaatccaacatacggcagcgactggaacgccgagaattggggccagggaacccaagtgacagtgtctagcggtaccggcggaggcggatctggcggcggaggtagcggtggcggaggatctgaattcgacatccagatgacacagagccctagcagcctgtctgccagcgtgggagacagagtgaccatcacatgcaagagcagccagagcctgctggactccgatggcaagacctacctgaactggtatcagcagaagcccggcaaggcccctaagctgctgatctacctggtgtccaagctggatagcggcgtgcccagcagattttctggcagcggcagcggaaccgacttcaccctgacaatatccagcctccagcctgaggacttcgccacctactactgcttccaaggcacccactttccattcaccttcggccagggcaccaaggtggaaatcaaaagactcgaggacctgaagaacgtgttcccacctgaggtggccgtgttcgagcctagcgaggccgagatcagccacacccagaaagccaccctcgtgtgcctggctaccggcttctaccccgaccatgtggaactgtcttggtgggtcaacggcaaagaggtgcacagcggcgtgtgtaccgacccccagccactgaaagaacagcccgccctgaacgacagccggtactgcctgagcagcagactgagagtgtccgccaccttctggcagaacccccggaaccacttcagatgccaggtgcagttctacggcctgagcgagaacgacgagtggacccaggacagagccaagcccgtgacccagatcgtgtctgccgaagcctggggcagagccgattgcggctttaccagcgagagctaccagcagggcgtgctgagcgccaccatcctgtacgagatcctgctgggcaaggccaccctgtacgccgtgctggtgtctgccctggtgctgatggctatggtcaagcggaaggacagccggggaagggccaagcgatctggatctggagcaacaaacttctcactactcaaacaagcaggtgacgtggaggagaatcccgggcctactagtaccatggactggatttggcgcatccttttccttgtcggcgctgctaccggcgcccattccgggccccaggtgcagctccaagaaagcggacccggactggttaagccctctcagaccctgtctctgacctgcacagttagcggagccagcattaccacaggcgagtattattggaattggtttcggcagccaccaggcaaggggcttgagtggatgggtgctattgctgcctctggcagcaccacctactctcccagctttgagagcagaacctccatcagccgggacacctccaaaaaccagttctctctgaagctgtcctccgtgaccgctgctgacaccgccgtctattattgtggccggtctttcggcgtggcagctgtgaccacaggacagaacagaggccagggaacacttgtgaccgtgtcctctggatccggcggcggaggatctggcggaggcggatctgggggcggaggctctttcgaagaagtgcagctggttgaatcaggcggaggactggttcagcctggcggatctctgagactgtcttgtgccgccagcggctacaccttcaccaactactggatgaactgggtccgacaggcccctggcaaaggactggaatgggtcggaatgatcgaccccagcgacagcgagacacactacaaccacatcttcaaggaccgcttcaccatcagcgccgacaccagcaagaataccgcctacctccagatgaactccctgagagccgaggacaccgccgtgtactactgcgccagaaacctgtatctgtggggccagggaaccctggtcacagtgtcatctacgcgtatccagaaccctgatcctgccgtgtaccagctgcgggatagcaagagcagcgacaagagcgtgtgtctgttcaccgacttcgacagccagaccaacgtgtcccagagcaaggactccgacgtgtacatcaccgataagtgcgtgctggacatgcggagcatggacttcaagagcaactccgccgtggcctggtccaacaagtccgatttcgcctgcgccaacgccttcaacaacagcattatccccgaggacacattcttcccaagccccgagagcagctgcgacgtgaagctggtggaaaagagcttcgagacagacaccaacctgaacttccagaacctgagcgtgatcggcttcagaatcctgctgctgaaagtggccggctttaacctgctgatgaccctgcggctgtggtccagc

SEQ ID NO: 37467 - DNA, 2715 bp, synthetic construct
  source 1..2715: mol_type = other DNA
atggccttaccagtgaccgccttgctcctgccgctggccttgctgctccacgccgccaggccggaagtgcagctggttgaatctggcggaggactggttcaggctggcggatctctgagactgtcttgtgccgccagcggcagaacctttagcatgggctggtttagacaggcccctggcaaagagagagagttcgtcgccgccatcacatactctggcggcagcccttactacgccgactctgtgaagggcagattcaccatcagccgggacaacgccaagaacaccgtgtacctccagatgaacagcctgaagcctgaggacaccgccgtgtactactgcgccgccaatccaacatacggcagcgactggaacgccgagaattggggccagggaacccaagtgacagtgtctagcggtaccggcggaggcggatctggcggcggaggtagcggtggcggaggatctgaattcgacatccagatgacacagagccctagcagcctgtctgccagcgtgggagacagagtgaccatcacatgcaagagcagccagagcctgctggactccgatggcaagacctacctgaactggtatcagcagaagcccggcaaggcccctaagctgctgatctacctggtgtccaagctggatagcggcgtgcccagcagattttctggcagcggcagcggaaccgacttcaccctgacaatatccagcctccagcctgaggacttcgccacctactactgcttccaaggcacccactttccattcaccttcggccagggcaccaaggtggaaatcaaaagactcgagatccagaaccctgatcctgccgtgtaccagctgcgggatagcaagagcagcgacaagagcgtgtgtctgttcaccgacttcgacagccagaccaacgtgtcccagagcaaggactccgacgtgtacatcaccgataagtgcgtgctggacatgcggagcatggacttcaagagcaactccgccgtggcctggtccaacaagtccgatttcgcctgcgccaacgccttcaacaacagcattatccccgaggacacattcttcccaagcagcgacgtgccctgcgacgtgaagctggtggaaaagagcttcgagacagacaccaacctgaacttccagaacctgagcgtgatcggcttcagaatcctgctgctgaaagtggccggctttaacctgctgatgaccctgcggctgtggtccagccgcgccaagagaagcggatctggcgtgaagcagaccctgaatttcgacctgctgaagctggctggcgacgtggaatccaacccaggccctactagtaccatggactggatttggcgcatccttttccttgtcggcgctgctaccggcgcccattccgggccccaggtgcagctggttgaatctggcggaggactggttcagcctggcggatctctgagactgtcttgtgccgccagcggcaacatcaacagcagaaactgcatgggctggttcagacaggcccctggcaagggaagagaaggcgtggcagctatcggccaagtgaccggcagaacctactacgtggacagcgtgaagggcagattcaccatcagcctggacaacagcaagaacaccctgtacctccagatgaacagcctgagagccgaggacaccgccgtgtactattgtgctgctgcccctggctgtctgctgtctgcacttagaagcgccgactacagaaactggggccagggcacactggtcaccgtttcttctggatccggcggcggaggatctggcggaggcggatctgggggcggaggctctttcgaagaagtgcagctggttgaatcaggcggaggactggttcagcctggcggatctctgagactgtcttgtgccgccagcggctacaccttcaccaactactggatgaactgggtccgacaggcccctggcaaaggactggaatgggtcggaatgatcgaccccagcgacagcgagacacactacaaccacatcttcaaggaccgcttcaccatcagcgccgacaccagcaagaataccgcctacctccagatgaactccctgagagccgaggacaccgccgtgtactactgcgccagaaacctgtatctgtggggccagggaaccctggtcacagtgtcatctacgcgtgaggacctgaagaacgtgttcccacctgaggtggccgtgttcgagcctagcaaggccgagatcgcccacacccagaaagccaccctcgtgtgcctggctaccggcttctaccccgaccatgtggaactgtcttggtgggtcaacggcaaagaggtgcacagcggcgtgtgtaccgacccccagccactgaaagaacagcccgccctgaacgacagccggtactgcctgagcagcagactgagagtgtccgccaccttctggcagaacccccggaaccacttcagatgccaggtgcagttctacggcctgagcgagaacgacgagtggacccaggacagagccaagcccgtgacccagatcgtgtctgccgaagcctggggcagagccgattgcggcatcaccagcgccagctaccaccagggcgtgctgagcgccaccatcctgtacgagatcctgctgggcaaggccaccctgtacgccgtgctggtgtctgccctggtgctgatggctatggtcaagcggaaggacagccgggga

SEQ ID NO: 37468 - DNA, 2703 bp, synthetic construct
  source 1..2703: mol_type = other DNA
atggccttaccagtgaccgccttgctcctgccgctggccttgctgctccacgccgccaggccggaagtgcagctggttgaatctggcggaggactggttcaggctggcggatctctgagactgtcttgtgccgccagcggcagaacctttagcatgggctggtttagacaggcccctggcaaagagagagagttcgtcgccgccatcacatactctggcggcagcccttactacgccgactctgtgaagggcagattcaccatcagccgggacaacgccaagaacaccgtgtacctccagatgaacagcctgaagcctgaggacaccgccgtgtactactgcgccgccaatccaacatacggcagcgactggaacgccgagaattggggccagggaacccaagtgacagtgtctagcggtaccggcggaggcggatctggcggcggaggtagcggtggcggaggatctgaattcgacatccagatgacacagagccctagcagcctgtctgccagcgtgggagacagagtgaccatcacatgcaagagcagccagagcctgctggactccgatggcaagacctacctgaactggtatcagcagaagcccggcaaggcccctaagctgctgatctacctggtgtccaagctggatagcggcgtgcccagcagattttctggcagcggcagcggaaccgacttcaccctgacaatatccagcctccagcctgaggacttcgccacctactactgcttccaaggcacccactttccattcaccttcggccagggcaccaaggtggaaatcaaaagactcgaggacctgaagaacgtgttcccacctgaggtggccgtgttcgagcctagcgaggccgagatcagccacacccagaaagccaccctcgtgtgcctggctaccggcttctaccccgaccatgtggaactgtcttggtgggtcaacggcaaagaggtgcacagcggcgtgtgtaccgacccccagccactgaaagaacagcccgccctgaacgacagccggtactgcctgagcagcagactgagagtgtccgccaccttctggcagaacccccggaaccacttcagatgccaggtgcagttctacggcctgagcgagaacgacgagtggacccaggacagagccaagcccgtgacccagatcgtgtctgccgaagcctggggcagagccgattgcggctttaccagcgagagctaccagcagggcgtgctgagcgccaccatcctgtacgagatcctgctgggcaaggccaccctgtacgccgtgctggtgtctgccctggtgctgatggctatggtcaagcggaaggacagccggggaagggccaagcgatctggatctggagcaacaaacttctcactactcaaacaagcaggtgacgtggaggagaatcccgggcctactagtaccatggactggatttggcgcatccttttccttgtcggcgctgctaccggcgcccattccgggccccaggtgcagctggttgaatctggcggaggactggttcagcctggcggatctctgagactgtcttgtgccgccagcggcaacatcaacagcagaaactgcatgggctggttcagacaggcccctggcaagggaagagaaggcgtggcagctatcggccaagtgaccggcagaacctactacgtggacagcgtgaagggcagattcaccatcagcctggacaacagcaagaacaccctgtacctccagatgaacagcctgagagccgaggacaccgccgtgtactattgtgctgctgcccctggctgtctgctgtctgcacttagaagcgccgactacagaaactggggccagggcacactggtcaccgtttcttctggatccggcggcggaggatctggcggaggcggatctgggggcggaggctctttcgaagaagtgcagctggttgaatcaggcggaggactggttcagcctggcggatctctgagactgtcttgtgccgccagcggctacaccttcaccaactactggatgaactgggtccgacaggcccctggcaaaggactggaatgggtcggaatgatcgaccccagcgacagcgagacacactacaaccacatcttcaaggaccgcttcaccatcagcgccgacaccagcaagaataccgcctacctccagatgaactccctgagagccgaggacaccgccgtgtactactgcgccagaaacctgtatctgtggggccagggaaccctggtcacagtgtcatctacgcgtatccagaaccctgatcctgccgtgtaccagctgcgggatagcaagagcagcgacaagagcgtgtgtctgttcaccgacttcgacagccagaccaacgtgtcccagagcaaggactccgacgtgtacatcaccgataagtgcgtgctggacatgcggagcatggacttcaagagcaactccgccgtggcctggtccaacaagtccgatttcgcctgcgccaacgccttcaacaacagcattatccccgaggacacattcttcccaagccccgagagcagctgcgacgtgaagctggtggaaaagagcttcgagacagacaccaacctgaacttccagaacctgagcgtgatcggcttcagaatcctgctgctgaaagtggccggctttaacctgctgatgaccctgcggctgtggtccagc

SEQ ID NO: 37469 - DNA, 2703 bp, synthetic construct
  source 1..2703: mol_type = other DNA
atggccttaccagtgaccgccttgctcctgccgctggccttgctgctccacgccgccaggccggaagtgcaactggttgaatccggtggcggcctggtgcaagcaggcggatctctcagacttagctgtgccgcctccggcagaaccttcacaatgggatggtttaggcaggctccagggaaagagagagagttcgtcgccgccatctctctgtctcccacactggcctactacgccgactctgtgaaaggccggttcaccatctccagagataatgccaagaacaccgtggtgctgcaaatgaactctctgaaacccgaggatacagccctgtactattgtgccgctgaccggaagtccgtgatgagcatcagacccgattactggggacagggcacacaagtcacagtgtcctctggtaccggcggaggcggatctggcggcggaggtagcggtggcggaggatctgaattcgacatccagatgacacagagccctagcagcctgtctgccagcgtgggagacagagtgaccatcacatgcaagagcagccagagcctgctggactccgatggcaagacctacctgaactggtatcagcagaagcccggcaaggcccctaagctgctgatctacctggtgtccaagctggatagcggcgtgcccagcagattttctggcagcggcagcggaaccgacttcaccctgacaatatccagcctccagcctgaggacttcgccacctactactgcttccaaggcacccactttccattcaccttcggccagggcaccaaggtggaaatcaaaagactcgaggacctgaagaacgtgttcccacctgaggtggccgtgttcgagcctagcgaggccgagatcagccacacccagaaagccaccctcgtgtgcctggctaccggcttctaccccgaccatgtggaactgtcttggtgggtcaacggcaaagaggtgcacagcggcgtgtgtaccgacccccagccactgaaagaacagcccgccctgaacgacagccggtactgcctgagcagcagactgagagtgtccgccaccttctggcagaacccccggaaccacttcagatgccaggtgcagttctacggcctgagcgagaacgacgagtggacccaggacagagccaagcccgtgacccagatcgtgtctgccgaagcctggggcagagccgattgcggctttaccagcgagagctaccagcagggcgtgctgagcgccaccatcctgtacgagatcctgctgggcaaggccaccctgtacgccgtgctggtgtctgccctggtgctgatggctatggtcaagcggaaggacagccggggaagggccaagcgatctggatctggagcaacaaacttctcactactcaaacaagcaggtgacgtggaggagaatcccgggcctactagtaccatggactggatttggcgcatccttttccttgtcggcgctgctaccggcgcccattccgggccccaggtgcagctggttgaatctggcggaggactggttcagcctggcggatctctgagactgtcttgtgccgccagcggcaacatcaacagcagaaactgcatgggctggttcagacaggcccctggcaagggaagagaaggcgtggcagctatcggccaagtgaccggcagaacctactacgtggacagcgtgaagggcagattcaccatcagcctggacaacagcaagaacaccctgtacctccagatgaacagcctgagagccgaggacaccgccgtgtactattgtgctgctgcccctggctgtctgctgtctgcacttagaagcgccgactacagaaactggggccagggcacactggtcaccgtttcttctggatccggcggcggaggatctggcggaggcggatctgggggcggaggctctttcgaagaagtgcagctggttgaatcaggcggaggactggttcagcctggcggatctctgagactgtcttgtgccgccagcggctacaccttcaccaactactggatgaactgggtccgacaggcccctggcaaaggactggaatgggtcggaatgatcgaccccagcgacagcgagacacactacaaccacatcttcaaggaccgcttcaccatcagcgccgacaccagcaagaataccgcctacctccagatgaactccctgagagccgaggacaccgccgtgtactactgcgccagaaacctgtatctgtggggccagggaaccctggtcacagtgtcatctacgcgtatccagaaccctgatcctgccgtgtaccagctgcgggatagcaagagcagcgacaagagcgtgtgtctgttcaccgacttcgacagccagaccaacgtgtcccagagcaaggactccgacgtgtacatcaccgataagtgcgtgctggacatgcggagcatggacttcaagagcaactccgccgtggcctggtccaacaagtccgatttcgcctgcgccaacgccttcaacaacagcattatccccgaggacacattcttcccaagccccgagagcagctgcgacgtgaagctggtggaaaagagcttcgagacagacaccaacctgaacttccagaacctgagcgtgatcggcttcagaatcctgctgctgaaagtggccggctttaacctgctgatgaccctgcggctgtggtccagc

SEQ ID NO: 37470 - DNA, 2715 bp, synthetic construct
  source 1..2715: mol_type = other DNA
atggccttaccagtgaccgccttgctcctgccgctggccttgctgctccacgccgccaggccgcaggttcagctgcaagagtctggccctggcctggtcaagcctagccaaacactgagcctgacctgtaccgtgtctggcggctctatcaccaccggcgagttctactggaactggttcagacagcctcctggcaaaggactggaatggatgggagccattgccgccagcggcagcacaacatacagccctagcttcgagagccggaccagcatcagcagagacaccagcaagaatcagttcagcctgaagctgagcagcgtgacagccgccgatacagccgtgtattactgcggcagatcctttggagtggccgccgtgacaaccggccagaatagaggacagggcaccctggtcacagtgtctagcggtaccggcggaggcggatctggcggcggaggtagcggtggcggaggatctgaattcgacatccagatgacacagagccctagcagcctgtctgccagcgtgggagacagagtgaccatcacatgcaagagcagccagagcctgctggactccgatggcaagacctacctgaactggtatcagcagaagcccggcaaggcccctaagctgctgatctacctggtgtccaagctggatagcggcgtgcccagcagattttctggcagcggcagcggaaccgacttcaccctgacaatatccagcctccagcctgaggacttcgccacctactactgcttccaaggcacccactttccattcaccttcggccagggcaccaaggtggaaatcaaaagactcgaggacctgaagaacgtgttcccacctgaggtggccgtgttcgagcctagcgaggccgagatcagccacacccagaaagccaccctcgtgtgcctggctaccggcttctaccccgaccatgtggaactgtcttggtgggtcaacggcaaagaggtgcacagcggcgtgtgtaccgacccccagccactgaaagaacagcccgccctgaacgacagccggtactgcctgagcagcagactgagagtgtccgccaccttctggcagaacccccggaaccacttcagatgccaggtgcagttctacggcctgagcgagaacgacgagtggacccaggacagagccaagcccgtgacccagatcgtgtctgccgaagcctggggcagagccgattgcggctttaccagcgagagctaccagcagggcgtgctgagcgccaccatcctgtacgagatcctgctgggcaaggccaccctgtacgccgtgctggtgtctgccctggtgctgatggctatggtcaagcggaaggacagccggggaagggccaagcgatctggatctggagcaacaaacttctcactactcaaacaagcaggtgacgtggaggagaatcccgggcctactagtaccatggactggatttggcgcatccttttccttgtcggcgctgctaccggcgcccattccgggccccaggtgcagctggttgaatctggcggaggactggttcagcctggcggatctctgagactgtcttgtgccgccagcggcaacatcaacagcagaaactgcatgggctggttcagacaggcccctggcaagggaagagaaggcgtggcagctatcggccaagtgaccggcagaacctactacgtggacagcgtgaagggcagattcaccatcagcctggacaacagcaagaacaccctgtacctccagatgaacagcctgagagccgaggacaccgccgtgtactattgtgctgctgcccctggctgtctgctgtctgcacttagaagcgccgactacagaaactggggccagggcacactggtcaccgtttcttctggatccggcggcggaggatctggcggaggcggatctgggggcggaggctctttcgaagaagtgcagctggttgaatcaggcggaggactggttcagcctggcggatctctgagactgtcttgtgccgccagcggctacaccttcaccaactactggatgaactgggtccgacaggcccctggcaaaggactggaatgggtcggaatgatcgaccccagcgacagcgagacacactacaaccacatcttcaaggaccgcttcaccatcagcgccgacaccagcaagaataccgcctacctccagatgaactccctgagagccgaggacaccgccgtgtactactgcgccagaaacctgtatctgtggggccagggaaccctggtcacagtgtcatctacgcgtatccagaaccctgatcctgccgtgtaccagctgcgggatagcaagagcagcgacaagagcgtgtgtctgttcaccgacttcgacagccagaccaacgtgtcccagagcaaggactccgacgtgtacatcaccgataagtgcgtgctggacatgcggagcatggacttcaagagcaactccgccgtggcctggtccaacaagtccgatttcgcctgcgccaacgccttcaacaacagcattatccccgaggacacattcttcccaagccccgagagcagctgcgacgtgaagctggtggaaaagagcttcgagacagacaccaacctgaacttccagaacctgagcgtgatcggcttcagaatcctgctgctgaaagtggccggctttaacctgctgatgaccctgcggctgtggtccagc

SEQ ID NO: 37471 - DNA, 1467 bp, synthetic construct
  source 1..1467: mol_type = other DNA
atggccttaccagtgaccgccttgctcctgccgctggccttgctgctccacgccgccaggccggacatcgtgatgacacagagccctgatagcctggccgtgtctctgggagagagagccaccatcaactgcaagagcagccagagcctgctgaacagcggcaaccagaagaactacctggcctggtatcagcagaagcccggccagcctcctaagctgctgatctactggggcagcaccagatccacaggcgtgcccgatagattttctggctctggcagcggcaccgacttcaccctgacaatttctagcctgcaagccgaggacgtggccgtgtactactgccagaacgactacacataccccttcaccttcggccagggcaccaagctggaaatcaaaggcggaggcggaagtggaggcggaggatctggcggcggaggctctcaagttcagctggttcagagcggagccgaagtgaagaaacctggggcctctgtgaaggtgtcctgcaaggcttccggctataccttcaccagcttttggctgaactgggtccgacaggcccctggacaaggactggaatggatgggcaacatctaccccagcaccagctacaccgtgtacaaccagaaattcaaggaccgcgtgaccatgaccagggacaccagcacaagcacagtgtacatggaactgagcagcctgcggagcgaggataccgccgtgtattattgcgccagaacctggcggggcaacagcttcgattattggggccagggaaccaccgtgaccgtgtcatctacgcgtaaaattgaagttatgtatcctcctccttacctagacaatgagaagagcaatggaaccattatccatgtgaaagggaaacacctttgtccaagtcccctatttcccggaccttctaagcccttttgggtgctggtggtggttgggggagtcctggcttgctatagcttgctagtaacagtggcctttattattttctgggtgaggagtaagaggagcaggctcctgcacagtgactacatgaacatgactccacgccgccccggacccacccgcaagcattaccagccctatgccccaccacgcgacttcgcagcctatcgctccagagtgaagttcagcaggagcgcagacgcccccgcgtaccagcagggccagaaccagctctataacgagctcaatctaggacgaagagaggagtacgatgttttggacaagagacgtggccgggaccctgagatggggggaaagccgagaaggaagaaccctcaggaaggcctgtacaatgaactgcagaaagataagatggcggaggcctacagtgagattgggatgaaaggcgagcgccggaggggcaaggggcacgatggcctttaccagggtctcagtacagccaccaaggacacctacgacgcccttcacatgcaggccctgccccctcgc

SEQ ID NO: 37472 - DNA, 1485 bp, synthetic construct
  source 1..1485: mol_type = other DNA
atggccttaccagtgaccgccttgctcctgccgctggccttgctgctccacgccgccaggccggacatcgtgatgacacagagccctgatagcctggccgtgtctctgggagagagagccaccatcaactgcaagagcagccagagcctgctgaacagcggcaaccagaagaactacctggcctggtatcagcagaagcccggccagcctcctaagctgctgatctactggggcagcaccagatccacaggcgtgcccgatagattttctggctctggcagcggcaccgacttcaccctgacaatttctagcctgcaagccgaggacgtggccgtgtactactgccagaacgactacacataccccttcaccttcggccagggcaccaagctggaaatcaaaggcggaggcggaagtggaggcggaggatctggcggcggaggctctcaagttcagctggttcagagcggagccgaagtgaagaaacctggggcctctgtgaaggtgtcctgcaaggcttccggctataccttcaccagcttttggctgaactgggtccgacaggcccctggacaaggactggaatggatgggcaacatctaccccagcaccagctacaccgtgtacaaccagaaattcaaggaccgcgtgaccatgaccagggacaccagcacaagcacagtgtacatggaactgagcagcctgcggagcgaggataccgccgtgtattattgcgccagaacctggcggggcaacagcttcgattattggggccagggaaccaccgtgaccgtgtcatctacgcgtgcgaagcccaccacgacgccagcgccgcgaccaccaacaccggcgcccaccatcgcgtcgcagcccctgtccctgcgcccagaggcgtgccggccagcggcggggggcgcagtgcacacgagggggctggacttcgcctgtgacatctacatctgggcgcccttggccgggacttgtggggtccttctcctgtcactggttatcaccctttactgcaaacggggcagaaagaaactcctgtatatattcaaacaaccatttatgagaccagtacaaactactcaagaggaagatggctgtagctgccgatttccagaagaagaagaaggaggatgtgaactgagagtgaagttcagcaggagcgcagacgcccccgcgtaccagcagggccagaaccagctctataacgagctgaatctaggacgaagagaggagtacgatgttttggacaagagacgtggccgggaccctgagatggggggaaagccgagaaggaagaaccctcaggaaggcctgtacaatgaactgcagaaagataagatggcggaggcctacagtgagattgggatgaaaggcgagcgccggaggggcaaggggcacgatggcctttaccagggtctcagtacagccaccaaggacacctacgacgcccttcacatgcaggccctgccccctcgc

SEQ ID NO: 37473 - DNA, 1485 bp, synthetic construct
  source 1..1485: mol_type = other DNA
atggccttaccagtgaccgccttgctcctgccgctggccttgctgctccacgccgccaggccgcaagttcagctggttcagagcggagccgaagtgaagaaacctggggcctctgtgaaggtgtcctgcaaggcttccggctataccttcaccagcttttggctgaactgggtccgacaggcccctggacaaggactggaatggatgggcaacatctaccccagcaccagctacaccgtgtacaaccagaaattcaaggaccgcgtgaccatgaccagggacaccagcacaagcacagtgtacatggaactgagcagcctgcggagcgaggataccgccgtgtattattgcgccagaacctggcggggcaacagcttcgattattggggccagggaaccaccgtgaccgtgtcatctggcggaggcggaagtggaggcggaggatctggcggcggaggctctgacatcgtgatgacacagagccctgatagcctggccgtgtctctgggagagagagccaccatcaactgcaagagcagccagagcctgctgaacagcggcaaccagaagaactacctggcctggtatcagcagaagcccggccagcctcctaagctgctgatctactggggcagcaccagatccacaggcgtgcccgatagattttctggctctggcagcggcaccgacttcaccctgacaatttctagcctgcaagccgaggacgtggccgtgtactactgccagaacgactacacataccccttcaccttcggccagggcaccaagctggaaatcaaaacgcgtgcgaagcccaccacgacgccagcgccgcgaccaccaacaccggcgcccaccatcgcgtcgcagcccctgtccctgcgcccagaggcgtgccggccagcggcggggggcgcagtgcacacgagggggctggacttcgcctgtgacatctacatctgggcgcccttggccgggacttgtggggtccttctcctgtcactggttatcaccctttactgcaaacggggcagaaagaaactcctgtatatattcaaacaaccatttatgagaccagtacaaactactcaagaggaagatggctgtagctgccgatttccagaagaagaagaaggaggatgtgaactgagagtgaagttcagcaggagcgcagacgcccccgcgtaccagcagggccagaaccagctctataacgagctgaatctaggacgaagagaggagtacgatgttttggacaagagacgtggccgggaccctgagatggggggaaagccgagaaggaagaaccctcaggaaggcctgtacaatgaactgcagaaagataagatggcggaggcctacagtgagattgggatgaaaggcgagcgccggaggggcaaggggcacgatggcctttaccagggtctcagtacagccaccaaggacacctacgacgcccttcacatgcaggccctgccccctcgc

SEQ ID NO: 37474 - DNA, 1884 bp, synthetic construct
  source 1..1884: mol_type = other DNA
atggccttaccagtgaccgccttgctcctgccgctggccttgctgctccacgccgccaggccggacatcgtgatgacacagagccctgatagcctggccgtgtctctgggagagagagccaccatcaactgcaagagcagccagagcctgctgaacagcggcaaccagaagaactacctggcctggtatcagcagaagcccggccagcctcctaagctgctgatctactggggcagcaccagatccacaggcgtgcccgatagattttctggctctggcagcggcaccgacttcaccctgacaatttctagcctgcaagccgaggacgtggccgtgtactactgccagaacgactacacataccccttcaccttcggccagggcaccaagctggaaatcaaactcgagatccagaaccctgatcctgccgtgtaccagctgcgggatagcaagagcagcgacaagagcgtgtgtctgttcaccgacttcgacagccagaccaacgtgtcccagagcaaggactccgacgtgtacatcaccgataagtgcgtgctggacatgcggagcatggacttcaagagcaactccgccgtggcctggtccaacaagtccgatttcgcctgcgccaacgccttcaacaacagcattatccccgaggacacattcttcccaagcagcgacgtgccctgcgacgtgaagctggtggaaaagagcttcgagacagacaccaacctgaacttccagaacctgagcgtgatcggcttcagaatcctgctgctgaaagtggccggctttaacctgctgatgaccctgcggctgtggtccagccgcgccaagagaagcggatctggcgtgaagcagaccctgaatttcgacctgctgaagctggctggcgacgtggaatccaacccaggccctactagtatggactggatttggcgcatccttttccttgtcggcgctgctaccggcgcgcattccttcgaacaagttcagctggttcagagcggagccgaagtgaagaaacctggggcctctgtgaaggtgtcctgcaaggcttccggctataccttcaccagcttttggctgaactgggtccgacaggcccctggacaaggactggaatggatgggcaacatctaccccagcaccagctacaccgtgtacaaccagaaattcaaggaccgcgtgaccatgaccagggacaccagcacaagcacagtgtacatggaactgagcagcctgcggagcgaggataccgccgtgtattattgcgccagaacctggcggggcaacagcttcgattattggggccagggaaccaccgtgaccgtgtcatctacgcgtgaggacctgaagaacgtgttcccacctgaggtggccgtgttcgagcctagcaaggccgagatcgcccacacccagaaagccaccctcgtgtgcctggctaccggcttctaccccgaccatgtggaactgtcttggtgggtcaacggcaaagaggtgcacagcggcgtgtgtaccgacccccagccactgaaagaacagcccgccctgaacgacagccggtactgcctgagcagcagactgagagtgtccgccaccttctggcagaacccccggaaccacttcagatgccaggtgcagttctacggcctgagcgagaacgacgagtggacccaggacagagccaagcccgtgacccagatcgtgtctgccgaagcctggggcagagccgattgcggcatcaccagcgccagctaccaccagggcgtgctgagcgccaccatcctgtacgagatcctgctgggcaaggccaccctgtacgccgtgctggtgtctgccctggtgctgatggctatggtcaagcggaaggacagccgggga

SEQ ID NO: 37475 - DNA, 1872 bp, synthetic construct
  source 1..1872: mol_type = other DNA
atggccttaccagtgaccgccttgctcctgccgctggccttgctgctccacgccgccaggccggacatcgtgatgacacagagccctgatagcctggccgtgtctctgggagagagagccaccatcaactgcaagagcagccagagcctgctgaacagcggcaaccagaagaactacctggcctggtatcagcagaagcccggccagcctcctaagctgctgatctactggggcagcaccagatccacaggcgtgcccgatagattttctggctctggcagcggcaccgacttcaccctgacaatttctagcctgcaagccgaggacgtggccgtgtactactgccagaacgactacacataccccttcaccttcggccagggcaccaagctggaaatcaaactcgaggacctgaagaacgtgttcccacctgaggtggccgtgttcgagcctagcaaggccgagatcgcccacacccagaaagccaccctcgtgtgcctggctaccggcttctaccccgaccatgtggaactgtcttggtgggtcaacggcaaagaggtgcacagcggcgtgtgtaccgacccccagccactgaaagaacagcccgccctgaacgacagccggtactgcctgagcagcagactgagagtgtccgccaccttctggcagaacccccggaaccacttcagatgccaggtgcagttctacggcctgagcgagaacgacgagtggacccaggacagagccaagcccgtgacccagatcgtgtctgccgaagcctggggcagagccgattgcggcatcaccagcgccagctaccaccagggcgtgctgagcgccaccatcctgtacgagatcctgctgggcaaggccaccctgtacgccgtgctggtgtctgccctggtgctgatggctatggtcaagcggaaggacagccggggaagggccaagcgatctggatctggagcaacaaacttctcactactcaaacaagcaggtgacgtggaggagaatcccgggcctactagtatggactggatttggcgcatccttttccttgtcggcgctgctaccggcgcgcattccttcgaacaagttcagctggttcagagcggagccgaagtgaagaaacctggggcctctgtgaaggtgtcctgcaaggcttccggctataccttcaccagcttttggctgaactgggtccgacaggcccctggacaaggactggaatggatgggcaacatctaccccagcaccagctacaccgtgtacaaccagaaattcaaggaccgcgtgaccatgaccagggacaccagcacaagcacagtgtacatggaactgagcagcctgcggagcgaggataccgccgtgtattattgcgccagaacctggcggggcaacagcttcgattattggggccagggaaccaccgtgaccgtgtcatctacgcgtatccagaaccctgatcctgccgtgtaccagctgcgggatagcaagagcagcgacaagagcgtgtgtctgttcaccgacttcgacagccagaccaacgtgtcccagagcaaggactccgacgtgtacatcaccgataagtgcgtgctggacatgcggagcatggacttcaagagcaactccgccgtggcctggtccaacaagtccgatttcgcctgcgccaacgccttcaacaacagcattatccccgaggacacattcttcccaagcagcgacgtgccctgcgacgtgaagctggtggaaaagagcttcgagacagacaccaacctgaacttccagaacctgagcgtgatcggcttcagaatcctgctgctgaaagtggccggctttaacctgctgatgaccctgcggctgtggtccagc

SEQ ID NO: 37476 - DNA, 1872 bp, synthetic construct
  source 1..1872: mol_type = other DNA
atggccttaccagtgaccgccttgctcctgccgctggccttgctgctccacgccgccaggccggacatcgtgatgacacagagccctgatagcctggccgtgtctctgggagagagagccaccatcaactgcaagagcagccagagcctgctgaacagcggcaaccagaagaactacctggcctggtatcagcagaagcccggccagcctcctaagctgctgatctactggggcagcaccagatccacaggcgtgcccgatagattttctggctctggcagcggcaccgacttcaccctgacaatttctagcctgcaagccgaggacgtggccgtgtactactgccagaacgactacacataccccttcaccttcggccagggcaccaagctggaaatcaaactcgaggacctgaagaacgtgttcccacctgaggtggccgtgttcgagcctagcgaggccgagatcagccacacccagaaagccaccctcgtgtgcctggctaccggcttctaccccgaccatgtggaactgtcttggtgggtcaacggcaaagaggtgcacagcggcgtgtgtaccgacccccagccactgaaagaacagcccgccctgaacgacagccggtactgcctgagcagcagactgagagtgtccgccaccttctggcagaacccccggaaccacttcagatgccaggtgcagttctacggcctgagcgagaacgacgagtggacccaggacagagccaagcccgtgacccagatcgtgtctgccgaagcctggggcagagccgattgcggctttaccagcgagagctaccagcagggcgtgctgagcgccaccatcctgtacgagatcctgctgggcaaggccaccctgtacgccgtgctggtgtctgccctggtgctgatggctatggtcaagcggaaggacagccggggaagggccaagcgatctggatctggagcaacaaacttctcactactcaaacaagcaggtgacgtggaggagaatcccgggcctactagtatggactggatttggcgcatccttttccttgtcggcgctgctaccggcgcgcattccttcgaacaagttcagctggttcagagcggagccgaagtgaagaaacctggggcctctgtgaaggtgtcctgcaaggcttccggctataccttcaccagcttttggctgaactgggtccgacaggcccctggacaaggactggaatggatgggcaacatctaccccagcaccagctacaccgtgtacaaccagaaattcaaggaccgcgtgaccatgaccagggacaccagcacaagcacagtgtacatggaactgagcagcctgcggagcgaggataccgccgtgtattattgcgccagaacctggcggggcaacagcttcgattattggggccagggaaccaccgtgaccgtgtcatctacgcgtatccagaaccctgatcctgccgtgtaccagctgcgggatagcaagagcagcgacaagagcgtgtgtctgttcaccgacttcgacagccagaccaacgtgtcccagagcaaggactccgacgtgtacatcaccgataagtgcgtgctggacatgcggagcatggacttcaagagcaactccgccgtggcctggtccaacaagtccgatttcgcctgcgccaacgccttcaacaacagcattatccccgaggacacattcttcccaagccccgagagcagctgcgacgtgaagctggtggaaaagagcttcgagacagacaccaacctgaacttccagaacctgagcgtgatcggcttcagaatcctgctgctgaaagtggccggctttaacctgctgatgaccctgcggctgtggtccagc

SEQ ID NO: 37477 - DNA, 1884 bp, synthetic construct
  source 1..1884: mol_type = other DNA
atggccttaccagtgaccgccttgctcctgccgctggccttgctgctccacgccgccaggccggacatcgtgatgacacagagccctgatagcctggccgtgtctctgggagagagagccaccatcaactgcaagagcagccagagcctgctgaacagcggcaaccagaagaactacctggcctggtatcagcagaagcccggccagcctcctaagctgctgatctactggggcagcaccagatccacaggcgtgcccgatagattttctggctctggcagcggcaccgacttcaccctgacaatttctagcctgcaagccgaggacgtggccgtgtactactgccagaacgactacacataccccttcaccttcggccagggcaccaagctggaaatcaaactcgagatccagaaccctgatcctgccgtgtaccagctgcgggatagcaagagcagcgacaagagcgtgtgtctgttcaccgacttcgacagccagaccaacgtgtcccagagcaaggactccgacgtgtacatcaccgataagtgcgtgctggacatgcggagcatggacttcaagagcaactccgccgtggcctggtccaacaagtccgatttcgcctgcgccaacgccttcaacaacagcattatccccgaggacacattcttcccaagccccgagagcagctgcgacgtgaagctggtggaaaagagcttcgagacagacaccaacctgaacttccagaacctgagcgtgatcggcttcagaatcctgctgctgaaagtggccggctttaacctgctgatgaccctgcggctgtggtccagccgcgccaagagaagcggatctggcgtgaagcagaccctgaatttcgacctgctgaagctggctggcgacgtggaatccaacccaggccctactagtatggactggatttggcgcatccttttccttgtcggcgctgctaccggcgcgcattccttcgaacaagttcagctggttcagagcggagccgaagtgaagaaacctggggcctctgtgaaggtgtcctgcaaggcttccggctataccttcaccagcttttggctgaactgggtccgacaggcccctggacaaggactggaatggatgggcaacatctaccccagcaccagctacaccgtgtacaaccagaaattcaaggaccgcgtgaccatgaccagggacaccagcacaagcacagtgtacatggaactgagcagcctgcggagcgaggataccgccgtgtattattgcgccagaacctggcggggcaacagcttcgattattggggccagggaaccaccgtgaccgtgtcatctacgcgtgaggacctgaagaacgtgttcccacctgaggtggccgtgttcgagcctagcgaggccgagatcagccacacccagaaagccaccctcgtgtgcctggctaccggcttctaccccgaccatgtggaactgtcttggtgggtcaacggcaaagaggtgcacagcggcgtgtgtaccgacccccagccactgaaagaacagcccgccctgaacgacagccggtactgcctgagcagcagactgagagtgtccgccaccttctggcagaacccccggaaccacttcagatgccaggtgcagttctacggcctgagcgagaacgacgagtggacccaggacagagccaagcccgtgacccagatcgtgtctgccgaagcctggggcagagccgattgcggctttaccagcgagagctaccagcagggcgtgctgagcgccaccatcctgtacgagatcctgctgggcaaggccaccctgtacgccgtgctggtgtctgccctggtgctgatggctatggtcaagcggaaggacagccgggga

SEQ ID NO: 37478 - DNA, 1920 bp, synthetic construct
  source 1..1920: mol_type = other DNA
atggccttaccagtgaccgccttgctcctgccgctggccttgctgctccacgccgccaggccgctcgaggaggacctgaagaacgtgttcccacctgaggtggccgtgttcgagcctagcaaggccgagatcgcccacacccagaaagccaccctcgtgtgcctggctaccggcttctaccccgaccatgtggaactgtcttggtgggtcaacggcaaagaggtgcacagcggcgtgtgtaccgacccccagccactgaaagaacagcccgccctgaacgacagccggtactgcctgagcagcagactgagagtgtccgccaccttctggcagaacccccggaaccacttcagatgccaggtgcagttctacggcctgagcgagaacgacgagtggacccaggacagagccaagcccgtgacccagatcgtgtctgccgaagcctggggcagagccgattgcggcatcaccagcgccagctaccaccagggcgtgctgagcgccaccatcctgtacgagatcctgctgggcaaggccaccctgtacgccgtgctggtgtctgccctggtgctgatggctatggtcaagcggaaggacagccggggaagggccaagcgatctggatctggagcaacaaacttctcactactcaaacaagcaggtgacgtggaggagaatcccgggcctactagcatggccttaccagtgaccgccttgctcctgccgctggccttgctgctccacgccgccaggccggacatcgtgatgacacagagccctgatagcctggccgtgtctctgggagagagagccaccatcaactgcaagagcagccagagcctgctgaacagcggcaaccagaagaactacctggcctggtatcagcagaagcccggccagcctcctaagctgctgatctactggggcagcaccagatccacaggcgtgcccgatagattttctggctctggcagcggcaccgacttcaccctgacaatttctagcctgcaagccgaggacgtggccgtgtactactgccagaacgactacacataccccttcaccttcggccagggcaccaagctggaaatcaaaggcggaggcggaagtggaggcggaggatctggcggcggaggctctcaagttcagctggttcagagcggagccgaagtgaagaaacctggggcctctgtgaaggtgtcctgcaaggcttccggctataccttcaccagcttttggctgaactgggtccgacaggcccctggacaaggactggaatggatgggcaacatctaccccagcaccagctacaccgtgtacaaccagaaattcaaggaccgcgtgaccatgaccagggacaccagcacaagcacagtgtacatggaactgagcagcctgcggagcgaggataccgccgtgtattattgcgccagaacctggcggggcaacagcttcgattattggggccagggaaccaccgtgaccgtgtcatctacgcgtatccagaaccctgatcctgccgtgtaccagctgcgggatagcaagagcagcgacaagagcgtgtgtctgttcaccgacttcgacagccagaccaacgtgtcccagagcaaggactccgacgtgtacatcaccgataagtgcgtgctggacatgcggagcatggacttcaagagcaactccgccgtggcctggtccaacaagtccgatttcgcctgcgccaacgccttcaacaacagcattatccccgaggacacattcttcccaagcagcgacgtgccctgcgacgtgaagctggtggaaaagagcttcgagacagacaccaacctgaacttccagaacctgagcgtgatcggcttcagaatcctgctgctgaaagtggccggctttaacctgctgatgaccctgcggctgtggtccagc

SEQ ID NO: 37479 - DNA, 1941 bp, synthetic construct
  source 1..1941: mol_type = other DNA
atggccttaccagtgaccgccttgctcctgccgctggccttgctgctccacgccgccaggccgctcgagggctccggcgatcgccctgatcctgccgtgtaccagctgcgggatagcaagagcagcgacaagagcgtgtgtctgttcaccgacttcgacagccagaccaacgtgtcccagagcaaggactccgacgtgtacatcaccgataagtgcgtgctggacatgcggagcatggacttcaagagcaactccgccgtggcctggtccaacaagtccgatttcgcctgcgccaacgccttcaacaacagcattatccccgaggacacattcttcccaagccccgagagcagctgcgacgtgaagctggtggaaaagagcttcgagacagacaccaacctgaacttccagaacctgagcgtgatcggcttcagaatcctgctgctgaaagtggccggctttaacctgctgatgaccctgcggctgtggtccagctctagtcgcgccaagagaagcggatctggcgtgaagcagaccctgaatttcgacctgctgaagctggctggcgacgtggaatccaacccaggccccactagcatggccttaccagtgaccgccttgctcctgccgctggccttgctgctccacgccgccaggccggacatcgtgatgacacagagccctgatagcctggccgtgtctctgggagagagagccaccatcaactgcaagagcagccagagcctgctgaacagcggcaaccagaagaactacctggcctggtatcagcagaagcccggccagcctcctaagctgctgatctactggggcagcaccagatccacaggcgtgcccgatagattttctggctctggcagcggcaccgacttcaccctgacaatttctagcctgcaagccgaggacgtggccgtgtactactgccagaacgactacacataccccttcaccttcggccagggcaccaagctggaaatcaaaggcggaggcggaagtggaggcggaggatctggcggcggaggctctcaagttcagctggttcagagcggagccgaagtgaagaaacctggggcctctgtgaaggtgtcctgcaaggcttccggctataccttcaccagcttttggctgaactgggtccgacaggcccctggacaaggactggaatggatgggcaacatctaccccagcaccagctacaccgtgtacaaccagaaattcaaggaccgcgtgaccatgaccagggacaccagcacaagcacagtgtacatggaactgagcagcctgcggagcgaggataccgccgtgtattattgcgccagaacctggcggggcaacagcttcgattattggggccagggaaccaccgtgaccgtgtcatctacgcgtgaggacctgaagaacgtgttcccacctgaggtggccgtgttcgagcctagcgaggccgagatcagccacacccagaaagccaccctcgtgtgcctggctaccggcttctaccccgaccatgtggaactgtcttggtgggtcaacggcaaagaggtgcacagcggcgtgtgtaccgacccccagccactgaaagaacagcccgccctgaacgacagccggtactgcctgagcagcagactgagagtgtccgccaccttctggcagaacccccggaaccacttcagatgccaggtgcagttctacggcctgagcgagaacgacgagtggacccaggacagagccaagcccgtgacccagatcgtgtctgccgaagcctggggcagagccgattgcggctttaccagcgagagctaccagcagggcgtgctgagcgccaccatcctgtacgagatcctgctgggcaaggccaccctgtacgccgtgctggtgtctgccctggtgctgatggctatggtcaagcggaaggacagccgggga

SEQ ID NO: 37480 - DNA, 1872 bp, synthetic construct
  source 1..1872: mol_type = other DNA
atggccttaccagtgaccgccttgctcctgccgctggccttgctgctccacgccgccaggccggacatcgtgatgacacagagccctgatagcctggccgtgtctctgggagagagagccaccatcaactgcaagagcagccagagcctgctgaacagcggcaaccagaagaactacctggcctggtatcagcagaagcccggccagcctcctaagctgctgatctactggggcagcaccagatccacaggcgtgcccgatagattttctggctctggcagcggcaccgacttcaccctgacaatttctagcctgcaagccgaggacgtggccgtgtactactgccagaacgactacacataccccttcaccttcggccagggcaccaagctggaaatcaaactcgaggacctgaagaacgtgttcccacctgaggtggccgtgttcgagcctagcgaggccgagatcagccacacccagaaagccaccctcgtgtgcctggctaccggcttctaccccgaccatgtggaactgtcttggtgggtcaacggcaaagaggtgcacagcggcgtgtctaccgacccccagccactgaaagaacagcccgccctgaacgacagccggtactgcctgagcagcagactgagagtgtccgccaccttctggcagaacccccggaaccacttcagatgccaggtgcagttctacggcctgagcgagaacgacgagtggacccaggacagagccaagcccgtgacccagatcgtgtctgccgaagcctggggcagagccgattgcggctttaccagcgagagctaccagcagggcgtgctgagcgccaccatcctgtacgagatcctgctgggcaaggccaccctgtacgccgtgctggtgtctgccctggtgctgatggctatggtcaagcggaaggacagccggggaagggccaagcgatctggatctggagcaacaaacttctcactactcaaacaagcaggtgacgtggaggagaatcccgggcctactagtatggactggatttggcgcatccttttccttgtcggcgctgctaccggcgcgcattccttcgaacaagttcagctggttcagagcggagccgaagtgaagaaacctggggcctctgtgaaggtgtcctgcaaggcttccggctataccttcaccagcttttggctgaactgggtccgacaggcccctggacaaggactggaatggatgggcaacatctaccccagcaccagctacaccgtgtacaaccagaaattcaaggaccgcgtgaccatgaccagggacaccagcacaagcacagtgtacatggaactgagcagcctgcggagcgaggataccgccgtgtattattgcgccagaacctggcggggcaacagcttcgattattggggccagggaaccaccgtgaccgtgtcatctacgcgtatccagaaccctgatcctgccgtgtaccagctgcgggatagcaagagcagcgacaagagcgtgtgtctgttcaccgacttcgacagccagaccaacgtgtcccagagcaaggactccgacgtgtacatcaccgataagaccgtgctggacatgcggagcatggacttcaagagcaactccgccgtggcctggtccaacaagtccgatttcgcctgcgccaacgccttcaacaacagcattatccccgaggacacattcttcccaagccccgagagcagctgcgacgtgaagctggtggaaaagagcttcgagacagacaccaacctgaacttccagaacctgagcgtgatcggcttcagaatcctgctgctgaaagtggccggctttaacctgctgatgaccctgcggctgtggtccagc

SEQ ID NO: 37481 - DNA, 1896 bp, synthetic construct
  source 1..1896: mol_type = other DNA
atggccttaccagtgaccgccttgctcctgccgctggccttgctgctccacgccgccaggccggacatcgtgatgacacagagccctgatagcctggccgtgtctctgggagagagagccaccatcaactgcaagagcagccagagcctgctgaacagcggcaaccagaagaactacctggcctggtatcagcagaagcccggccagcctcctaagctgctgatctactggggcagcaccagatccacaggcgtgcccgatagattttctggctctggcagcggcaccgacttcaccctgacaatttctagcctgcaagccgaggacgtggccgtgtactactgccagaacgactacacataccccttcaccttcggccagggcaccaagctggaaatcaaactcgaggacaagcagctggacgccgacgtgtcccccaagcctaccatcttcctgccctctatcgccgagacaaagctccagaaggccggcacctacctgtgcctgctggaaaagttcttcccagatgtgattaagatccactggcaggaaaagaagtccaacaccatcctgggcagccaggaaggcaacaccatgaagaccaacgacacctacatgaagttcagctggctgaccgtgcccgagaagtccctggacaaagaacacagatgcatcgtgcggcacgaaaacaacaagaacggcgtggaccaggaaatcatcttcccacccatcaagaccgatgtgattacaatggaccccaaggacaactgctccaaggacgccaacgataccctgctgctccagctgaccaacaccagcgcctactacatgtacttgttgctgctgctgaagtccgtggtgtacttcgccatcatcacatgctgcctgctgcggagaaccgccttctgctgcaacggcgagaagtctagggccaagcgatctggatctggagcaacaaacttctcactactcaaacaagcaggtgacgtggaggagaatcccgggcctactagtatggactggatttggcgcatccttttccttgtcggcgctgctaccggcgcgcattccttcgaacaagttcagctggttcagagcggagccgaagtgaagaaacctggggcctctgtgaaggtgtcctgcaaggcttccggctataccttcaccagcttttggctgaactgggtccgacaggcccctggacaaggactggaatggatgggcaacatctaccccagcaccagctacaccgtgtacaaccagaaattcaaggaccgcgtgaccatgaccagggacaccagcacaagcacagtgtacatggaactgagcagcctgcggagcgaggataccgccgtgtattattgcgccagaacctggcggggcaacagcttcgattattggggccagggaaccaccgtgaccgtgtcatctacgcgtagccagcctcacaccaagcccagcgtgttcgtgatgaagaacggcaccaacgtggcctgcctcgtgaaagagttctaccccaaggacatcaggatcaacctggtgtccagcaagaagatcaccgagttcgaccccgccatcgtgatctcccccagcggcaagtacaacgccgtgaagctggggaagtacgaggacagcaacagcgtgacctgctccgtgcagcacgacaacaagaccgtgcacagcaccgactttgaagtgaaaaccgactccaccgaccacgtgaagcccaaagagacagagaacaccaagcagcccagcaagagctgccacaagcccaaggccatcgtgcacaccgagaaagtgaacatgatgagcctgaccgtgctgggcctgcggatgctgttcgccaaaaccgtggccgtgaacttcctgctgaccgccaagctgttcttcctc

SEQ ID NO: 37482 - DNA, 1896 bp, synthetic construct
  source 1..1896: mol_type = other DNA
atggccttaccagtgaccgccttgctcctgccgctggccttgctgctccacgccgccaggccggacatcgtgatgacacagagccctgatagcctggccgtgtctctgggagagagagccaccatcaactgcaagagcagccagagcctgctgaacagcggcaaccagaagaactacctggcctggtatcagcagaagcccggccagcctcctaagctgctgatctactggggcagcaccagatccacaggcgtgcccgatagattttctggctctggcagcggcaccgacttcaccctgacaatttctagcctgcaagccgaggacgtggccgtgtactactgccagaacgactacacataccccttcaccttcggccagggcaccaagctggaaatcaaactcgagagccagcctcacaccaagcccagcgtgttcgtgatgaagaacggcaccaacgtggcctgcctcgtgaaagagttctaccccaaggacatcaggatcaacctggtgtccagcaagaagatcaccgagttcgaccccgccatcgtgatctcccccagcggcaagtacaacgccgtgaagctggggaagtacgaggacagcaacagcgtgacctgctccgtgcagcacgacaacaagaccgtgcacagcaccgactttgaagtgaaaaccgactccaccgaccacgtgaagcccaaagagacagagaacaccaagcagcccagcaagagctgccacaagcccaaggccatcgtgcacaccgagaaagtgaacatgatgagcctgaccgtgctgggcctgcggatgctgttcgccaaaaccgtggccgtgaacttcctgctgaccgccaagctgttcttcctcagggccaagcgatctggatctggagcaacaaacttctcactactcaaacaagcaggtgacgtggaggagaatcccgggcctactagtatggactggatttggcgcatccttttccttgtcggcgctgctaccggcgcgcattccttcgaacaagttcagctggttcagagcggagccgaagtgaagaaacctggggcctctgtgaaggtgtcctgcaaggcttccggctataccttcaccagcttttggctgaactgggtccgacaggcccctggacaaggactggaatggatgggcaacatctaccccagcaccagctacaccgtgtacaaccagaaattcaaggaccgcgtgaccatgaccagggacaccagcacaagcacagtgtacatggaactgagcagcctgcggagcgaggataccgccgtgtattattgcgccagaacctggcggggcaacagcttcgattattggggccagggaaccaccgtgaccgtgtcatctacgcgtgacaagcagctggacgccgacgtgtcccccaagcctaccatcttcctgccctctatcgccgagacaaagctccagaaggccggcacctacctgtgcctgctggaaaagttcttcccagatgtgattaagatccactggcaggaaaagaagtccaacaccatcctgggcagccaggaaggcaacaccatgaagaccaacgacacctacatgaagttcagctggctgaccgtgcccgagaagtccctggacaaagaacacagatgcatcgtgcggcacgaaaacaacaagaacggcgtggaccaggaaatcatcttcccacccatcaagaccgatgtgattacaatggaccccaaggacaactgctccaaggacgccaacgataccctgctgctccagctgaccaacaccagcgcctactacatgtacttgttgctgctgctgaagtccgtggtgtacttcgccatcatcacatgctgcctgctgcggagaaccgccttctgctgcaacggcgagaagtct

SEQ ID NO: 37483 - DNA, 1941 bp, synthetic construct
  source 1..1941: mol_type = other DNA
atggccttaccagtgaccgccttgctcctgccgctggccttgctgctccacgccgccaggccgctcgaggacaagcagctggacgccgacgtgtcccccaagcctaccatcttcctgccctctatcgccgagacaaagctccagaaggccggcacctacctgtgcctgctggaaaagttcttcccagatgtgattaagatccactggcaggaaaagaagtccaacaccatcctgggcagccaggaaggcaacaccatgaagaccaacgacacctacatgaagttcagctggctgaccgtgcccgagaagtccctggacaaagaacacagatgcatcgtgcggcacgaaaacaacaagaacggcgtggaccaggaaatcatcttcccacccatcaagaccgatgtgattacaatggaccccaaggacaactgctccaaggacgccaacgataccctgctgctccagctgaccaacaccagcgcctactacatgtacttgttgctgctgctgaagtccgtggtgtacttcgccatcatcacatgctgcctgctgcggagaaccgccttctgctgcaacggcgagaagtctagggccaagcgatctggatctggagcaacaaacttctcactactcaaacaagcaggtgacgtggaggagaatcccgggcctactagcatggccttaccagtgaccgccttgctcctgccgctggccttgctgctccacgccgccaggccggacatcgtgatgacacagagccctgatagcctggccgtgtctctgggagagagagccaccatcaactgcaagagcagccagagcctgctgaacagcggcaaccagaagaactacctggcctggtatcagcagaagcccggccagcctcctaagctgctgatctactggggcagcaccagatccacaggcgtgcccgatagattttctggctctggcagcggcaccgacttcaccctgacaatttctagcctgcaagccgaggacgtggccgtgtactactgccagaacgactacacataccccttcaccttcggccagggcaccaagctggaaatcaaaggcggaggcggaagtggaggcggaggatctggcggcggaggctctcaagttcagctggttcagagcggagccgaagtgaagaaacctggggcctctgtgaaggtgtcctgcaaggcttccggctataccttcaccagcttttggctgaactgggtccgacaggcccctggacaaggactggaatggatgggcaacatctaccccagcaccagctacaccgtgtacaaccagaaattcaaggaccgcgtgaccatgaccagggacaccagcacaagcacagtgtacatggaactgagcagcctgcggagcgaggataccgccgtgtattattgcgccagaacctggcggggcaacagcttcgattattggggccagggaaccaccgtgaccgtgtcatctacgcgtagccagcctcacaccaagcccagcgtgttcgtgatgaagaacggcaccaacgtggcctgcctcgtgaaagagttctaccccaaggacatcaggatcaacctggtgtccagcaagaagatcaccgagttcgaccccgccatcgtgatctcccccagcggcaagtacaacgccgtgaagctggggaagtacgaggacagcaacagcgtgacctgctccgtgcagcacgacaacaagaccgtgcacagcaccgactttgaagtgaaaaccgactccaccgaccacgtgaagcccaaagagacagagaacaccaagcagcccagcaagagctgccacaagcccaaggccatcgtgcacaccgagaaagtgaacatgatgagcctgaccgtgctgggcctgcggatgctgttcgccaaaaccgtggccgtgaacttcctgctgaccgccaagctgttcttcctc

SEQ ID NO: 37484 - DNA, 2403 bp, synthetic construct
  source 1..2403: mol_type = other DNA
atggccttaccagtgaccgccttgctcctgccgctggccttgctgctccacgccgccaggccggacatcgtgatgacacagagccctgatagcctggccgtgtctctgggagagagagccaccatcaactgcaagagcagccagagcctgctgaacagcggcaaccagaagaactacctggcctggtatcagcagaagcccggccagcctcctaagctgctgatctactggggcagcaccagatccacaggcgtgcccgatagattttctggctctggcagcggcaccgacttcaccctgacaatttctagcctgcaagccgaggacgtggccgtgtactactgccagaacgactacacataccccttcaccttcggccagggcaccaagctggaaatcaaaggacagcctaaggccaatcctaccgtgacactgttccctccaagcagcgaagaactccaggccaacaaggccacacttgtgtgcctgatctccgacttctaccctggggctgtgacagtggcttggaaggccgatggatctcctgtgaaagccggcgtggaaaccaccaagccatccaagcagagcaacaacaaatacgccgccagctcctacctgagcctgacacctgagcagtggaagtcccacagatcctacagctgccaagtgacccacgaaggcagcaccgtggaaaagacagtggcccctacagagtgcagcggatcccagagcttcggcctgctggaccccaagctgtgctacctgctggatggcatcctgttcatctacggcgtgatcctgaccgccctgttcctgagagtgaagttcagcagaagcgccgacgcccctgcctaccagcagggacagaaccaactgtacaacgagctgaacctgggcagacgggaagagtacgacgtgctggacaagcggagaggcagggaccctgagatgggcggaaagccccagcggagaaagaacccccaggaaggactgtataacgaactccagaaagacaagatggccgaagcctacagcgagatcggcatgaagggcgagcggagaagaggcaagggccacgatggcctgtaccagggcctgagcaccgccaccaaggacacctatgacgccctgcacatgcaggccctgcctccaagaagggccaagcgatctggatctggagcaacaaacttctcactactcaaacaagcaggtgacgtggaggagaatcccgggcctactagtatggactggatttggcgcatccttttccttgtcggcgctgctaccggcgcgcattccttcgaacaagttcagctggttcagagcggagccgaagtgaagaaacctggggcctctgtgaaggtgtcctgcaaggcttccggctataccttcaccagcttttggctgaactgggtccgacaggcccctggacaaggactggaatggatgggcaacatctaccccagcaccagctacaccgtgtacaaccagaaattcaaggaccgcgtgaccatgaccagggacaccagcacaagcacagtgtacatggaactgagcagcctgcggagcgaggataccgccgtgtattattgcgccagaacctggcggggcaacagcttcgattattggggccagggaaccaccgtgaccgtgtcatctgcctctacaaagggaccctccgtgtttcctctggctcccagcagcaagtctacaagcggaggaacagccgctctgggctgcctggtcaaggattactttcccgagcctgtgaccgtgtcctggaatagcggagcactgacaagcggcgtgcacacctttccagccgtgctgcaaagcagcggcctgtactctctgagcagcgtggtcacagtgcctagctctagcctgggcacccagacctacatctgcaatgtgaaccacaagcctagcaacaccaaggtggacaagagagtggaacccaagagctgtggtacccagagttttgggttgttggaccctaaattgtgctatctgttggacggaatcctgttcatttacggagtgatcctgaccgcattgttcctgcgggttaagttttccagatccgcagacgcacccgcttaccaacaagggcagaaccaactctacaatgaacttaatttggggcggagggaagagtacgacgttctggacaaaaggaggggacgagatcccgagatgggcggaaagcctcagcgaaggaagaatccgcaagaggggctttataacgaactccagaaagataaaatggcagaagcctatagtgagattgggatgaagggagaaaggaggaggggtaaaggtcacgatgggttgtaccaaggattgagcacagccactaaagatacctatgatgcgctccacatgcaggccctgccgccaaga

SEQ ID NO: 37485 - DNA, 2460 bp, synthetic construct
  source 1..2460: mol_type = other DNA
atggccttaccagtgaccgccttgctcctgccgctggccttgctgctccacgccgccaggccggacatcgtgatgacacagagccctgatagcctggccgtgtctctgggagagagagccaccatcaactgcaagagcagccagagcctgctgaacagcggcaaccagaagaactacctggcctggtatcagcagaagcccggccagcctcctaagctgctgatctactggggcagcaccagatccacaggcgtgcccgatagattttctggctctggcagcggcaccgacttcaccctgacaatttctagcctgcaagccgaggacgtggccgtgtactactgccagaacgactacacataccccttcaccttcggccagggcaccaagctggaaatcaaactcgaggacctgaagaacgtgttcccacctgaggtggccgtgttcgagcctagcgaggccgagatcagccacacccagaaagccaccctcgtgtgcctggctaccggcttctaccccgaccatgtggaactgtcttggtgggtcaacggcaaagaggtgcacagcggcgtgtctaccgacccccagccactgaaagaacagcccgccctgaacgacagccggtactgcctgagcagcagactgagagtgtccgccaccttctggcagaacccccggaaccacttcagatgccaggtgcagttctacggcctgagcgagaacgacgagtggacccaggacagagccaagcccgtgacccagatcgtgtctgccgaagcctggggcagagccgattgcggatcccagagcttcggcctgctggaccccaagctgtgctacctgctggatggcatcctgttcatctacggcgtgatcctgaccgccctgttcctgagagtgaagttcagcagaagcgccgacgcccctgcctaccagcagggacagaaccaactgtacaacgagctgaacctgggcagacgggaagagtacgacgtgctggacaagcggagaggcagggaccctgagatgggcggaaagccccagcggagaaagaacccccaggaaggactgtataacgaactccagaaagacaagatggccgaagcctacagcgagatcggcatgaagggcgagcggagaagaggcaagggccacgatggcctgtaccagggcctgagcaccgccaccaaggacacctatgacgccctgcacatgcaggccctgcctccaagaagggccaagcgatctggatctggagcaacaaacttctcactactcaaacaagcaggtgacgtggaggagaatcccgggcctactagtatggactggatttggcgcatccttttccttgtcggcgctgctaccggcgcgcattccttcgaacaagttcagctggttcagagcggagccgaagtgaagaaacctggggcctctgtgaaggtgtcctgcaaggcttccggctataccttcaccagcttttggctgaactgggtccgacaggcccctggacaaggactggaatggatgggcaacatctaccccagcaccagctacaccgtgtacaaccagaaattcaaggaccgcgtgaccatgaccagggacaccagcacaagcacagtgtacatggaactgagcagcctgcggagcgaggataccgccgtgtattattgcgccagaacctggcggggcaacagcttcgattattggggccagggaaccaccgtgaccgtgtcatctacgcgtatccagaaccctgatcctgccgtgtaccagctgcgggatagcaagagcagcgacaagagcgtgtgtctgttcaccgacttcgacagccagaccaacgtgtcccagagcaaggactccgacgtgtacatcaccgataagaccgtgctggacatgcggagcatggacttcaagagcaactccgccgtggcctggtccaacaagtccgatttcgcctgcgccaacgccttcaacaacagcattatccccgaggacacattcttcccaagccccgagagcagctgcggtacccagagttttgggttgttggaccctaaattgtgctatctgttggacggaatcctgttcatttacggagtgatcctgaccgcattgttcctgcgggttaagttttccagatccgcagacgcacccgcttaccaacaagggcagaaccaactctacaatgaacttaatttggggcggagggaagagtacgacgttctggacaaaaggaggggacgagatcccgagatgggcggaaagcctcagcgaaggaagaatccgcaagaggggctttataacgaactccagaaagataaaatggcagaagcctatagtgagattgggatgaagggagaaaggaggaggggtaaaggtcacgatgggttgtaccaaggattgagcacagccactaaagatacctatgatgcgctccacatgcaggccctgccgccaaga

SEQ ID NO: 37486 - DNA, 2586 bp, synthetic construct
  source 1..2586: mol_type = other DNA
atggccttaccagtgaccgccttgctcctgccgctggccttgctgctccacgccgccaggccggacatcgtgatgacacagagccctgatagcctggccgtgtctctgggagagagagccaccatcaactgcaagagcagccagagcctgctgaacagcggcaaccagaagaactacctggcctggtatcagcagaagcccggccagcctcctaagctgctgatctactggggcagcaccagatccacaggcgtgcccgatagattttctggctctggcagcggcaccgacttcaccctgacaatttctagcctgcaagccgaggacgtggccgtgtactactgccagaacgactacacataccccttcaccttcggccagggcaccaagctggaaatcaaactcgaggaggacctgaagaacgtgttcccacctgaggtggccgtgttcgagcctagcgaggccgagatcagccacacccagaaagccaccctcgtgtgcctggctaccggcttctaccccgaccatgtggaactgtcttggtgggtcaacggcaaagaggtgcacagcggcgtgtctaccgacccccagccactgaaagaacagcccgccctgaacgacagccggtactgcctgagcagcagactgagagtgtccgccaccttctggcagaacccccggaaccacttcagatgccaggtgcagttctacggcctgagcgagaacgacgagtggacccaggacagagccaagcccgtgacccagatcgtgtctgccgaagcctggggcagagccgattgcggatcccagagcttcggcctgctggaccccaagctgtgctacctgctggatggcatcctgttcatctacggcgtgatcctgaccgccctgttcctgagagtgaagttcagcagaagcgccgacgcccctgcctaccagcagggacagaaccaactgtacaacgagctgaacctgggcagacgggaagagtacgacgtgctggacaagcggagaggcagggaccctgagatgggcggaaagccccagcggagaaagaacccccaggaaggactgtataacgaactccagaaagacaagatggccgaagcctacagcgagatcggcatgaagggcgagcggagaagaggcaagggccacgatggcctgtaccagggcctgagcaccgccaccaaggacacctatgacgccctgcacatgcaggccctgcctccaagaagggccaagcgatctggatctggagcaacaaacttctcactactcaaacaagcaggtgacgtggaggagaatcccgggcctactagtatggactggatttggcgcatccttttccttgtcggcgctgctaccggcgcgcattccttcgaacaagttcagctggttcagagcggagccgaagtgaagaaacctggggcctctgtgaaggtgtcctgcaaggcttccggctataccttcaccagcttttggctgaactgggtccgacaggcccctggacaaggactggaatggatgggcaacatctaccccagcaccagctacaccgtgtacaaccagaaattcaaggaccgcgtgaccatgaccagggacaccagcacaagcacagtgtacatggaactgagcagcctgcggagcgaggataccgccgtgtattattgcgccagaacctggcggggcaacagcttcgattattggggccagggaaccaccgtgaccgtgtcatctacgcgtatccagaaccctgatcctgccgtgtaccagctgcgggatagcaagagcagcgacaagagcgtgtgtctgttcaccgacttcgacagccagaccaacgtgtcccagagcaaggactccgacgtgtacatcaccgataagaccgtgctggacatgcggagcatggacttcaagagcaactccgccgtggcctggtccaacaagtccgatttcgcctgcgccaacgccttcaacaacagcattatccccgaggacacattcttcccaagccccgagagcagctgcggtacccagagttttgggttgttggaccctaaattgtgctatctgttggacggaatcctgttcatttacggagtgatcctgaccgcattgttcctgaggagcaagcggtcacggctgctccacagcgattacatgaatatgacaccacgaagaccgggtcctactcgcaaacactaccaaccctacgcacctccccgcgactttgcagcgtaccgatctcgggttaagttttccagatccgcagacgcacccgcttaccaacaagggcagaaccaactctacaatgaacttaatttggggcggagggaagagtacgacgttctggacaaaaggaggggacgagatcccgagatgggcggaaagcctcagcgaaggaagaatccgcaagaggggctttataacgaactccagaaagataaaatggcagaagcctatagtgagattgggatgaagggagaaaggaggaggggtaaaggtcacgatgggttgtaccaaggattgagcacagccactaaagatacctatgatgcgctccacatgcaggccctgccgccaaga

SEQ ID NO: 37487 - DNA, 2715 bp, synthetic construct
  source 1..2715: mol_type = other DNA
atggccttaccagtgaccgccttgctcctgccgctggccttgctgctccacgccgccaggccggacatcgtgatgacacagagccctgatagcctggccgtgtctctgggagagagagccaccatcaactgcaagagcagccagagcctgctgaacagcggcaaccagaagaactacctggcctggtatcagcagaagcccggccagcctcctaagctgctgatctactggggcagcaccagatccacaggcgtgcccgatagattttctggctctggcagcggcaccgacttcaccctgacaatttctagcctgcaagccgaggacgtggccgtgtactactgccagaacgactacacataccccttcaccttcggccagggcaccaagctggaaatcaaactcgaggaggacctgaagaacgtgttcccacctgaggtggccgtgttcgagcctagcgaggccgagatcagccacacccagaaagccaccctcgtgtgcctggctaccggcttctaccccgaccatgtggaactgtcttggtgggtcaacggcaaagaggtgcacagcggcgtgtctaccgacccccagccactgaaagaacagcccgccctgaacgacagccggtactgcctgagcagcagactgagagtgtccgccaccttctggcagaacccccggaaccacttcagatgccaggtgcagttctacggcctgagcgagaacgacgagtggacccaggacagagccaagcccgtgacccagatcgtgtctgccgaagcctggggcagagccgattgcggatcccagagcttcggcctgctggaccccaagctgtgctacctgctggatggcatcctgttcatctacggcgtgatcctgaccgccctgttcctgaaacggggcagaaagaaactcctgtatatattcaaacaaccatttatgagaccagtacaaactactcaagaggaagatggctgtagctgccgatttccagaagaagaagaaggaggatgtgaactgagagtgaagttcagcagaagcgccgacgcccctgcctaccagcagggacagaaccaactgtacaacgagctgaacctgggcagacgggaagagtacgacgtgctggacaagcggagaggcagggaccctgagatgggcggaaagccccagcggagaaagaacccccaggaaggactgtataacgaactccagaaagacaagatggccgaagcctacagcgagatcggcatgaagggcgagcggagaagaggcaagggccacgatggcctgtaccagggcctgagcaccgccaccaaggacacctatgacgccctgcacatgcaggccctgcctccaagaagggccaagcgatctggatctggagcaacaaacttctcactactcaaacaagcaggtgacgtggaggagaatcccgggcctactagtatggactggatttggcgcatccttttccttgtcggcgctgctaccggcgcgcattccttcgaacaagttcagctggttcagagcggagccgaagtgaagaaacctggggcctctgtgaaggtgtcctgcaaggcttccggctataccttcaccagcttttggctgaactgggtccgacaggcccctggacaaggactggaatggatgggcaacatctaccccagcaccagctacaccgtgtacaaccagaaattcaaggaccgcgtgaccatgaccagggacaccagcacaagcacagtgtacatggaactgagcagcctgcggagcgaggataccgccgtgtattattgcgccagaacctggcggggcaacagcttcgattattggggccagggaaccaccgtgaccgtgtcatctacgcgtatccagaaccctgatcctgccgtgtaccagctgcgggatagcaagagcagcgacaagagcgtgtgtctgttcaccgacttcgacagccagaccaacgtgtcccagagcaaggactccgacgtgtacatcaccgataagaccgtgctggacatgcggagcatggacttcaagagcaactccgccgtggcctggtccaacaagtccgatttcgcctgcgccaacgccttcaacaacagcattatccccgaggacacattcttcccaagccccgagagcagctgcggtacccagagttttgggttgttggaccctaaattgtgctatctgttggacggaatcctgttcatttacggagtgatcctgaccgcattgttcctgaagagaggccggaagaagctgctgtacatcttcaagcagcctttcatgcggcccgtgcagaccacccaggaagaggacggctgctcctgccggttccccgaggaagaagaaggcggctgcgagctgcgggttaagttttccagatccgcagacgcacccgcttaccaacaagggcagaaccaactctacaatgaacttaatttggggcggagggaagagtacgacgttctggacaaaaggaggggacgagatcccgagatgggcggaaagcctcagcgaaggaagaatccgcaagaggggctttataacgaactccagaaagataaaatggcagaagcctatagtgagattgggatgaagggagaaaggaggaggggtaaaggtcacgatgggttgtaccaaggattgagcacagccactaaagatacctatgatgcgctccacatgcaggccctgccgccaaga

SEQ ID NO: 37488 - DNA, 1776 bp, synthetic construct
  source 1..1776: mol_type = other DNA
atggccttaccagtgaccgccttgctcctgccgctggccttgctgctccacgccgccaggccggacatcgtgatgacacagagccctgatagcctggccgtgtctctgggagagagagccaccatcaactgcaagagcagccagagcctgctgaacagcggcaaccagaagaactacctggcctggtatcagcagaagcccggccagcctcctaagctgctgatctactggggcagcaccagatccacaggcgtgcccgatagattttctggctctggcagcggcaccgacttcaccctgacaatttctagcctgcaagccgaggacgtggccgtgtactactgccagaacgactacacataccccttcaccttcggccagggcaccaagctggaaatcaaactcgagcagagcttcggcctgctggaccccaagctgtgctacctgctggatggcatcctgttcatctacggcgtgatcctgaccgccctgttcctgagagtgaagttcagcagaagcgccgacgcccctgcctaccagcagggacagaaccaactgtacaacgagctgaacctgggcagacgggaagagtacgacgtgctggacaagcggagaggcagggaccctgagatgggcggaaagccccagcggagaaagaacccccaggaaggactgtataacgaactccagaaagacaagatggccgaagcctacagcgagatcggcatgaagggcgagcggagaagaggcaagggccacgatggcctgtaccagggcctgagcaccgccaccaaggacacctatgacgccctgcacatgcaggccctgcctccaagaagggccaagcgatctggatctggagcaacaaacttctcactactcaaacaagcaggtgacgtggaggagaatcccgggcctactagtatggactggatttggcgcatccttttccttgtcggcgctgctaccggcgcgcattccttcgaacaagttcagctggttcagagcggagccgaagtgaagaaacctggggcctctgtgaaggtgtcctgcaaggcttccggctataccttcaccagcttttggctgaactgggtccgacaggcccctggacaaggactggaatggatgggcaacatctaccccagcaccagctacaccgtgtacaaccagaaattcaaggaccgcgtgaccatgaccagggacaccagcacaagcacagtgtacatggaactgagcagcctgcggagcgaggataccgccgtgtattattgcgccagaacctggcggggcaacagcttcgattattggggccagggaaccaccgtgaccgtgtcatctacgcgtcagagttttgggttgttggaccctaaattgtgctatctgttggacggaatcctgttcatttacggagtgatcctgaccgcattgttcctgcgggttaagttttccagatccgcagacgcacccgcttaccaacaagggcagaaccaactctacaatgaacttaatttggggcggagggaagagtacgacgttctggacaaaaggaggggacgagatcccgagatgggcggaaagcctcagcgaaggaagaatccgcaagaggggctttataacgaactccagaaagataaaatggcagaagcctatagtgagattgggatgaagggagaaaggaggaggggtaaaggtcacgatgggttgtaccaaggattgagcacagccactaaagatacctatgatgcgctccacatgcaggccctgccgccaaga

SEQ ID NO: 37489 - DNA, 1950 bp, synthetic construct
  source 1..1950: mol_type = other DNA
atggccttaccagtgaccgccttgctcctgccgctggccttgctgctccacgccgccaggccggacatcgtgatgacacagagccctgatagcctggccgtgtctctgggagagagagccaccatcaactgcaagagcagccagagcctgctgaacagcggcaaccagaagaactacctggcctggtatcagcagaagcccggccagcctcctaagctgctgatctactggggcagcaccagatccacaggcgtgcccgatagattttctggctctggcagcggcaccgacttcaccctgacaatttctagcctgcaagccgaggacgtggccgtgtactactgccagaacgactacacataccccttcaccttcggccagggcaccaagctggaaatcaaactcgagggacagcctaaggccaatcctaccgtgacactgttccctccaagcagcgaagaactccaggccaacaaggccacacttgtgtgcctgatctccgacttctaccctggggctgtgacagtggcttggaaggccgatggatctcctgtgaaagccggcgtggaaaccaccaagccatccaagcagagcaacaacaaatacgccgccagctcctacctgagcctgacacctgagcagtggaagtcccacagatcctacagctgccaagtgacccacgaaggcagcaccgtggaaaagacagtggcccctacagagtgcagccccatcaagaccgatgtgattacaatggaccccaaggacaactgctccaaggacgccaacgataccctgctgctccagctgaccaacaccagcgcctactacatgtacttgttgctgctgctgaagtccgtggtgtacttcgccatcatcacatgctgcctgctgcggagaaccgccttctgctgcaacggcgagaagtctagggccaagcgatctggatctggagcaacaaacttctcactactcaaacaagcaggtgacgtggaggagaatcccgggcctactagtatggactggatttggcgcatccttttccttgtcggcgctgctaccggcgcgcattccttcgaacaagttcagctggttcagagcggagccgaagtgaagaaacctggggcctctgtgaaggtgtcctgcaaggcttccggctataccttcaccagcttttggctgaactgggtccgacaggcccctggacaaggactggaatggatgggcaacatctaccccagcaccagctacaccgtgtacaaccagaaattcaaggaccgcgtgaccatgaccagggacaccagcacaagcacagtgtacatggaactgagcagcctgcggagcgaggataccgccgtgtattattgcgccagaacctggcggggcaacagcttcgattattggggccagggaaccaccgtgaccgtgtcatctacgcgtgcctctacaaagggaccctccgtgtttcctctggctcccagcagcaagtctacaagcggaggaacagccgctctgggctgcctggtcaaggattactttcccgagcctgtgaccgtgtcctggaatagcggagcactgacaagcggcgtgcacacctttccagccgtgctgcaaagcagcggcctgtactctctgagcagcgtggtcacagtgcctagctctagcctgggcacccagacctacatctgcaatgtgaaccacaagcctagcaacaccaaggtggacaagagagtggaacccaagagctgtgaagtgaaaaccgactccaccgaccacgtgaagcccaaagagacagagaacaccaagcagcccagcaagagctgccacaagcccaaggccatcgtgcacaccgagaaagtgaacatgatgagcctgaccgtgctgggcctgcggatgctgttcgccaaaaccgtggccgtgaacttcctgctgaccgccaagctgttcttcctc

SEQ ID NO: 37490 - DNA, 1884 bp, synthetic construct
  source 1..1884: mol_type = other DNA
atggccttaccagtgaccgccttgctcctgccgctggccttgctgctccacgccgccaggccggacatcgtgatgacacagagccctgatagcctggccgtgtctctgggagagagagccaccatcaactgcaagagcagccagagcctgctgaacagcggcaaccagaagaactacctggcctggtatcagcagaagcccggccagcctcctaagctgctgatctactggggcagcaccagatccacaggcgtgcccgatagattttctggctctggcagcggcaccgacttcaccctgacaatttctagcctgcaagccgaggacgtggccgtgtactactgccagaacgactacacataccccttcaccttcggccagggcaccaagctggaaatcaaactcgagggacagcctaaggccaatcctaccgtgacactgttccctccaagcagcgaagaactccaggccaacaaggccacacttgtgtgcctgatctccgacttctaccctggggctgtgacagtggcttggaaggccgatggatctcctgtgaaagccggcgtggaaaccaccaagccatccaagcagagcaacaacaaatacgccgccagctcctacctgagcctgacacctgagcagtggaagtcccacagatcctacagctgccaagtgacccacgaaggcagcaccgtggaaaagacagtggcccctacagagtgcagcggcagagccgattgcggcatcaccagcgccagctaccaccagggcgtgctgagcgccaccatcctgtacgagatcctgctgggcaaggccaccctgtacgccgtgctggtgtctgccctggtgctgatggctatggtcaagcggaaggacagccggggaagggccaagcgatctggatctggagcaacaaacttctcactactcaaacaagcaggtgacgtggaggagaatcccgggcctactagtatggactggatttggcgcatccttttccttgtcggcgctgctaccggcgcgcattccttcgaacaagttcagctggttcagagcggagccgaagtgaagaaacctggggcctctgtgaaggtgtcctgcaaggcttccggctataccttcaccagcttttggctgaactgggtccgacaggcccctggacaaggactggaatggatgggcaacatctaccccagcaccagctacaccgtgtacaaccagaaattcaaggaccgcgtgaccatgaccagggacaccagcacaagcacagtgtacatggaactgagcagcctgcggagcgaggataccgccgtgtattattgcgccagaacctggcggggcaacagcttcgattattggggccagggaaccaccgtgaccgtgtcatctacgcgtgcctctacaaagggaccctccgtgtttcctctggctcccagcagcaagtctacaagcggaggaacagccgctctgggctgcctggtcaaggattactttcccgagcctgtgaccgtgtcctggaatagcggagcactgacaagcggcgtgcacacctttccagccgtgctgcaaagcagcggcctgtactctctgagcagcgtggtcacagtgcctagctctagcctgggcacccagacctacatctgcaatgtgaaccacaagcctagcaacaccaaggtggacaagagagtggaacccaagagctgtatccccgaggacacattcttcccaagcagcgacgtgccctgcgacgtgaagctggtggaaaagagcttcgagacagacaccaacctgaacttccagaacctgagcgtgatcggcttcagaatcctgctgctgaaagtggccggctttaacctgctgatgaccctgcggctgtggtccagc

SEQ ID NO: 37491 - DNA, 1884 bp, synthetic construct
  source 1..1884: mol_type = other DNA
atggccttaccagtgaccgccttgctcctgccgctggccttgctgctccacgccgccaggccggacatcgtgatgacacagagccctgatagcctggccgtgtctctgggagagagagccaccatcaactgcaagagcagccagagcctgctgaacagcggcaaccagaagaactacctggcctggtatcagcagaagcccggccagcctcctaagctgctgatctactggggcagcaccagatccacaggcgtgcccgatagattttctggctctggcagcggcaccgacttcaccctgacaatttctagcctgcaagccgaggacgtggccgtgtactactgccagaacgactacacataccccttcaccttcggccagggcaccaagctggaaatcaaactcgagggacagcctaaggccaatcctaccgtgacactgttccctccaagcagcgaagaactccaggccaacaaggccacacttgtgtgcctgatctccgacttctaccctggggctgtgacagtggcttggaaggccgatggatctcctgtgaaagccggcgtggaaaccaccaagccatccaagcagagcaacaacaaatacgccgccagctcctacctgagcctgacacctgagcagtggaagtcccacagatcctacagctgccaagtgacccacgaaggcagcaccgtggaaaagacagtggcccctacagagtgcagcggcagagccgattgcggctttaccagcgagagctaccagcagggcgtgctgagcgccaccatcctgtacgagatcctgctgggcaaggccaccctgtacgccgtgctggtgtctgccctggtgctgatggctatggtcaagcggaaggacagccggggaagggccaagcgatctggatctggagcaacaaacttctcactactcaaacaagcaggtgacgtggaggagaatcccgggcctactagtatggactggatttggcgcatccttttccttgtcggcgctgctaccggcgcgcattccttcgaacaagttcagctggttcagagcggagccgaagtgaagaaacctggggcctctgtgaaggtgtcctgcaaggcttccggctataccttcaccagcttttggctgaactgggtccgacaggcccctggacaaggactggaatggatgggcaacatctaccccagcaccagctacaccgtgtacaaccagaaattcaaggaccgcgtgaccatgaccagggacaccagcacaagcacagtgtacatggaactgagcagcctgcggagcgaggataccgccgtgtattattgcgccagaacctggcggggcaacagcttcgattattggggccagggaaccaccgtgaccgtgtcatctacgcgtgcctctacaaagggaccctccgtgtttcctctggctcccagcagcaagtctacaagcggaggaacagccgctctgggctgcctggtcaaggattactttcccgagcctgtgaccgtgtcctggaatagcggagcactgacaagcggcgtgcacacctttccagccgtgctgcaaagcagcggcctgtactctctgagcagcgtggtcacagtgcctagctctagcctgggcacccagacctacatctgcaatgtgaaccacaagcctagcaacaccaaggtggacaagagagtggaacccaagagctgtatccccgaggacacattcttcccaagccccgagagcagctgcgacgtgaagctggtggaaaagagcttcgagacagacaccaacctgaacttccagaacctgagcgtgatcggcttcagaatcctgctgctgaaagtggccggctttaacctgctgatgaccctgcggctgtggtccagc

SEQ ID NO: 37492 - DNA, 1362 bp, synthetic construct
  source 1..1362: mol_type = other DNA
atggccttaccagtgaccgccttgctcctgccgctggccttgctgctccacgccgccaggccggacatcgtgatgacacagagccctgatagcctggccgtgtctctgggagagagagccaccatcaactgcaagagcagccagagcctgctgaacagcggcaaccagaagaactacctggcctggtatcagcagaagcccggccagcctcctaagctgctgatctactggggcagcaccagatccacaggcgtgcccgatagattttctggctctggcagcggcaccgacttcaccctgacaatttctagcctgcaagccgaggacgtggccgtgtactactgccagaacgactacacataccccttcaccttcggccagggcaccaagctggaaatcaaaggcggaggcggaagtggaggcggaggatctggcggcggaggctctcaagttcagctggttcagagcggagccgaagtgaagaaacctggggcctctgtgaaggtgtcctgcaaggcttccggctataccttcaccagcttttggctgaactgggtccgacaggcccctggacaaggactggaatggatgggcaacatctaccccagcaccagctacaccgtgtacaaccagaaattcaaggaccgcgtgaccatgaccagggacaccagcacaagcacagtgtacatggaactgagcagcctgcggagcgaggataccgccgtgtattattgcgccagaacctggcggggcaacagcttcgattattggggccagggaaccaccgtgaccgtgtcatctacgcgtgacggtaacgaggagatgggaggaatcactcaaaccccttacaaagtctcaatttcaggaacaactgttatccttacatgtccccagtatcctggcagcgagatcctttggcagcataacgacaagaatatagggggagatgaagacgataagaatatcggatctgacgaggatcacttgagcctgaaagagttctccgagcttgaacaaagcggatattatgtgtgctatccgcgcgggtcaaagccggaagacgctaacttttacctttatctccgagccagagtgtgcgaaaattgcatggaaatggacgttatgtccgttgctacaatagttatcgtagatatatgcatcacgggtggactgcttctgctggtttattattggtccaagaatagaaaggccaaagctaaacccgtgaccagaggcgctggcgcaggcggaaggcaaaggggacaaaacaaagaacggccaccaccagtgccaaatccagattatgagcctattcggaaaggacagagggacctgtactctggcctgaatcagagaagaatc

SEQ ID NO: 37493 - DNA, 1257 bp, synthetic construct
  source 1..1257: mol_type = other DNA
atggccttaccagtgaccgccttgctcctgccgctggccttgctgctccacgccgccaggccggacatcgtgatgacacagagccctgatagcctggccgtgtctctgggagagagagccaccatcaactgcaagagcagccagagcctgctgaacagcggcaaccagaagaactacctggcctggtatcagcagaagcccggccagcctcctaagctgctgatctactggggcagcaccagatccacaggcgtgcccgatagattttctggctctggcagcggcaccgacttcaccctgacaatttctagcctgcaagccgaggacgtggccgtgtactactgccagaacgactacacataccccttcaccttcggccagggcaccaagctggaaatcaaaggcggaggcggaagtggaggcggaggatctggcggcggaggctctcaagttcagctggttcagagcggagccgaagtgaagaaacctggggcctctgtgaaggtgtcctgcaaggcttccggctataccttcaccagcttttggctgaactgggtccgacaggcccctggacaaggactggaatggatgggcaacatctaccccagcaccagctacaccgtgtacaaccagaaattcaaggaccgcgtgaccatgaccagggacaccagcacaagcacagtgtacatggaactgagcagcctgcggagcgaggataccgccgtgtattattgcgccagaacctggcggggcaacagcttcgattattggggccagggaaccaccgtgaccgtgtcatctacgcgtttcaagatccccatcgaggaactggaagatcgggtgttcgtgaactgcaacacctctatcacctgggtggaaggcaccgtgggaacactgctgagcgacatcaccagactggacctcggcaagcggattctggaccctcggggcatctacagatgcaacggcaccgacatctacaaggacaaagaaagcaccgtgcaggtccactacagaatgtgccagtcctgcgtggaactggaccctgctacagtggccggcatcatcgtgaccgatgtgatcgctactctgctgctggctctgggagtgttctgcttcgccggacacgaaacaggcagactgtctggcgctgccgatacacaggccctgctgagaaacgaccaagtgtatcagcccctgcgcgacagagatgatgcccagtattctcacctcggcggcaactgggctagaaacaag

SEQ ID NO: 37494 - DNA, 1287 bp, synthetic construct
  source 1..1287: mol_type = other DNA
atggccttaccagtgaccgccttgctcctgccgctggccttgctgctccacgccgccaggccggacatcgtgatgacacagagccctgatagcctggccgtgtctctgggagagagagccaccatcaactgcaagagcagccagagcctgctgaacagcggcaaccagaagaactacctggcctggtatcagcagaagcccggccagcctcctaagctgctgatctactggggcagcaccagatccacaggcgtgcccgatagattttctggctctggcagcggcaccgacttcaccctgacaatttctagcctgcaagccgaggacgtggccgtgtactactgccagaacgactacacataccccttcaccttcggccagggcaccaagctggaaatcaaaggcggaggcggaagtggaggcggaggatctggcggcggaggctctcaagttcagctggttcagagcggagccgaagtgaagaaacctggggcctctgtgaaggtgtcctgcaaggcttccggctataccttcaccagcttttggctgaactgggtccgacaggcccctggacaaggactggaatggatgggcaacatctaccccagcaccagctacaccgtgtacaaccagaaattcaaggaccgcgtgaccatgaccagggacaccagcacaagcacagtgtacatggaactgagcagcctgcggagcgaggataccgccgtgtattattgcgccagaacctggcggggcaacagcttcgattattggggccagggaaccaccgtgaccgtgtcatctacgcgtcagagcatcaagggcaaccacctggtcaaggtgtacgactaccaagaggacggcagcgtgctgctgacatgtgatgccgaggccaagaacatcacctggtttaaggacggcaagatgatcggcttcctgaccgaggacaagaagaagtggaacctgggcagcaacgctaaggaccccagaggcatgtatcagtgcaagggcagccagaacaagagcaagcccctccaggtgtactaccggatgtgccagaactgcatcgagctgaacgccgctaccatcagcggctttctgttcgccgagatcgtgtccatcttcgtgctggccgtgggcgtgtactttatcgctggacaggatggcgtgcggcagagcagagcttccgataagcaaaccctgctgcctaacgaccagctgtaccagcctctgaaggacagagaggacgaccagtacagccacctccagggcaatcagctgagaagaaac

SEQ ID NO: 37495 - DNA, 1236 bp, synthetic construct
  source 1..1236: mol_type = other DNA
atggccttaccagtgaccgccttgctcctgccgctggccttgctgctccacgccgccaggccggacatcgtgatgacacagagccctgatagcctggccgtgtctctgggagagagagccaccatcaactgcaagagcagccagagcctgctgaacagcggcaaccagaagaactacctggcctggtatcagcagaagcccggccagcctcctaagctgctgatctactggggcagcaccagatccacaggcgtgcccgatagattttctggctctggcagcggcaccgacttcaccctgacaatttctagcctgcaagccgaggacgtggccgtgtactactgccagaacgactacacataccccttcaccttcggccagggcaccaagctggaaatcaaaggcggaggcggaagtggaggcggaggatctggcggcggaggctctcaagttcagctggttcagagcggagccgaagtgaagaaacctggggcctctgtgaaggtgtcctgcaaggcttccggctataccttcaccagcttttggctgaactgggtccgacaggcccctggacaaggactggaatggatgggcaacatctaccccagcaccagctacaccgtgtacaaccagaaattcaaggaccgcgtgaccatgaccagggacaccagcacaagcacagtgtacatggaactgagcagcctgcggagcgaggataccgccgtgtattattgcgccagaacctggcggggcaacagcttcgattattggggccagggaaccaccgtgaccgtgtcatctacgcgtcagagttttgggttgttggaccctaaattgtgctatctgttggacggaatcctgttcatttacggagtgatcctgaccgcattgttcctgcgggttaagttttccagatccgcagacgcacccgcttaccaacaagggcagaaccaactctacaatgaacttaatttggggcggagggaagagtacgacgttctggacaaaaggaggggacgagatcccgagatgggcggaaagcctcagcgaaggaagaatccgcaagaggggctttataacgaactccagaaagataaaatggcagaagcctatagtgagattgggatgaagggagaaaggaggaggggtaaaggtcacgatgggttgtaccaaggattgagcacagccactaaagatacctatgatgcgctccacatgcaggccctgccgccaaga

SEQ ID NO: 37496 - DNA, 1521 bp, synthetic construct
  source 1..1521: mol_type = other DNA
atggccttaccagtgaccgccttgctcctgccgctggccttgctgctccacgccgccaggccggacatcgtgatgacacagagccctgatagcctggccgtgtctctgggagagagagccaccatcaactgcaagagcagccagagcctgctgaacagcggcaaccagaagaactacctggcctggtatcagcagaagcccggccagcctcctaagctgctgatctactggggcagcaccagatccacaggcgtgcccgatagattttctggctctggcagcggcaccgacttcaccctgacaatttctagcctgcaagccgaggacgtggccgtgtactactgccagaacgactacacataccccttcaccttcggccagggcaccaagctggaaatcaaaggcggaggcggaagtggaggcggaggatctggcggcggaggctctcaagttcagctggttcagagcggagccgaagtgaagaaacctggggcctctgtgaaggtgtcctgcaaggcttccggctataccttcaccagcttttggctgaactgggtccgacaggcccctggacaaggactggaatggatgggcaacatctaccccagcaccagctacaccgtgtacaaccagaaattcaaggaccgcgtgaccatgaccagggacaccagcacaagcacagtgtacatggaactgagcagcctgcggagcgaggataccgccgtgtattattgcgccagaacctggcggggcaacagcttcgattattggggccagggaaccaccgtgaccgtgtcatctacgcgtggaatgaggactgaggatcttcccaaagctgtcgtctttctcgaaccccaatggtatcgggtgctcgaaaaagactctgtgacactgaaatgccaaggggcctactctcccgaggacaactccacacagtggtttcataatgagtccctcatcagctctcaggccagctcttatttcattgatgccgctacagtggacgactccggcgagtatcggtgtcagaccaatctgtctacactgtctgaccccgtgcagcttgaggtccacattggatggttgctcttgcaagccccacgctgggttttcaaagaggaagatccaatccatctgcggtgccacagctggaaaaacaccgctctccacaaagtcacatacctgcaaaatggcaaaggacgcaaatacttccatcacaattccgatttttacattccgaaggctaccctgaaagacagcggcagctatttctgccggggactcgtcggctccaagaatgtgtcctccgaaaccgtgaatatcacgattacccaaggactggctgtgcctacaatctctagcttctttccgcctggataccaagtctccttctgtcttgtgatggtcctcctgtttgctgtggacacaggactgtacttttccgtgaaaacgaacatccgcagctccacacgcgattggaaagatcacaagtttaaatggcgcaaagatccccaggacaag

SEQ ID NO: 37497 - DNA, 1446 bp, synthetic construct
  source 1..1446: mol_type = other DNA
atggccttaccagtgaccgccttgctcctgccgctggccttgctgctccacgccgccaggccggacatcgtgatgacacagagccctgatagcctggccgtgtctctgggagagagagccaccatcaactgcaagagcagccagagcctgctgaacagcggcaaccagaagaactacctggcctggtatcagcagaagcccggccagcctcctaagctgctgatctactggggcagcaccagatccacaggcgtgcccgatagattttctggctctggcagcggcaccgacttcaccctgacaatttctagcctgcaagccgaggacgtggccgtgtactactgccagaacgactacacataccccttcaccttcggccagggcaccaagctggaaatcaaaggcggaggcggaagtggaggcggaggatctggcggcggaggctctcaagttcagctggttcagagcggagccgaagtgaagaaacctggggcctctgtgaaggtgtcctgcaaggcttccggctataccttcaccagcttttggctgaactgggtccgacaggcccctggacaaggactggaatggatgggcaacatctaccccagcaccagctacaccgtgtacaaccagaaattcaaggaccgcgtgaccatgaccagggacaccagcacaagcacagtgtacatggaactgagcagcctgcggagcgaggataccgccgtgtattattgcgccagaacctggcggggcaacagcttcgattattggggccagggaaccaccgtgaccgtgtcatctacgcgtggaatgaggactgaggatcttcccaaagctgtcgtctttctcgaaccccaatggtatcgggtgctcgaaaaagactctgtgacactgaaatgccaaggggcctactctcccgaggacaactccacacagtggtttcataatgagtccctcatcagctctcaggccagctcttatttcattgatgccgctacagtggacgactccggcgagtatcggtgtcagaccaatctgtctacactgtctgaccccgtgcagcttgaggtccacattggatggttgctcttgcaagccccacgctgggttttcaaagaggaagatccaatccatctgcggtgccacagctggaaaaacaccgctctccacaaagtcacatacctgcaaaatggcaaaggacgcaaatacttccatcacaattccgatttttacattccgaaggctaccctgaaagacagcggcagctatttctgccggggactcgtcggctccaagaatgtgtcctccgaaaccgtgaatatcacgattacccaaggactggctgtgcctacaatctctagcttctttccgcctggataccaagtctccttctgtcttgtgatggtcctcctgtttgctgtggacacaggactgtacttttccgtg

SEQ ID NO: 37498 - DNA, 1449 bp, synthetic construct
  source 1..1449: mol_type = other DNA
atggccttaccagtgaccgccttgctcctgccgctggccttgctgctccacgccgccaggccggacatcgtgatgacacagagccctgatagcctggccgtgtctctgggagagagagccaccatcaactgcaagagcagccagagcctgctgaacagcggcaaccagaagaactacctggcctggtatcagcagaagcccggccagcctcctaagctgctgatctactggggcagcaccagatccacaggcgtgcccgatagattttctggctctggcagcggcaccgacttcaccctgacaatttctagcctgcaagccgaggacgtggccgtgtactactgccagaacgactacacataccccttcaccttcggccagggcaccaagctggaaatcaaaggcggaggcggaagtggaggcggaggatctggcggcggaggctctcaagttcagctggttcagagcggagccgaagtgaagaaacctggggcctctgtgaaggtgtcctgcaaggcttccggctataccttcaccagcttttggctgaactgggtccgacaggcccctggacaaggactggaatggatgggcaacatctaccccagcaccagctacaccgtgtacaaccagaaattcaaggaccgcgtgaccatgaccagggacaccagcacaagcacagtgtacatggaactgagcagcctgcggagcgaggataccgccgtgtattattgcgccagaacctggcggggcaacagcttcgattattggggccagggaaccaccgtgaccgtgtcatctacgcgtggaatgaggactgaggatcttcccaaagctgtcgtctttctcgaaccccaatggtatcgggtgctcgaaaaagactctgtgacactgaaatgccaaggggcctactctcccgaggacaactccacacagtggtttcataatgagtccctcatcagctctcaggccagctcttatttcattgatgccgctacagtggacgactccggcgagtatcggtgtcagaccaatctgtctacactgtctgaccccgtgcagcttgaggtccacattggatggttgctcttgcaagccccacgctgggttttcaaagaggaagatccaatccatctgcggtgccacagctggaaaaacaccgctctccacaaagtcacatacctgcaaaatggcaaaggacgcaaatacttccatcacaattccgatttttacattccgaaggctaccctgaaagacagcggcagctatttctgccggggactcgtcggctccaagaatgtgtcctccgaaaccgtgaatatcacgattacccaaggactggctgtgcctacaatctctagcttctttccgcctggataccaagtctccttctgtcttgtgatggtcctcctgtttgctgtggacacaggactgtacttttccgtgaaa

SEQ ID NO: 37499 - DNA, 2181 bp, synthetic construct
  source 1..2181: mol_type = other DNA
atggccttaccagtgaccgccttgctcctgccgctggccttgctgctccacgccgccaggccggacatcgtgatgacacagagccctgatagcctggccgtgtctctgggagagagagccaccatcaactgcaagagcagccagagcctgctgaacagcggcaaccagaagaactacctggcctggtatcagcagaagcccggccagcctcctaagctgctgatctactggggcagcaccagatccacaggcgtgcccgatagattttctggctctggcagcggcaccgacttcaccctgacaatttctagcctgcaagccgaggacgtggccgtgtactactgccagaacgactacacataccccttcaccttcggccagggcaccaagctggaaatcaaactcgagggacagcctaaggccaatcctaccgtgacactgttccctccaagcagcgaagaactccaggccaacaaggccacacttgtgtgcctgatctccgacttctaccctggggctgtgacagtggcttggaaggccgatggatctcctgtgaaagccggcgtggaaaccaccaagccatccaagcagagcaacaacaaatacgccgccagctcctacctgagcctgacacctgagcagtggaagtcccacagatcctacagctgccaagtgacccacgaaggcagcaccgtggaaaagacagtggcccctacagagtgcagcggatcccagagcttcggcctgctggaccccaagctgtgctacctgctggatggcatcctgttcatctacggcgtgatcctgaccgccctgttcctgagagtgaagttcagcagaagcgccgacgcccctgcctaccagcagggacagaaccaactgtacaacgagctgaacctgggcagacgggaagagtacgacgtgctggacaagcggagaggcagggaccctgagatgggcggaaagccccagcggagaaagaacccccaggaaggactgtataacgaactccagaaagacaagatggccgaagcctacagcgagatcggcatgaagggcgagcggagaagaggcaagggccacgatggcctgtaccagggcctgagcaccgccaccaaggacacctatgacgccctgcacatgcaggccctgcctccaagaagggccaagcgatctggatctggagcaacaaacttctcactactcaaacaagcaggtgacgtggaggagaatcccgggcctactagtatggactggatttggcgcatccttttccttgtcggcgctgctaccggcgcgcattccttcgaacaagttcagctggttcagagcggagccgaagtgaagaaacctggggcctctgtgaaggtgtcctgcaaggcttccggctataccttcaccagcttttggctgaactgggtccgacaggcccctggacaaggactggaatggatgggcaacatctaccccagcaccagctacaccgtgtacaaccagaaattcaaggaccgcgtgaccatgaccagggacaccagcacaagcacagtgtacatggaactgagcagcctgcggagcgaggataccgccgtgtattattgcgccagaacctggcggggcaacagcttcgattattggggccagggaaccaccgtgaccgtgtcatctacgcgtgcctctacaaagggaccctccgtgtttcctctggctcccagcagcaagtctacaagcggaggaacagccgctctgggctgcctggtcaaggattactttcccgagcctgtgaccgtgtcctggaatagcggagcactgacaagcggcgtgcacacctttccagccgtgctgcaaagcagcggcctgtactctctgagcagcgtggtcacagtgcctagctctagcctgggcacccagacctacatctgcaatgtgaaccacaagcctagcaacaccaaggtggacaagagagtggaacccaagagctgtggtaccatcactcaaggtttggcagtgtcaaccatctcatcattctttccacctggctaccaagtgtccttctgcctggtcatggtgctgctgttcgccgtggataccggcctgtacttcagcgtcaagaccaacatccggtccagcaccagagactggaaggaccacaagttcaagtggcggaaggaccctcaggacaag

SEQ ID NO: 37500 - DNA, 2226 bp, synthetic construct
  source 1..2226: mol_type = other DNA
atggccttaccagtgaccgccttgctcctgccgctggccttgctgctccacgccgccaggccggacatcgtgatgacacagagccctgatagcctggccgtgtctctgggagagagagccaccatcaactgcaagagcagccagagcctgctgaacagcggcaaccagaagaactacctggcctggtatcagcagaagcccggccagcctcctaagctgctgatctactggggcagcaccagatccacaggcgtgcccgatagattttctggctctggcagcggcaccgacttcaccctgacaatttctagcctgcaagccgaggacgtggccgtgtactactgccagaacgactacacataccccttcaccttcggccagggcaccaagctggaaatcaaactcgaggacctgaagaacgtgttcccacctgaggtggccgtgttcgagcctagcgaggccgagatcagccacacccagaaagccaccctcgtgtgcctggctaccggcttctaccccgaccatgtggaactgtcttggtgggtcaacggcaaagaggtgcacagcggcgtgtctaccgacccccagccactgaaagaacagcccgccctgaacgacagccggtactgcctgagcagcagactgagagtgtccgccaccttctggcagaacccccggaaccacttcagatgccaggtgcagttctacggcctgagcgagaacgacgagtggacccaggacagagccaagcccgtgacccagatcgtgtctgccgaagcctggggcagagccgattgcggatcccagagcttcggcctgctggaccccaagctgtgctacctgctggatggcatcctgttcatctacggcgtgatcctgaccgccctgttcctgagagtgaagttcagcagaagcgccgacgcccctgcctaccagcagggacagaaccaactgtacaacgagctgaacctgggcagacgggaagagtacgacgtgctggacaagcggagaggcagggaccctgagatgggcggaaagccccagcggagaaagaacccccaggaaggactgtataacgaactccagaaagacaagatggccgaagcctacagcgagatcggcatgaagggcgagcggagaagaggcaagggccacgatggcctgtaccagggcctgagcaccgccaccaaggacacctatgacgccctgcacatgcaggccctgcctccaagaagggccaagcgatctggatctggagcaacaaacttctcactactcaaacaagcaggtgacgtggaggagaatcccgggcctactagtatggactggatttggcgcatccttttccttgtcggcgctgctaccggcgcgcattccttcgaacaagttcagctggttcagagcggagccgaagtgaagaaacctggggcctctgtgaaggtgtcctgcaaggcttccggctataccttcaccagcttttggctgaactgggtccgacaggcccctggacaaggactggaatggatgggcaacatctaccccagcaccagctacaccgtgtacaaccagaaattcaaggaccgcgtgaccatgaccagggacaccagcacaagcacagtgtacatggaactgagcagcctgcggagcgaggataccgccgtgtattattgcgccagaacctggcggggcaacagcttcgattattggggccagggaaccaccgtgaccgtgtcatctacgcgtatccagaaccctgatcctgccgtgtaccagctgcgggatagcaagagcagcgacaagagcgtgtgtctgttcaccgacttcgacagccagaccaacgtgtcccagagcaaggactccgacgtgtacatcaccgataagaccgtgctggacatgcggagcatggacttcaagagcaactccgccgtggcctggtccaacaagtccgatttcgcctgcgccaacgccttcaacaacagcattatccccgaggacacattcttcccaagccccgagagcagctgcggtaccatcactcaaggtttggcagtgtcaaccatctcatcattctttccacctggctaccaagtgtccttctgcctggtcatggtgctgctgttcgccgtggataccggcctgtacttcagcgtcaagaccaacatccggtccagcaccagagactggaaggaccacaagttcaagtggcggaaggaccctcaggacaag

SEQ ID NO: 37501 - DNA, 2151 bp, synthetic construct
  source 1..2151: mol_type = other DNA
atggccttaccagtgaccgccttgctcctgccgctggccttgctgctccacgccgccaggccggacatcgtgatgacacagagccctgatagcctggccgtgtctctgggagagagagccaccatcaactgcaagagcagccagagcctgctgaacagcggcaaccagaagaactacctggcctggtatcagcagaagcccggccagcctcctaagctgctgatctactggggcagcaccagatccacaggcgtgcccgatagattttctggctctggcagcggcaccgacttcaccctgacaatttctagcctgcaagccgaggacgtggccgtgtactactgccagaacgactacacataccccttcaccttcggccagggcaccaagctggaaatcaaactcgaggacctgaagaacgtgttcccacctgaggtggccgtgttcgagcctagcgaggccgagatcagccacacccagaaagccaccctcgtgtgcctggctaccggcttctaccccgaccatgtggaactgtcttggtgggtcaacggcaaagaggtgcacagcggcgtgtctaccgacccccagccactgaaagaacagcccgccctgaacgacagccggtactgcctgagcagcagactgagagtgtccgccaccttctggcagaacccccggaaccacttcagatgccaggtgcagttctacggcctgagcgagaacgacgagtggacccaggacagagccaagcccgtgacccagatcgtgtctgccgaagcctggggcagagccgattgcggatcccagagcttcggcctgctggaccccaagctgtgctacctgctggatggcatcctgttcatctacggcgtgatcctgaccgccctgttcctgagagtgaagttcagcagaagcgccgacgcccctgcctaccagcagggacagaaccaactgtacaacgagctgaacctgggcagacgggaagagtacgacgtgctggacaagcggagaggcagggaccctgagatgggcggaaagccccagcggagaaagaacccccaggaaggactgtataacgaactccagaaagacaagatggccgaagcctacagcgagatcggcatgaagggcgagcggagaagaggcaagggccacgatggcctgtaccagggcctgagcaccgccaccaaggacacctatgacgccctgcacatgcaggccctgcctccaagaagggccaagcgatctggatctggagcaacaaacttctcactactcaaacaagcaggtgacgtggaggagaatcccgggcctactagtatggactggatttggcgcatccttttccttgtcggcgctgctaccggcgcgcattccttcgaacaagttcagctggttcagagcggagccgaagtgaagaaacctggggcctctgtgaaggtgtcctgcaaggcttccggctataccttcaccagcttttggctgaactgggtccgacaggcccctggacaaggactggaatggatgggcaacatctaccccagcaccagctacaccgtgtacaaccagaaattcaaggaccgcgtgaccatgaccagggacaccagcacaagcacagtgtacatggaactgagcagcctgcggagcgaggataccgccgtgtattattgcgccagaacctggcggggcaacagcttcgattattggggccagggaaccaccgtgaccgtgtcatctacgcgtatccagaaccctgatcctgccgtgtaccagctgcgggatagcaagagcagcgacaagagcgtgtgtctgttcaccgacttcgacagccagaccaacgtgtcccagagcaaggactccgacgtgtacatcaccgataagaccgtgctggacatgcggagcatggacttcaagagcaactccgccgtggcctggtccaacaagtccgatttcgcctgcgccaacgccttcaacaacagcattatccccgaggacacattcttcccaagccccgagagcagctgcggtaccatcactcaaggtttggcagtgtcaaccatctcatcattctttccacctggctaccaagtgtccttctgcctggtcatggtgctgctgttcgccgtggataccggcctgtacttcagcgtc

SEQ ID NO: 37502 - DNA, 2154 bp, synthetic construct
  source 1..2154: mol_type = other DNA
atggccttaccagtgaccgccttgctcctgccgctggccttgctgctccacgccgccaggccggacatcgtgatgacacagagccctgatagcctggccgtgtctctgggagagagagccaccatcaactgcaagagcagccagagcctgctgaacagcggcaaccagaagaactacctggcctggtatcagcagaagcccggccagcctcctaagctgctgatctactggggcagcaccagatccacaggcgtgcccgatagattttctggctctggcagcggcaccgacttcaccctgacaatttctagcctgcaagccgaggacgtggccgtgtactactgccagaacgactacacataccccttcaccttcggccagggcaccaagctggaaatcaaactcgaggacctgaagaacgtgttcccacctgaggtggccgtgttcgagcctagcgaggccgagatcagccacacccagaaagccaccctcgtgtgcctggctaccggcttctaccccgaccatgtggaactgtcttggtgggtcaacggcaaagaggtgcacagcggcgtgtctaccgacccccagccactgaaagaacagcccgccctgaacgacagccggtactgcctgagcagcagactgagagtgtccgccaccttctggcagaacccccggaaccacttcagatgccaggtgcagttctacggcctgagcgagaacgacgagtggacccaggacagagccaagcccgtgacccagatcgtgtctgccgaagcctggggcagagccgattgcggatcccagagcttcggcctgctggaccccaagctgtgctacctgctggatggcatcctgttcatctacggcgtgatcctgaccgccctgttcctgagagtgaagttcagcagaagcgccgacgcccctgcctaccagcagggacagaaccaactgtacaacgagctgaacctgggcagacgggaagagtacgacgtgctggacaagcggagaggcagggaccctgagatgggcggaaagccccagcggagaaagaacccccaggaaggactgtataacgaactccagaaagacaagatggccgaagcctacagcgagatcggcatgaagggcgagcggagaagaggcaagggccacgatggcctgtaccagggcctgagcaccgccaccaaggacacctatgacgccctgcacatgcaggccctgcctccaagaagggccaagcgatctggatctggagcaacaaacttctcactactcaaacaagcaggtgacgtggaggagaatcccgggcctactagtatggactggatttggcgcatccttttccttgtcggcgctgctaccggcgcgcattccttcgaacaagttcagctggttcagagcggagccgaagtgaagaaacctggggcctctgtgaaggtgtcctgcaaggcttccggctataccttcaccagcttttggctgaactgggtccgacaggcccctggacaaggactggaatggatgggcaacatctaccccagcaccagctacaccgtgtacaaccagaaattcaaggaccgcgtgaccatgaccagggacaccagcacaagcacagtgtacatggaactgagcagcctgcggagcgaggataccgccgtgtattattgcgccagaacctggcggggcaacagcttcgattattggggccagggaaccaccgtgaccgtgtcatctacgcgtatccagaaccctgatcctgccgtgtaccagctgcgggatagcaagagcagcgacaagagcgtgtgtctgttcaccgacttcgacagccagaccaacgtgtcccagagcaaggactccgacgtgtacatcaccgataagaccgtgctggacatgcggagcatggacttcaagagcaactccgccgtggcctggtccaacaagtccgatttcgcctgcgccaacgccttcaacaacagcattatccccgaggacacattcttcccaagccccgagagcagctgcggtaccatcactcaaggtttggcagtgtcaaccatctcatcattctttccacctggctaccaagtgtccttctgcctggtcatggtgctgctgttcgccgtggataccggcctgtacttcagcgtcaag

SEQ ID NO: 37503 - DNA, 2157 bp, synthetic construct
  source 1..2157: mol_type = other DNA
atggccttaccagtgaccgccttgctcctgccgctggccttgctgctccacgccgccaggccggacatcgtgatgacacagagccctgatagcctggccgtgtctctgggagagagagccaccatcaactgcaagagcagccagagcctgctgaacagcggcaaccagaagaactacctggcctggtatcagcagaagcccggccagcctcctaagctgctgatctactggggcagcaccagatccacaggcgtgcccgatagattttctggctctggcagcggcaccgacttcaccctgacaatttctagcctgcaagccgaggacgtggccgtgtactactgccagaacgactacacataccccttcaccttcggccagggcaccaagctggaaatcaaactcgaggacctgaagaacgtgttcccacctgaggtggccgtgttcgagcctagcgaggccgagatcagccacacccagaaagccaccctcgtgtgcctggctaccggcttctaccccgaccatgtggaactgtcttggtgggtcaacggcaaagaggtgcacagcggcgtgtctaccgacccccagccactgaaagaacagcccgccctgaacgacagccggtactgcctgagcagcagactgagagtgtccgccaccttctggcagaacccccggaaccacttcagatgccaggtgcagttctacggcctgagcgagaacgacgagtggacccaggacagagccaagcccgtgacccagatcgtgtctgccgaagcctggggcagagccgattgcggatcccagagcttcggcctgctggaccccaagctgtgctacctgctggatggcatcctgttcatctacggcgtgatcctgaccgccctgttcctgagagtgaagttcagcagaagcgccgacgcccctgcctaccagcagggacagaaccaactgtacaacgagctgaacctgggcagacgggaagagtacgacgtgctggacaagcggagaggcagggaccctgagatgggcggaaagccccagcggagaaagaacccccaggaaggactgtataacgaactccagaaagacaagatggccgaagcctacagcgagatcggcatgaagggcgagcggagaagaggcaagggccacgatggcctgtaccagggcctgagcaccgccaccaaggacacctatgacgccctgcacatgcaggccctgcctccaagaagggccaagcgatctggatctggagcaacaaacttctcactactcaaacaagcaggtgacgtggaggagaatcccgggcctactagtatggactggatttggcgcatccttttccttgtcggcgctgctaccggcgcgcattccttcgaacaagttcagctggttcagagcggagccgaagtgaagaaacctggggcctctgtgaaggtgtcctgcaaggcttccggctataccttcaccagcttttggctgaactgggtccgacaggcccctggacaaggactggaatggatgggcaacatctaccccagcaccagctacaccgtgtacaaccagaaattcaaggaccgcgtgaccatgaccagggacaccagcacaagcacagtgtacatggaactgagcagcctgcggagcgaggataccgccgtgtattattgcgccagaacctggcggggcaacagcttcgattattggggccagggaaccaccgtgaccgtgtcatctacgcgtatccagaaccctgatcctgccgtgtaccagctgcgggatagcaagagcagcgacaagagcgtgtgtctgttcaccgacttcgacagccagaccaacgtgtcccagagcaaggactccgacgtgtacatcaccgataagaccgtgctggacatgcggagcatggacttcaagagcaactccgccgtggcctggtccaacaagtccgatttcgcctgcgccaacgccttcaacaacagcattatccccgaggacacattcttcccaagccccgagagcagctgcggtaccatcactcaaggtttggcagtgtcaaccatctcatcattctttccacctggctaccaagtgtccttctgcctggtcatggtgctgctgttcgccgtggataccggcctgtacttcagcgtcaagacc

SEQ ID NO: 37504 - DNA, 1968 bp, synthetic construct
  source 1..1968: mol_type = other DNA
atggccttaccagtgaccgccttgctcctgccgctggccttgctgctccacgccgccaggccggacatcgtgatgacacagagccctgatagcctggccgtgtctctgggagagagagccaccatcaactgcaagagcagccagagcctgctgaacagcggcaaccagaagaactacctggcctggtatcagcagaagcccggccagcctcctaagctgctgatctactggggcagcaccagatccacaggcgtgcccgatagattttctggctctggcagcggcaccgacttcaccctgacaatttctagcctgcaagccgaggacgtggccgtgtactactgccagaacgactacacataccccttcaccttcggccagggcaccaagctggaaatcaaactcgagggacagcctaaggccaatcctaccgtgacactgttccctccaagcagcgaagaactccaggccaacaaggccacacttgtgtgcctgatctccgacttctaccctggggctgtgacagtggcttggaaggccgatggatctcctgtgaaagccggcgtggaaaccaccaagccatccaagcagagcaacaacaaatacgccgccagctcctacctgagcctgacacctgagcagtggaagtcccacagatcctacagctgccaagtgacccacgaaggcagcaccgtggaaaagacagtggcccctacagagtgcagcggatccctgggagagcctcagctgtgctatatcctggacgccatcctgtttctgtacggcatcgtgctgaccctgctgtactgccggctgaagatccaagtgcggaaggccgccatcaccagctacgagaaatccgacggcgtgtacaccggcctgagcaccagaaatcaagagacatacgagacactgaagcacgaaaagcctccacaaagggccaagcgatctggatctggagcaacaaacttctcactactcaaacaagcaggtgacgtggaggagaatcccgggcctactagtatggactggatttggcgcatccttttccttgtcggcgctgctaccggcgcgcattccttcgaacaagttcagctggttcagagcggagccgaagtgaagaaacctggggcctctgtgaaggtgtcctgcaaggcttccggctataccttcaccagcttttggctgaactgggtccgacaggcccctggacaaggactggaatggatgggcaacatctaccccagcaccagctacaccgtgtacaaccagaaattcaaggaccgcgtgaccatgaccagggacaccagcacaagcacagtgtacatggaactgagcagcctgcggagcgaggataccgccgtgtattattgcgccagaacctggcggggcaacagcttcgattattggggccagggaaccaccgtgaccgtgtcatctacgcgtgcctctacaaagggaccctccgtgtttcctctggctcccagcagcaagtctacaagcggaggaacagccgctctgggctgcctggtcaaggattactttcccgagcctgtgaccgtgtcctggaatagcggagcactgacaagcggcgtgcacacctttccagccgtgctgcaaagcagcggcctgtactctctgagcagcgtggtcacagtgcctagctctagcctgggcacccagacctacatctgcaatgtgaaccacaagcctagcaacaccaaggtggacaagagagtggaacccaagagctgtggtaccctcggagaaccacagctctgttacattctggatgctatcctgttcctctatgggatcgtcctgacactcctgtattgcagactcaaaattcaagttcgcaaagccgccattacctcttacgagaagagtgatggggtgtacacaggactgtctacccggaatcaagaaacctacgaaaccctcaaacatgagaagccacctcagtaa

SEQ ID NO: 37505 - DNA, 1875 bp, synthetic construct
  source 1..1875: mol_type = other DNA
atggccttaccagtgaccgccttgctcctgccgctggccttgctgctccacgccgccaggccggacatcgtgatgacacagagccctgatagcctggccgtgtctctgggagagagagccaccatcaactgcaagagcagccagagcctgctgaacagcggcaaccagaagaactacctggcctggtatcagcagaagcccggccagcctcctaagctgctgatctactggggcagcaccagatccacaggcgtgcccgatagattttctggctctggcagcggcaccgacttcaccctgacaatttctagcctgcaagccgaggacgtggccgtgtactactgccagaacgactacacataccccttcaccttcggccagggcaccaagctggaaatcaaactcgaggacctgaagaacgtgttcccacctgaggtggccgtgttcgagcctagcgaggccgagatcagccacacccagaaagccaccctcgtgtgcctggctaccggcttctaccccgaccatgtggaactgtcttggtgggtcaacggcaaagaggtgcacagcggcgtgtgtaccgacccccagccactgaaagaacagcccgccctgaacgacagccggtactgcctgagcagcagactgagagtgtccgccaccttctggcagaacccccggaaccacttcagatgccaggtgcagttctacggcctgagcgagaacgacgagtggacccaggacagagccaagcccgtgacccagatcgtgtctgccgaagcctggggcagagccgattgcggctttaccagcgagagctaccagcagggcgtgctgagcgcctactacatgtacttgttgctgctgctgaagtccgtggtgtacttcgccatcatcacatgctgcctgctgcggagaaccgccttctgctgcaacggcgagaagtctagggccaagcgatctggatctggagcaacaaacttctcactactcaaacaagcaggtgacgtggaggagaatcccgggcctactagtatggactggatttggcgcatccttttccttgtcggcgctgctaccggcgcgcattccttcgaacaagttcagctggttcagagcggagccgaagtgaagaaacctggggcctctgtgaaggtgtcctgcaaggcttccggctataccttcaccagcttttggctgaactgggtccgacaggcccctggacaaggactggaatggatgggcaacatctaccccagcaccagctacaccgtgtacaaccagaaattcaaggaccgcgtgaccatgaccagggacaccagcacaagcacagtgtacatggaactgagcagcctgcggagcgaggataccgccgtgtattattgcgccagaacctggcggggcaacagcttcgattattggggccagggaaccaccgtgaccgtgtcatctacgcgtatccagaaccctgatcctgccgtgtaccagctgcgggatagcaagagcagcgacaagagcgtgtgtctgttcaccgacttcgacagccagaccaacgtgtcccagagcaaggactccgacgtgtacatcaccgataagtgcgtgctggacatgcggagcatggacttcaagagcaactccgccgtggcctggtccaacaagtccgatttcgcctgcgccaacgccttcaacaacagcattatccccgaggacacattcttcccaagccccgagagcagctgcgacgtgaagctggtggaaaagagcttcgagacagacaccaacctgaacttccagaacctgagcgtgatcggcttcagaatcctgctgctgaaagtggccggctttaacctgctgatgaccctgcggctgtggtccagc

SEQ ID NO: 37506 - DNA, 1896 bp, synthetic construct
  source 1..1896: mol_type = other DNA
atggccttaccagtgaccgccttgctcctgccgctggccttgctgctccacgccgccaggccggacatcgtgatgacacagagccctgatagcctggccgtgtctctgggagagagagccaccatcaactgcaagagcagccagagcctgctgaacagcggcaaccagaagaactacctggcctggtatcagcagaagcccggccagcctcctaagctgctgatctactggggcagcaccagatccacaggcgtgcccgatagattttctggctctggcagcggcaccgacttcaccctgacaatttctagcctgcaagccgaggacgtggccgtgtactactgccagaacgactacacataccccttcaccttcggccagggcaccaagctggaaatcaaactcgaggacaagcagctggacgccgacgtgtcccccaagcctaccatcttcctgccctctatcgccgagacaaagctccagaaggccggcacctacctgtgcctgctggaaaagttcttcccagatgtgattaagatccactggcaggaaaagaagtccaacaccatcctgggcagccaggaaggcaacaccatgaagaccaacgacacctacatgaagttcagctggctgaccgtgcccgagaagtccctggacaaagaacacagatgcatcgtgcggcacgaaaacaacaagaacggcgtggaccaggaaatcatcttcccacccatcaagaccgatgtgattacaatggaccccaaggacaactgctccaaggacgccaacgataccctgctgctccagctgaccaacaccagcgcctactacatgtacgagatcctgctgggcaaggccaccctgtacgccgtgctggtgtctgccctggtgctgatggctatggtcaagcggaaggacagccggggaagggccaagcgatctggatctggagcaacaaacttctcactactcaaacaagcaggtgacgtggaggagaatcccgggcctactagtatggactggatttggcgcatccttttccttgtcggcgctgctaccggcgcgcattccttcgaacaagttcagctggttcagagcggagccgaagtgaagaaacctggggcctctgtgaaggtgtcctgcaaggcttccggctataccttcaccagcttttggctgaactgggtccgacaggcccctggacaaggactggaatggatgggcaacatctaccccagcaccagctacaccgtgtacaaccagaaattcaaggaccgcgtgaccatgaccagggacaccagcacaagcacagtgtacatggaactgagcagcctgcggagcgaggataccgccgtgtattattgcgccagaacctggcggggcaacagcttcgattattggggccagggaaccaccgtgaccgtgtcatctacgcgtagccagcctcacaccaagcccagcgtgttcgtgatgaagaacggcaccaacgtggcctgcctcgtgaaagagttctaccccaaggacatcaggatcaacctggtgtccagcaagaagatcaccgagttcgaccccgccatcgtgatctcccccagcggcaagtacaacgccgtgaagctggggaagtatgaggacagcaacagcgtgacctgctccgtgcagcacgacaacaagaccgtgcacagcaccgactttgaagtgaaaaccgactccaccgaccacgtgaagcccaaagagacagagaacaccaagcagcccagcaagagctgccacaagcccaaggccatcgtgcacaccgagaaagtgaacatgatgagcctgaccgtgatcggcttcagaatcctgctgctgaaagtggccggctttaacctgctgatgaccctgcggctgtggtccagctaa

SEQ ID NO: 37507 - DNA, 1896 bp, synthetic construct
  source 1..1896: mol_type = other DNA
atggccttaccagtgaccgccttgctcctgccgctggccttgctgctccacgccgccaggccggacatcgtgatgacacagagccctgatagcctggccgtgtctctgggagagagagccaccatcaactgcaagagcagccagagcctgctgaacagcggcaaccagaagaactacctggcctggtatcagcagaagcccggccagcctcctaagctgctgatctactggggcagcaccagatccacaggcgtgcccgatagattttctggctctggcagcggcaccgacttcaccctgacaatttctagcctgcaagccgaggacgtggccgtgtactactgccagaacgactacacataccccttcaccttcggccagggcaccaagctggaaatcaaactcgaggacaagcagctggacgccgacgtgtcccccaagcctaccatcttcctgccctctatcgccgagacaaagctccagaaggccggcacctacctgtgcctgctggaaaagttcttcccagatgtgattaagatccactggcaggaaaagaagtccaacaccatcctgggcagccaggaaggcaacaccatgaagaccaacgacacctacatgaagttcagctggctgaccgtgcccgagaagtccctggacaaagaacacagatgcatcgtgcggcacgaaaacaacaagaacggcgtggaccaggaaatcatcttcccacccatcaagaccgatgtgattacaatggaccccaaggacaactgctccaaggacgccaacgataccctgctgctccagctgaccaacaccagcgccaccatcctgtacgagatcctgctgggcaaggccaccctgtacgccgtgctggtgtctgccctggtgctgatggctatggtcaagcggaaggacagccggggaagggccaagcgatctggatctggagcaacaaacttctcactactcaaacaagcaggtgacgtggaggagaatcccgggcctactagtatggactggatttggcgcatccttttccttgtcggcgctgctaccggcgcgcattccttcgaacaagttcagctggttcagagcggagccgaagtgaagaaacctggggcctctgtgaaggtgtcctgcaaggcttccggctataccttcaccagcttttggctgaactgggtccgacaggcccctggacaaggactggaatggatgggcaacatctaccccagcaccagctacaccgtgtacaaccagaaattcaaggaccgcgtgaccatgaccagggacaccagcacaagcacagtgtacatggaactgagcagcctgcggagcgaggataccgccgtgtattattgcgccagaacctggcggggcaacagcttcgattattggggccagggaaccaccgtgaccgtgtcatctacgcgtagccagcctcacaccaagcccagcgtgttcgtgatgaagaacggcaccaacgtggcctgcctcgtgaaagagttctaccccaaggacatcaggatcaacctggtgtccagcaagaagatcaccgagttcgaccccgccatcgtgatctcccccagcggcaagtacaacgccgtgaagctggggaagtatgaggacagcaacagcgtgacctgctccgtgcagcacgacaacaagaccgtgcacagcaccgactttgaagtgaaaaccgactccaccgaccacgtgaagcccaaagagacagagaacaccaagcagcccagcaagagctgccacaagcccaaggccatcgtgcacaccgagaaagtgaacatgatgagcctgaccgtgatcggcttcagaatcctgctgctgaaagtggccggctttaacctgctgatgaccctgcggctgtggtccagctaa

SEQ ID NO: 37508 - DNA, 1896 bp, synthetic construct
  source 1..1896: mol_type = other DNA
atggccttaccagtgaccgccttgctcctgccgctggccttgctgctccacgccgccaggccggacatcgtgatgacacagagccctgatagcctggccgtgtctctgggagagagagccaccatcaactgcaagagcagccagagcctgctgaacagcggcaaccagaagaactacctggcctggtatcagcagaagcccggccagcctcctaagctgctgatctactggggcagcaccagatccacaggcgtgcccgatagattttctggctctggcagcggcaccgacttcaccctgacaatttctagcctgcaagccgaggacgtggccgtgtactactgccagaacgactacacataccccttcaccttcggccagggcaccaagctggaaatcaaactcgaggacaagcagctggacgccgacgtgtcccccaagcctaccatcttcctgccctctatcgccgagacaaagctccagaaggccggcacctacctgtgcctgctggaaaagttcttcccagatgtgattaagatccactggcaggaaaagaagtccaacaccatcctgggcagccaggaaggcaacaccatgaagaccaacgacacctacatgaagttcagctggctgaccgtgcccgagaagtccctggacaaagaacacagatgcatcgtgcggcacgaaaacaacaagaacggcgtggaccaggaaatcatcttcccacccatcaagaccgatgtgattacaatggaccccaaggacaactgctccaaggacgccaacgataccctgctgctccagctgaccaacaccagcgcctactacatgtacgagatcctgctgggcaaggccaccctgtacgccgtgctggtgtctgccctggtgctgatggctatggtcaagcggaaggacagccggggaagggccaagcgatctggatctggagcaacaaacttctcactactcaaacaagcaggtgacgtggaggagaatcccgggcctactagtatggactggatttggcgcatccttttccttgtcggcgctgctaccggcgcgcattccttcgaacaagttcagctggttcagagcggagccgaagtgaagaaacctggggcctctgtgaaggtgtcctgcaaggcttccggctataccttcaccagcttttggctgaactgggtccgacaggcccctggacaaggactggaatggatgggcaacatctaccccagcaccagctacaccgtgtacaaccagaaattcaaggaccgcgtgaccatgaccagggacaccagcacaagcacagtgtacatggaactgagcagcctgcggagcgaggataccgccgtgtattattgcgccagaacctggcggggcaacagcttcgattattggggccagggaaccaccgtgaccgtgtcatctacgcgtagccagcctcacaccaagcccagcgtgttcgtgatgaagaacggcaccaacgtggcctgcctcgtgaaagagttctaccccaaggacatcaggatcaacctggtgtccagcaagaagatcaccgagttcgaccccgccatcgtgatctcccccagcggcaagtacaacgccgtgaagctggggaagtacgaggacagcaacagcgtgacctgctccgtgcagcacgacaacaagaccgtgcacagcaccgactttgaagtgaaaaccgactccaccgaccacgtgaagcccaaagagacagagaacaccaagcagcccagcaagagctgccacaagcccaaggccatcgtgcacaccgagaaagtgaacatgatgagcctgaccgtgctgggcttcagaatcctgctgctgaaagtggccggctttaacctgctgatgaccctgcggctgtggtccagctaa

SEQ ID NO: 37509 - DNA, 1896 bp, synthetic construct
  source 1..1896: mol_type = other DNA
atggccttaccagtgaccgccttgctcctgccgctggccttgctgctccacgccgccaggccggacatcgtgatgacacagagccctgatagcctggccgtgtctctgggagagagagccaccatcaactgcaagagcagccagagcctgctgaacagcggcaaccagaagaactacctggcctggtatcagcagaagcccggccagcctcctaagctgctgatctactggggcagcaccagatccacaggcgtgcccgatagattttctggctctggcagcggcaccgacttcaccctgacaatttctagcctgcaagccgaggacgtggccgtgtactactgccagaacgactacacataccccttcaccttcggccagggcaccaagctggaaatcaaactcgaggacaagcagctggacgccgacgtgtcccccaagcctaccatcttcctgccctctatcgccgagacaaagctccagaaggccggcacctacctgtgcctgctggaaaagttcttcccagatgtgattaagatccactggcaggaaaagaagtccaacaccatcctgggcagccaggaaggcaacaccatgaagaccaacgacacctacatgaagttcagctggctgaccgtgcccgagaagtccctggacaaagaacacagatgcatcgtgcggcacgaaaacaacaagaacggcgtggaccaggaaatcatcttcccacccatcaagaccgatgtgattacaatggaccccaaggacaactgctccaaggacgccaacgataccctgctgctccagctgaccaacaccagcgccaccatcctgtacgagatcctgctgggcaaggccaccctgtacgccgtgctggtgtctgccctggtgctgatggctatggtcaagcggaaggacagccggggaagggccaagcgatctggatctggagcaacaaacttctcactactcaaacaagcaggtgacgtggaggagaatcccgggcctactagtatggactggatttggcgcatccttttccttgtcggcgctgctaccggcgcgcattccttcgaacaagttcagctggttcagagcggagccgaagtgaagaaacctggggcctctgtgaaggtgtcctgcaaggcttccggctataccttcaccagcttttggctgaactgggtccgacaggcccctggacaaggactggaatggatgggcaacatctaccccagcaccagctacaccgtgtacaaccagaaattcaaggaccgcgtgaccatgaccagggacaccagcacaagcacagtgtacatggaactgagcagcctgcggagcgaggataccgccgtgtattattgcgccagaacctggcggggcaacagcttcgattattggggccagggaaccaccgtgaccgtgtcatctacgcgtagccagcctcacaccaagcccagcgtgttcgtgatgaagaacggcaccaacgtggcctgcctcgtgaaagagttctaccccaaggacatcaggatcaacctggtgtccagcaagaagatcaccgagttcgaccccgccatcgtgatctcccccagcggcaagtacaacgccgtgaagctggggaagtacgaggacagcaacagcgtgacctgctccgtgcagcacgacaacaagaccgtgcacagcaccgactttgaagtgaaaaccgactccaccgaccacgtgaagcccaaagagacagagaacaccaagcagcccagcaagagctgccacaagcccaaggccatcgtgcacaccgagaaagtgaacatgatgagcctgaccgtgctgggcttcagaatcctgctgctgaaagtggccggctttaacctgctgatgaccctgcggctgtggtccagctaa

SEQ ID NO: 37510 - DNA, 1878 bp, synthetic construct
  source 1..1878: mol_type = other DNA
atggccttaccagtgaccgccttgctcctgccgctggccttgctgctccacgccgccaggccggacatcgtgatgacacagagccctgatagcctggccgtgtctctgggagagagagccaccatcaactgcaagagcagccagagcctgctgaacagcggcaaccagaagaactacctggcctggtatcagcagaagcccggccagcctcctaagctgctgatctactggggcagcaccagatccacaggcgtgcccgatagattttctggctctggcagcggcaccgacttcaccctgacaatttctagcctgcaagccgaggacgtggccgtgtactactgccagaacgactacacataccccttcaccttcggccagggcaccaagctggaaatcaaactcgaggacctgaagaacgtgttcccacctgaggtggccgtgttcgagcctagcgaggccgagatcagccacacccagaaagccaccctcgtgtgcctggctaccggcttctaccccgaccatgtggaactgtcttggtgggtcaacggcaaagaggtgcacagcggcgtgtgtaccgacccccagccactgaaagaacagcccgccctgaacgacagccggtactgcctgagcagcagactgagagtgtccgccaccttctggcagaacccccggaaccacttcagatgccaggtgcagttctacggcctgagcgagaacgacgagtggacccaggacagagccaagcccgtgacccagatcgtgtctgccgaagcctggggcagagccgattgcggctttaccagcgagagctaccagcagggcgtgctgagcgccaccatcctgtacttgttgctgctgctgaagtccgtggtgtacttcgccatcatcacatgctgcctgctgcggagaaccgccttctgctgcaacggcgagaagtctagggccaagcgatctggatctggagcaacaaacttctcactactcaaacaagcaggtgacgtggaggagaatcccgggcctactagtatggactggatttggcgcatccttttccttgtcggcgctgctaccggcgcgcattccttcgaacaagttcagctggttcagagcggagccgaagtgaagaaacctggggcctctgtgaaggtgtcctgcaaggcttccggctataccttcaccagcttttggctgaactgggtccgacaggcccctggacaaggactggaatggatgggcaacatctaccccagcaccagctacaccgtgtacaaccagaaattcaaggaccgcgtgaccatgaccagggacaccagcacaagcacagtgtacatggaactgagcagcctgcggagcgaggataccgccgtgtattattgcgccagaacctggcggggcaacagcttcgattattggggccagggaaccaccgtgaccgtgtcatctacgcgtatccagaaccctgatcctgccgtgtaccagctgcgggatagcaagagcagcgacaagagcgtgtgtctgttcaccgacttcgacagccagaccaacgtgtcccagagcaaggactccgacgtgtacatcaccgataagtgcgtgctggacatgcggagcatggacttcaagagcaactccgccgtggcctggtccaacaagtccgatttcgcctgcgccaacgccttcaacaacagcattatccccgaggacacattcttcccaagccccgagagcagctgcgacgtgaagctggtggaaaagagcttcgagacagacaccaacctgaacttccagaacctgagcgtgatcggcctgcggatgctgttcgccaaaaccgtggccgtgaacttcctgctgaccgccaagctgttcttcctctaa

SEQ ID NO: 37511 - DNA, 1965 bp, synthetic construct
  source 1..1965: mol_type = other DNA
atggccttaccagtgaccgccttgctcctgccgctggccttgctgctccacgccgccaggccggacatcgtgatgacacagagccctgatagcctggccgtgtctctgggagagagagccaccatcaactgcaagagcagccagagcctgctgaacagcggcaaccagaagaactacctggcctggtatcagcagaagcccggccagcctcctaagctgctgatctactggggcagcaccagatccacaggcgtgcccgatagattttctggctctggcagcggcaccgacttcaccctgacaatttctagcctgcaagccgaggacgtggccgtgtactactgccagaacgactacacataccccttcaccttcggccagggcaccaagctggaaatcaaactcgaggacctgaagaacgtgttcccacctgaggtggccgtgttcgagcctagcgaggccgagatcagccacacccagaaagccaccctcgtgtgcctggctaccggcttctaccccgaccatgtggaactgtcttggtgggtcaacggcaaagaggtgcacagcggcgtgtctaccgacccccagccactgaaagaacagcccgccctgaacgacagccggtactgcctgagcagcagactgagagtgtccgccaccttctggcagaacccccggaaccacttcagatgccaggtgcagttctacggcctgagcgagaacgacgagtggacccaggacagagccaagcccgtgacccagatcgtgtctgccgaagcctggggcagagccgattgcggatcctccaaggacgccaacgataccctgctgctccagctgaccaacaccagcgcctactacatgtacttgttgctgctgctgaagtccgtggtgtacttcgccatcatcacatgctgcctgctgcggagaaccgccttctgctgcaacggcgagaagtctagggccaagcgatctggatctggagcaacaaacttctcactactcaaacaagcaggtgacgtggaggagaatcccgggcctactagtatggactggatttggcgcatccttttccttgtcggcgctgctaccggcgcgcattccttcgaacaagttcagctggttcagagcggagccgaagtgaagaaacctggggcctctgtgaaggtgtcctgcaaggcttccggctataccttcaccagcttttggctgaactgggtccgacaggcccctggacaaggactggaatggatgggcaacatctaccccagcaccagctacaccgtgtacaaccagaaattcaaggaccgcgtgaccatgaccagggacaccagcacaagcacagtgtacatggaactgagcagcctgcggagcgaggataccgccgtgtattattgcgccagaacctggcggggcaacagcttcgattattggggccagggaaccaccgtgaccgtgtcatctacgcgtatccagaaccctgatcctgccgtgtaccagctgcgggatagcaagagcagcgacaagagcgtgtgtctgttcaccgacttcgacagccagaccaacgtgtcccagagcaaggactccgacgtgtacatcaccgataagaccgtgctggacatgcggagcatggacttcaagagcaactccgccgtggcctggtccaacaagtccgatttcgcctgcgccaacgccttcaacaacagcattatccccgaggacacattcttcccaagccccgagagcagctgcggtaccgaagtgaaaaccgactccaccgaccacgtgaagcccaaagagacagagaacaccaagcagcccagcaagagctgccacaagcccaaggccatcgtgcacaccgagaaagtgaacatgatgagcctgaccgtgctgggcctgcggatgctgttcgccaaaaccgtggccgtgaacttcctgctgaccgccaagctgttcttcctctaa

SEQ ID NO: 37512 - DNA, 1875 bp, synthetic construct
  source 1..1875: mol_type = other DNA
atggccttaccagtgaccgccttgctcctgccgctggccttgctgctccacgccgccaggccggacatcgtgatgacacagagccctgatagcctggccgtgtctctgggagagagagccaccatcaactgcaagagcagccagagcctgctgaacagcggcaaccagaagaactacctggcctggtatcagcagaagcccggccagcctcctaagctgctgatctactggggcagcaccagatccacaggcgtgcccgatagattttctggctctggcagcggcaccgacttcaccctgacaatttctagcctgcaagccgaggacgtggccgtgtactactgccagaacgactacacataccccttcaccttcggccagggcaccaagctggaaatcaaactcgaggacctgaagaacgtgttcccacctgaggtggccgtgttcgagcctagcgaggccgagatcagccacacccagaaagccaccctcgtgtgcctggctaccggcttctaccccgaccatgtggaactgtcttggtgggtcaacggcaaagaggtgcacagcggcgtgtgtaccgacccccagccactgaaagaacagcccgccctgaacgacagccggtactgcctgagcagcagactgagagtgtccgccaccttctggcagaacccccggaaccacttcagatgccaggtgcagttctacggcctgagcgagaacgacgagtggacccaggacagagccaagcccgtgacccagatcgtgtctgccgaagcctggggcagagccgattgcgacgtgaagctggtggaaaagagcttcgagacagacaccaacctgaacttccagaacctgagcgtgatcggcttcagaatcctgctgctgaaagtggccggctttaacctgctgatgaccctgcggctgtggtccagcagggccaagcgatctggatctggagcaacaaacttctcactactcaaacaagcaggtgacgtggaggagaatcccgggcctactagtatggactggatttggcgcatccttttccttgtcggcgctgctaccggcgcgcattccttcgaacaagttcagctggttcagagcggagccgaagtgaagaaacctggggcctctgtgaaggtgtcctgcaaggcttccggctataccttcaccagcttttggctgaactgggtccgacaggcccctggacaaggactggaatggatgggcaacatctaccccagcaccagctacaccgtgtacaaccagaaattcaaggaccgcgtgaccatgaccagggacaccagcacaagcacagtgtacatggaactgagcagcctgcggagcgaggataccgccgtgtattattgcgccagaacctggcggggcaacagcttcgattattggggccagggaaccaccgtgaccgtgtcatctacgcgtatccagaaccctgatcctgccgtgtaccagctgcgggatagcaagagcagcgacaagagcgtgtgtctgttcaccgacttcgacagccagaccaacgtgtcccagagcaaggactccgacgtgtacatcaccgataagtgcgtgctggacatgcggagcatggacttcaagagcaactccgccgtggcctggtccaacaagtccgatttcgcctgcgccaacgccttcaacaacagcattatccccgaggacacattcttcccaagccccgagagcagctgcggctttaccagcgagagctaccagcagggcgtgctgagcgccaccatcctgtacgagatcctgctgggcaaggccaccctgtacgccgtgctggtgtctgccctggtgctgatggctatggtcaagcggaaggacagccggggataa

SEQ ID NO: 37513 - DNA, 1875 bp, synthetic construct
  source 1..1875: mol_type = other DNA
atggccttaccagtgaccgccttgctcctgccgctggccttgctgctccacgccgccaggccggacatcgtgatgacacagagccctgatagcctggccgtgtctctgggagagagagccaccatcaactgcaagagcagccagagcctgctgaacagcggcaaccagaagaactacctggcctggtatcagcagaagcccggccagcctcctaagctgctgatctactggggcagcaccagatccacaggcgtgcccgatagattttctggctctggcagcggcaccgacttcaccctgacaatttctagcctgcaagccgaggacgtggccgtgtactactgccagaacgactacacataccccttcaccttcggccagggcaccaagctggaaatcaaactcgaggacctgaagaacgtgttcccacctgaggtggccgtgttcgagcctagcgaggccgagatcagccacacccagaaagccaccctcgtgtgcctggctaccggcttctaccccgaccatgtggaactgtcttggtgggtcaacggcaaagaggtgcacagcggcgtgtgtaccgacccccagccactgaaagaacagcccgccctgaacgacagccggtactgcctgagcagcagactgagagtgtccgccaccttctggcagaacccccggaaccacttcagatgccaggtgcagttctacggcctgagcgagaacgacgagtggacccaggacagagccaagcccgtgacccagatcgtgtctgccgaagcctggggcagagccgattgcggctttaccagcgagagctaccagcagggcgtgctgagcgccaccaacctgagcgtgatcggcttcagaatcctgctgctgaaagtggccggctttaacctgctgatgaccctgcggctgtggtccagcagggccaagcgatctggatctggagcaacaaacttctcactactcaaacaagcaggtgacgtggaggagaatcccgggcctactagtatggactggatttggcgcatccttttccttgtcggcgctgctaccggcgcgcattccttcgaacaagttcagctggttcagagcggagccgaagtgaagaaacctggggcctctgtgaaggtgtcctgcaaggcttccggctataccttcaccagcttttggctgaactgggtccgacaggcccctggacaaggactggaatggatgggcaacatctaccccagcaccagctacaccgtgtacaaccagaaattcaaggaccgcgtgaccatgaccagggacaccagcacaagcacagtgtacatggaactgagcagcctgcggagcgaggataccgccgtgtattattgcgccagaacctggcggggcaacagcttcgattattggggccagggaaccaccgtgaccgtgtcatctacgcgtatccagaaccctgatcctgccgtgtaccagctgcgggatagcaagagcagcgacaagagcgtgtgtctgttcaccgacttcgacagccagaccaacgtgtcccagagcaaggactccgacgtgtacatcaccgataagtgcgtgctggacatgcggagcatggacttcaagagcaactccgccgtggcctggtccaacaagtccgatttcgcctgcgccaacgccttcaacaacagcattatccccgaggacacattcttcccaagccccgagagcagctgcgacgtgaagctggtggaaaagagcttcgagacagacaccaacctgaacttccagatcctgtacgagatcctgctgggcaaggccaccctgtacgccgtgctggtgtctgccctggtgctgatggctatggtcaagcggaaggacagccggggataa

SEQ ID NO: 37514 - DNA, 1875 bp, synthetic construct; identical to SEQ ID NO: 37512
  source 1..1875: mol_type = other DNA

SEQ ID NO: 37515 - DNA, 1875 bp, synthetic construct; identical to SEQ ID NO: 37513
  source 1..1875: mol_type = other DNA

SEQ ID NO: 37516 - DNA, 1872 bp, synthetic construct
  source 1..1872: mol_type = other DNA
atggccttaccagtgaccgccttgctcctgccgctggccttgctgctccacgccgccaggccggacatcgtgatgacacagagccctgatagcctggccgtgtctctgggagagagagccaccatcaactgcaagagcagccagagcctgctgaacagcggcaaccagaagaactacctggcctggtatcagcagaagcccggccagcctcctaagctgctgatctactggggcagcaccagatccacaggcgtgcccgatagattttctggctctggcagcggcaccgacttcaccctgacaatttctagcctgcaagccgaggacgtggccgtgtactactgccagaacgactacacataccccttcaccttcggccagggcaccaagctggaaatcaaactcgaggacctgaagaacgtgttcccacctgaggtggccgtgttcgagcctagcgaggccgagatcagccacacccagaaagccaccctcgtgtgcctggctaccggcttctaccccgaccatgtggaactgtcttggtgggtcaacggcaaagaggtgcacagcggcgtgtgtaccgacccccagccactgaaagaacagcccgccctgaacgacagccggtactgcctgagcagcagactgagagtgtccgccaccttctggcagaacccccggaaccacttcagatgccaggtgcagttctacggcctgagcgagaacgacgagtggacccaggacagagccaagcccgtgacccagatcgtgtctgccgaagcctggggcagagccgattgcgacgtgaagctggtggaaaagagcttcgagacagacaccaacctgaacttccagaacctgagcgtgatcggcttcagaatcctgctgctgaaagtggccggctttaacctgctgatgaccctgcggctgtggtccagcagggccaagcgatctggatctggagcaacaaacttctcactactcaaacaagcaggtgacgtggaggagaatcccgggcctactagtatggactggatttggcgcatccttttccttgtcggcgctgctaccggcgcgcattccttcgaacaagttcagctggttcagagcggagccgaagtgaagaaacctggggcctctgtgaaggtgtcctgcaaggcttccggctataccttcaccagcttttggctgaactgggtccgacaggcccctggacaaggactggaatggatgggcaacatctaccccagcaccagctacaccgtgtacaaccagaaattcaaggaccgcgtgaccatgaccagggacaccagcacaagcacagtgtacatggaactgagcagcctgcggagcgaggataccgccgtgtattattgcgccagaacctggcggggcaacagcttcgattattggggccagggaaccaccgtgaccgtgtcatctacgcgtatccagaaccctgatcctgccgtgtaccagctgcgggatagcaagagcagcgacaagagcgtgtgtctgttcaccgacttcgacagccagaccaacgtgtcccagagcaaggactccgacgtgtacatcaccgataagtgcgtgctggacatgcggagcatggacttcaagagcaactccgccgtggcctggtccaacaagtccgatttcgcctgcgccaacgccttcaacaacagcattatccccgaggacacattcttcccaagccccgagagcagctgcggctttaccagcgagagctaccagcagggcgtgctgagcgccaccatcctgtacgagatcctgctgggcaaggccaccctgtacgccgtgctggtgtctgccctggtgctgatggctatggtcaagcggaaggacagccgggga

SEQ ID NO: 37517 - DNA, 1884 bp, synthetic construct
  source 1..1884: mol_type = other DNA
atggccttaccagtgaccgccttgctcctgccgctggccttgctgctccacgccgccaggccggacatcgtgatgacacagagccctgatagcctggccgtgtctctgggagagagagccaccatcaactgcaagagcagccagagcctgctgaacagcggcaaccagaagaactacctggcctggtatcagcagaagcccggccagcctcctaagctgctgatctactggggcagcaccagatccacaggcgtgcccgatagattttctggctctggcagcggcaccgacttcaccctgacaatttctagcctgcaagccgaggacgtggccgtgtactactgccagaacgactacacataccccttcaccttcggccagggcaccaagctggaaatcaaactcgaggccgacgtgtcccccaagcctaccatcttcctgccctctatcgccgagacaaagctccagaaggccggcacctacctgtgcctgctggaaaagttcttcccagatgtgattaagatccactggcaggaaaagaagtccaacaccatcctgggcagccaggaaggcaacaccatgaagaccaacgacacctacatgaagttcagctggctgaccgtgcccgagaagtccctggacaaagaacacagatgcatcgtgcggcacgaaaacaacaagaacggcgtggaccaggaaatcatcttcccacccatcaagaccgatgtgattacaatggaccccaaggacaactgctccaaggacgccaacgataccctgctgctccagctgaccaacaccagcgcctactacatgtacttgttgctgctgctgaagtccgtggtgtacttcgccatcatcacatgctgcctgctgcggagaaccgccttctgctgcaacggcgagaagtctagggccaagcgatctggatctggagcaacaaacttctcactactcaaacaagcaggtgacgtggaggagaatcccgggcctactagtatggactggatttggcgcatccttttccttgtcggcgctgctaccggcgcgcattccttcgaacaagttcagctggttcagagcggagccgaagtgaagaaacctggggcctctgtgaaggtgtcctgcaaggcttccggctataccttcaccagcttttggctgaactgggtccgacaggcccctggacaaggactggaatggatgggcaacatctaccccagcaccagctacaccgtgtacaaccagaaattcaaggaccgcgtgaccatgaccagggacaccagcacaagcacagtgtacatggaactgagcagcctgcggagcgaggataccgccgtgtattattgcgccagaacctggcggggcaacagcttcgattattggggccagggaaccaccgtgaccgtgtcatctacgcgtagccagcctcacaccaagcccagcgtgttcgtgatgaagaacggcaccaacgtggcctgcctcgtgaaagagttctaccccaaggacatcaggatcaacctggtgtccagcaagaagatcaccgagttcgaccccgccatcgtgatctcccccagcggcaagtacaacgccgtgaagctggggaagtatgaggacagcaacagcgtgacctgctccgtgcagcacgacaacaagaccgtgcacagcaccgactttgaagtgaaaaccgactccaccgaccacgtgaagcccaaagagacagagaacaccaagcagcccagcaagagctgccacaagcccaaggccatcgtgcacaccgagaaagtgaacatgatgagcctgaccgtgatcggcttcagaatcctgctgctgaaagtggccggctttaacctgctgatgaccctgcggctgtggtccagctaa

SEQ ID NO: 37518 - DNA, 1884 bp, synthetic construct
  source 1..1884: mol_type = other DNA
atggccttaccagtgaccgccttgctcctgccgctggccttgctgctccacgccgccaggccggacatcgtgatgacacagagccctgatagcctggccgtgtctctgggagagagagccaccatcaactgcaagagcagccagagcctgctgaacagcggcaaccagaagaactacctggcctggtatcagcagaagcccggccagcctcctaagctgctgatctactggggcagcaccagatccacaggcgtgcccgatagattttctggctctggcagcggcaccgacttcaccctgacaatttctagcctgcaagccgaggacgtggccgtgtactactgccagaacgactacacataccccttcaccttcggccagggcaccaagctggaaatcaaactcgaggccgacgtgtcccccaagcctaccatcttcctgccctctatcgccgagacaaagctccagaaggccggcacctacctgtgcctgctggaaaagttcttcccagatgtgattaagatccactggcaggaaaagaagtccaacaccatcctgggcagccaggaaggcaacaccatgaagaccaacgacacctacatgaagttcagctggctgaccgtgcccgagaagtccctggacaaagaacacagatgcatcgtgcggcacgaaaacaacaagaacggcgtggaccaggaaatcatcttcccacccatcaagaccgatgtgattacaatggaccccaaggacaactgctccaaggacgccaacgataccctgctgctccagctgaccaacaccagcgcctactacatgtacttgttgctgctgctgaagtccgtggtgtacttcgccatcatcacatgctgcctgctgcggagaaccgccttctgctgcaacggcgagaagtctagggccaagcgatctggatctggagcaacaaacttctcactactcaaacaagcaggtgacgtggaggagaatcccgggcctactagtatggactggatttggcgcatccttttccttgtcggcgctgctaccggcgcgcattccttcgaacaagttcagctggttcagagcggagccgaagtgaagaaacctggggcctctgtgaaggtgtcctgcaaggcttccggctataccttcaccagcttttggctgaactgggtccgacaggcccctggacaaggactggaatggatgggcaacatctaccccagcaccagctacaccgtgtacaaccagaaattcaaggaccgcgtgaccatgaccagggacaccagcacaagcacagtgtacatggaactgagcagcctgcggagcgaggataccgccgtgtattattgcgccagaacctggcggggcaacagcttcgattattggggccagggaaccaccgtgaccgtgtcatctacgcgtagccagcctcacaccaagcccagcgtgttcgtgatgaagaacggcaccaacgtggcctgcctcgtgaaagagttctaccccaaggacatcaggatcaacctggtgtccagcaagaagatcaccgagttcgaccccgccatcgtgatctcccccagcggcaagtacaacgccgtgaagctggggaagtacgaggacagcaacagcgtgacctgctccgtgcagcacgacaacaagaccgtgcacagcaccgactttgaagtgaaaaccgactccaccgaccacgtgaagcccaaagagacagagaacaccaagcagcccagcaagagctgccacaagcccaaggccatcgtgcacaccgagaaagtgaacatgatgagcctgaccgtgctgggcttcagaatcctgctgctgaaagtggccggctttaacctgctgatgaccctgcggctgtggtccagctaa

SEQ ID NO: 37519 - DNA, 1872 bp, synthetic construct; identical to SEQ ID NO: 37516
  source 1..1872: mol_type = other DNA

SEQ ID NO: 37520 - DNA, 1884 bp, synthetic construct
  source 1..1884: mol_type = other DNA
atggccttaccagtgaccgccttgctcctgccgctggccttgctgctccacgccgccaggccggacatcgtgatgacacagagccctgatagcctggccgtgtctctgggagagagagccaccatcaactgcaagagcagccagagcctgctgaacagcggcaaccagaagaactacctggcctggtatcagcagaagcccggccagcctcctaagctgctgatctactggggcagcaccagatccacaggcgtgcccgatagattttctggctctggcagcggcaccgacttcaccctgacaatttctagcctgcaagccgaggacgtggccgtgtactactgccagaacgactacacataccccttcaccttcggccagggcaccaagctggaaatcaaactcgagatccagaaccctgatcctgccgtgtaccagctgcgggatagcaagagcagcgacaagagcgtgtgtctgttcaccgacttcgacagccagaccaacgtgtcccagagcaaggactccgacgtgtacatcaccgataagtgcgtgctggacatgcggagcatggacttcaagagcaactccgccgtggcctggtccaacaagtccgatttcgcctgcgccaacgccttcaacaacagcattatccccgaggacacattcttcccaagccccgagagcagctgcggctttaccagcgagagctaccagcagggcgtgctgagcgccaccatcctgtacgagatcctgctgggcaaggccaccctgtacgccgtgctggtgtctgccctggtgctgatggctatggtcaagcggaaggacagccggggacgcgccaagagaagcggatctggcgtgaagcagaccctgaatttcgacctgctgaagctggctggcgacgtggaatccaacccaggccctactagtatggactggatttggcgcatccttttccttgtcggcgctgctaccggcgcgcattccttcgaacaagttcagctggttcagagcggagccgaagtgaagaaacctggggcctctgtgaaggtgtcctgcaaggcttccggctataccttcaccagcttttggctgaactgggtccgacaggcccctggacaaggactggaatggatgggcaacatctaccccagcaccagctacaccgtgtacaaccagaaattcaaggaccgcgtgaccatgaccagggacaccagcacaagcacagtgtacatggaactgagcagcctgcggagcgaggataccgccgtgtattattgcgccagaacctggcggggcaacagcttcgattattggggccagggaaccaccgtgaccgtgtcatctacgcgtgaggacctgaagaacgtgttcccacctgaggtggccgtgttcgagcctagcgaggccgagatcagccacacccagaaagccaccctcgtgtgcctggctaccggcttctaccccgaccatgtggaactgtcttggtgggtcaacggcaaagaggtgcacagcggcgtgtgtaccgacccccagccactgaaagaacagcccgccctgaacgacagccggtactgcctgagcagcagactgagagtgtccgccaccttctggcagaacccccggaaccacttcagatgccaggtgcagttctacggcctgagcgagaacgacgagtggacccaggacagagccaagcccgtgacccagatcgtgtctgccgaagcctggggcagagccgattgcgacgtgaagctggtggaaaagagcttcgagacagacaccaacctgaacttccagaacctgagcgtgatcggcttcagaatcctgctgctgaaagtggccggctttaacctgctgatgaccctgcggctgtggtccagc

SEQ ID NO: 37521 - DNA, 2277 bp, synthetic construct
  source 1..2277: mol_type = other DNA
atggccttaccagtgaccgccttgctcctgccgctggccttgctgctccacgccgccaggccggaagtgcagctggttgaatctggcggaggactggttcagcctggcggatctctgagactgtcttgtgccgccagcggcttcagcttcagcgacttttggatgagctgggtccgacaggcccctggcaaaggacttgaatgggtcgccacaatcagccaggccggcagcgagaaggactacgtggactctgtgaagggcagattcaccatcagccgggacaacgccaagaagtccctgtacctccagatgaacagcctgagagccgaggacaccgccgtgtactattgtgcctctggcgtgtacagcttcgactacagaggccagggcaccctggtcacagtctcttctggtaccggcggaggcggatctggcggcggaggtagcggtggcggaggatctgaattcgacatcgtgatgacacagagccctgatagcctggccgtgtctctgggagagagagccaccatcaactgcaagagcagccagagcctgctgaacagcggcaaccagaagaactacctggcctggtatcagcagaagcccggccagcctcctaagctgctgatctactggggcagcaccagatccacaggcgtgcccgatagattttctggctctggcagcggcaccgacttcaccctgacaatttctagcctgcaagccgaggacgtggccgtgtactactgccagaacgactacacataccccttcaccttcggccagggcaccaagctggaaatcaaactcgaggacctgaagaacgtgttcccacctgaggtggccgtgttcgagcctagcgaggccgagatcagccacacccagaaagccaccctcgtgtgcctggctaccggcttctaccccgaccatgtggaactgtcttggtgggtcaacggcaaagaggtgcacagcggcgtgtgtaccgacccccagccactgaaagaacagcccgccctgaacgacagccggtactgcctgagcagcagactgagagtgtccgccaccttctggcagaacccccggaaccacttcagatgccaggtgcagttctacggcctgagcgagaacgacgagtggacccaggacagagccaagcccgtgacccagatcgtgtctgccgaagcctggggcagagccgattgcgacgtgaagctggtggaaaagagcttcgagacagacaccaacctgaacttccagaacctgagcgtgatcggcttcagaatcctgctgctgaaagtggccggctttaacctgctgatgaccctgcggctgtggtccagcagggccaagcgatctggatctggagcaacaaacttctcactactcaaacaagcaggtgacgtggaggagaatcccgggcctactagtatggactggatttggcgcatccttttccttgtcggcgctgctaccggcgcgcattccttcgaacaagttcagctggttcagagcggagccgaagtgaagaaacctggggcctctgtgaaggtgtcctgcaaggcttccggctataccttcaccagcttttggctgaactgggtccgacaggcccctggacaaggactggaatggatgggcaacatctaccccagcaccagctacaccgtgtacaaccagaaattcaaggaccgcgtgaccatgaccagggacaccagcacaagcacagtgtacatggaactgagcagcctgcggagcgaggataccgccgtgtattattgcgccagaacctggcggggcaacagcttcgattattggggccagggaaccaccgtgaccgtgtcatctacgcgtatccagaaccctgatcctgccgtgtaccagctgcgggatagcaagagcagcgacaagagcgtgtgtctgttcaccgacttcgacagccagaccaacgtgtcccagagcaaggactccgacgtgtacatcaccgataagtgcgtgctggacatgcggagcatggacttcaagagcaactccgccgtggcctggtccaacaagtccgatttcgcctgcgccaacgccttcaacaacagcattatccccgaggacacattcttcccaagccccgagagcagctgcggctttaccagcgagagctaccagcagggcgtgctgagcgccaccatcctgtacgagatcctgctgggcaaggccaccctgtacgccgtgctggtgtctgccctggtgctgatggctatggtcaagcggaaggacagccgggga

SEQ ID NO: 37522 - DNA, 2289 bp, synthetic construct
  source 1..2289: mol_type = other DNA
atggccttaccagtgaccgccttgctcctgccgctggccttgctgctccacgccgccaggccggaagtgcagctggttgaatctggcggaggactggttcagcctggcggatctctgagactgtcttgtgccgccagcggcttcagcttcagcgacttttggatgagctgggtccgacaggcccctggcaaaggacttgaatgggtcgccacaatcagccaggccggcagcgagaaggactacgtggactctgtgaagggcagattcaccatcagccgggacaacgccaagaagtccctgtacctccagatgaacagcctgagagccgaggacaccgccgtgtactattgtgcctctggcgtgtacagcttcgactacagaggccagggcaccctggtcacagtctcttctggtaccggcggaggcggatctggcggcggaggtagcggtggcggaggatctgaattcgacatcgtgatgacacagagccctgatagcctggccgtgtctctgggagagagagccaccatcaactgcaagagcagccagagcctgctgaacagcggcaaccagaagaactacctggcctggtatcagcagaagcccggccagcctcctaagctgctgatctactggggcagcaccagatccacaggcgtgcccgatagattttctggctctggcagcggcaccgacttcaccctgacaatttctagcctgcaagccgaggacgtggccgtgtactactgccagaacgactacacataccccttcaccttcggccagggcaccaagctggaaatcaaactcgagatccagaaccctgatcctgccgtgtaccagctgcgggatagcaagagcagcgacaagagcgtgtgtctgttcaccgacttcgacagccagaccaacgtgtcccagagcaaggactccgacgtgtacatcaccgataagtgcgtgctggacatgcggagcatggacttcaagagcaactccgccgtggcctggtccaacaagtccgatttcgcctgcgccaacgccttcaacaacagcattatccccgaggacacattcttcccaagccccgagagcagctgcggctttaccagcgagagctaccagcagggcgtgctgagcgccaccatcctgtacgagatcctgctgggcaaggccaccctgtacgccgtgctggtgtctgccctggtgctgatggctatggtcaagcggaaggacagccggggacgcgccaagagaagcggatctggcgtgaagcagaccctgaatttcgacctgctgaagctggctggcgacgtggaatccaacccaggccctactagtatggactggatttggcgcatccttttccttgtcggcgctgctaccggcgcgcattccttcgaacaagttcagctggttcagagcggagccgaagtgaagaaacctggggcctctgtgaaggtgtcctgcaaggcttccggctataccttcaccagcttttggctgaactgggtccgacaggcccctggacaaggactggaatggatgggcaacatctaccccagcaccagctacaccgtgtacaaccagaaattcaaggaccgcgtgaccatgaccagggacaccagcacaagcacagtgtacatggaactgagcagcctgcggagcgaggataccgccgtgtattattgcgccagaacctggcggggcaacagcttcgattattggggccagggaaccaccgtgaccgtgtcatctacgcgtgaggacctgaagaacgtgttcccacctgaggtggccgtgttcgagcctagcgaggccgagatcagccacacccagaaagccaccctcgtgtgcctggctaccggcttctaccccgaccatgtggaactgtcttggtgggtcaacggcaaagaggtgcacagcggcgtgtgtaccgacccccagccactgaaagaacagcccgccctgaacgacagccggtactgcctgagcagcagactgagagtgtccgccaccttctggcagaacccccggaaccacttcagatgccaggtgcagttctacggcctgagcgagaacgacgagtggacccaggacagagccaagcccgtgacccagatcgtgtctgccgaagcctggggcagagccgattgcgacgtgaagctggtggaaaagagcttcgagacagacaccaacctgaacttccagaacctgagcgtgatcggcttcagaatcctgctgctgaaagtggccggctttaacctgctgatgaccctgcggctgtggtccagc

SEQ ID NO: 37523 - DNA, 2688 bp, synthetic construct
  source 1..2688: mol_type = other DNA
atggccttaccagtgaccgccttgctcctgccgctggccttgctgctccacgccgccaggccggaagtgcagctggttgaatctggcggaggactggttcagcctggcggatctctgagactgtcttgtgccgccagcggcttcagcttcagcgacttttggatgagctgggtccgacaggcccctggcaaaggacttgaatgggtcgccacaatcagccaggccggcagcgagaaggactacgtggactctgtgaagggcagattcaccatcagccgggacaacgccaagaagtccctgtacctccagatgaacagcctgagagccgaggacaccgccgtgtactattgtgcctctggcgtgtacagcttcgactacagaggccagggcaccctggtcacagtctcttctggtaccggcggaggcggatctggcggcggaggtagcggtggcggaggatctgaattcgacatcgtgatgacacagagccctgatagcctggccgtgtctctgggagagagagccaccatcaactgcaagagcagccagagcctgctgaacagcggcaaccagaagaactacctggcctggtatcagcagaagcccggccagcctcctaagctgctgatctactggggcagcaccagatccacaggcgtgcccgatagattttctggctctggcagcggcaccgacttcaccctgacaatttctagcctgcaagccgaggacgtggccgtgtactactgccagaacgactacacataccccttcaccttcggccagggcaccaagctggaaatcaaactcgaggacctgaagaacgtgttcccacctgaggtggccgtgttcgagcctagcgaggccgagatcagccacacccagaaagccaccctcgtgtgcctggctaccggcttctaccccgaccatgtggaactgtcttggtgggtcaacggcaaagaggtgcacagcggcgtgtgtaccgacccccagccactgaaagaacagcccgccctgaacgacagccggtactgcctgagcagcagactgagagtgtccgccaccttctggcagaacccccggaaccacttcagatgccaggtgcagttctacggcctgagcgagaacgacgagtggacccaggacagagccaagcccgtgacccagatcgtgtctgccgaagcctggggcagagccgattgcgacgtgaagctggtggaaaagagcttcgagacagacaccaacctgaacttccagaacctgagcgtgatcggcttcagaatcctgctgctgaaagtggccggctttaacctgctgatgaccctgcggctgtggtccagcagggccaagcgatctggatctggagcaacaaacttctcactactcaaacaagcaggtgacgtggaggagaatcccgggcctactagtatggactggatttggcgcatccttttccttgtcggcgctgctaccggcgcgcattccgggccccagctccagctgcaagagtctggacctggcctggtcaagcctagcgagacactgagcctgacctgtaccgtgtccggcgatagcatcagcagcggcgattactactggggctggatcagacagcctcctggcaaaggactggaatggatcggccacatctactacagcggcgtgacctactacaaccccagcctgaagtccagagtgaccatcagcgtggacaccagccggaaccagttctccctgaagctgtctagcgtgacagccgccgataccgccgtgtactactgcaccagagaggacagcagcaactggcggagtagaggccagggaacactggtcacagttagctctggatccggcggaggcggaagtggaggcggaggatctggcggcggaggctctttcgaacaagttcagctggttcagagcggagccgaagtgaagaaacctggggcctctgtgaaggtgtcctgcaaggcttccggctataccttcaccagcttttggctgaactgggtccgacaggcccctggacaaggactggaatggatgggcaacatctaccccagcaccagctacaccgtgtacaaccagaaattcaaggaccgcgtgaccatgaccagggacaccagcacaagcacagtgtacatggaactgagcagcctgcggagcgaggataccgccgtgtattattgcgccagaacctggcggggcaacagcttcgattattggggccagggaaccaccgtgaccgtgtcatctacgcgtatccagaaccctgatcctgccgtgtaccagctgcgggatagcaagagcagcgacaagagcgtgtgtctgttcaccgacttcgacagccagaccaacgtgtcccagagcaaggactccgacgtgtacatcaccgataagtgcgtgctggacatgcggagcatggacttcaagagcaactccgccgtggcctggtccaacaagtccgatttcgcctgcgccaacgccttcaacaacagcattatccccgaggacacattcttcccaagccccgagagcagctgcggctttaccagcgagagctaccagcagggcgtgctgagcgccaccatcctgtacgagatcctgctgggcaaggccaccctgtacgccgtgctggtgtctgccctggtgctgatggctatggtcaagcggaaggacagccgggga

SEQ ID NO: 37524 - DNA, 2700 bp, synthetic construct
  source 1..2700: mol_type = other DNA
atggccttaccagtgaccgccttgctcctgccgctggccttgctgctccacgccgccaggccggaagtgcagctggttgaatctggcggaggactggttcagcctggcggatctctgagactgtcttgtgccgccagcggcttcagcttcagcgacttttggatgagctgggtccgacaggcccctggcaaaggacttgaatgggtcgccacaatcagccaggccggcagcgagaaggactacgtggactctgtgaagggcagattcaccatcagccgggacaacgccaagaagtccctgtacctccagatgaacagcctgagagccgaggacaccgccgtgtactattgtgcctctggcgtgtacagcttcgactacagaggccagggcaccctggtcacagtctcttctggtaccggcggaggcggatctggcggcggaggtagcggtggcggaggatctgaattcgacatcgtgatgacacagagccctgatagcctggccgtgtctctgggagagagagccaccatcaactgcaagagcagccagagcctgctgaacagcggcaaccagaagaactacctggcctggtatcagcagaagcccggccagcctcctaagctgctgatctactggggcagcaccagatccacaggcgtgcccgatagattttctggctctggcagcggcaccgacttcaccctgacaatttctagcctgcaagccgaggacgtggccgtgtactactgccagaacgactacacataccccttcaccttcggccagggcaccaagctggaaatcaaactcgagatccagaaccctgatcctgccgtgtaccagctgcgggatagcaagagcagcgacaagagcgtgtgtctgttcaccgacttcgacagccagaccaacgtgtcccagagcaaggactccgacgtgtacatcaccgataagtgcgtgctggacatgcggagcatggacttcaagagcaactccgccgtggcctggtccaacaagtccgatttcgcctgcgccaacgccttcaacaacagcattatccccgaggacacattcttcccaagccccgagagcagctgcggctttaccagcgagagctaccagcagggcgtgctgagcgccaccatcctgtacgagatcctgctgggcaaggccaccctgtacgccgtgctggtgtctgccctggtgctgatggctatggtcaagcggaaggacagccggggacgcgccaagagaagcggatctggcgtgaagcagaccctgaatttcgacctgctgaagctggctggcgacgtggaatccaacccaggccctactagtatggactggatttggcgcatccttttccttgtcggcgctgctaccggcgcgcattccgggccccagctccagctgcaagagtctggacctggcctggtcaagcctagcgagacactgagcctgacctgtaccgtgtccggcgatagcatcagcagcggcgattactactggggctggatcagacagcctcctggcaaaggactggaatggatcggccacatctactacagcggcgtgacctactacaaccccagcctgaagtccagagtgaccatcagcgtggacaccagccggaaccagttctccctgaagctgtctagcgtgacagccgccgataccgccgtgtactactgcaccagagaggacagcagcaactggcggagtagaggccagggaacactggtcacagttagctctggatccggcggaggcggaagtggaggcggaggatctggcggcggaggctctttcgaacaagttcagctggttcagagcggagccgaagtgaagaaacctggggcctctgtgaaggtgtcctgcaaggcttccggctataccttcaccagcttttggctgaactgggtccgacaggcccctggacaaggactggaatggatgggcaacatctaccccagcaccagctacaccgtgtacaaccagaaattcaaggaccgcgtgaccatgaccagggacaccagcacaagcacagtgtacatggaactgagcagcctgcggagcgaggataccgccgtgtattattgcgccagaacctggcggggcaacagcttcgattattggggccagggaaccaccgtgaccgtgtcatctacgcgtgaggacctgaagaacgtgttcccacctgaggtggccgtgttcgagcctagcgaggccgagatcagccacacccagaaagccaccctcgtgtgcctggctaccggcttctaccccgaccatgtggaactgtcttggtgggtcaacggcaaagaggtgcacagcggcgtgtgtaccgacccccagccactgaaagaacagcccgccctgaacgacagccggtactgcctgagcagcagactgagagtgtccgccaccttctggcagaacccccggaaccacttcagatgccaggtgcagttctacggcctgagcgagaacgacgagtggacccaggacagagccaagcccgtgacccagatcgtgtctgccgaagcctggggcagagccgattgcgacgtgaagctggtggaaaagagcttcgagacagacaccaacctgaacttccagaacctgagcgtgatcggcttcagaatcctgctgctgaaagtggccggctttaacctgctgatgaccctgcggctgtggtccagc

SEQ ID NO: 37525 - DNA, 2082 bp, synthetic construct
  source 1..2082: mol_type = other DNA
atggccttaccagtgaccgccttgctcctgccgctggccttgctgctccacgccgccaggccggacatcgtgatgacacagagccctgatagcctggccgtgtctctgggagagagagccaccatcaactgcaagagcagccagagcctgctgaacagcggcaaccagaagaactacctggcctggtatcagcagaagcccggccagcctcctaagctgctgatctactggggcagcaccagatccacaggcgtgcccgatagattttctggctctggcagcggcaccgacttcaccctgacaatttctagcctgcaagccgaggacgtggccgtgtactactgccagaacgactacacataccccttcaccttcggccagggcaccaagctggaaatcaaactcgaggacctgaagaacgtgttcccacctgaggtggccgtgttcgagcctagcgaggccgagatcagccacacccagaaagccaccctcgtgtgcctggctaccggcttctaccccgaccatgtggaactgtcttggtgggtcaacggcaaagaggtgcacagcggcgtgtgtaccgacccccagccactgaaagaacagcccgccctgaacgacagccggtactgcctgagcagcagactgagagtgtccgccaccttctggcagaacccccggaaccacttcagatgccaggtgcagttctacggcctgagcgagaacgacgagtggacccaggacagagccaagcccgtgacccagatcgtgtctgccgaagcctggggcagagccgattgcgacgtgaagctggtggaaaagagcttcgagacagacaccaacctgaacttccagaacctgagcgtgatcggcttcagaatcctgctgctgaaagtggccggctttaacctgctgatgaccctgcggctgtggtccagcagggccaagcgatctggatctggagcaacaaacttctcactactcaaacaagcaggtgacgtggaggagaatcccgggcctactagtatggactggatttggcgcatccttttccttgtcggcgctgctaccggcgcccattccgggcccatggaccccgacctggaaatcagagccgccttcctgcggcagagaaacacagccctgagaacagaggtggccgagctggaacaagaggtgcagcggctggaaaacgaggtgtcccagtacgagacaagatacggccctctcggaggcggaaaaggatccggcggcggaggatctggcggaggcggatctgggggcggaggctctttcgaacaagttcagctggttcagagcggagccgaagtgaagaaacctggggcctctgtgaaggtgtcctgcaaggcttccggctataccttcaccagcttttggctgaactgggtccgacaggcccctggacaaggactggaatggatgggcaacatctaccccagcaccagctacaccgtgtacaaccagaaattcaaggaccgcgtgaccatgaccagggacaccagcacaagcacagtgtacatggaactgagcagcctgcggagcgaggataccgccgtgtattattgcgccagaacctggcggggcaacagcttcgattattggggccagggaaccaccgtgaccgtgtcatctacgcgtatccagaaccctgatcctgccgtgtaccagctgcgggatagcaagagcagcgacaagagcgtgtgtctgttcaccgacttcgacagccagaccaacgtgtcccagagcaaggactccgacgtgtacatcaccgataagtgcgtgctggacatgcggagcatggacttcaagagcaactccgccgtggcctggtccaacaagtccgatttcgcctgcgccaacgccttcaacaacagcattatccccgaggacacattcttcccaagccccgagagcagctgcggctttaccagcgagagctaccagcagggcgtgctgagcgccaccatcctgtacgagatcctgctgggcaaggccaccctgtacgccgtgctggtgtctgccctggtgctgatggctatggtcaagcggaaggacagccgggga

SEQ ID NO: 37526 - DNA, 2094 bp, synthetic construct
  source 1..2094: mol_type = other DNA
atggccttaccagtgaccgccttgctcctgccgctggccttgctgctccacgccgccaggccggacatcgtgatgacacagagccctgatagcctggccgtgtctctgggagagagagccaccatcaactgcaagagcagccagagcctgctgaacagcggcaaccagaagaactacctggcctggtatcagcagaagcccggccagcctcctaagctgctgatctactggggcagcaccagatccacaggcgtgcccgatagattttctggctctggcagcggcaccgacttcaccctgacaatttctagcctgcaagccgaggacgtggccgtgtactactgccagaacgactacacataccccttcaccttcggccagggcaccaagctggaaatcaaactcgagatccagaaccctgatcctgccgtgtaccagctgcgggatagcaagagcagcgacaagagcgtgtgtctgttcaccgacttcgacagccagaccaacgtgtcccagagcaaggactccgacgtgtacatcaccgataagtgcgtgctggacatgcggagcatggacttcaagagcaactccgccgtggcctggtccaacaagtccgatttcgcctgcgccaacgccttcaacaacagcattatccccgaggacacattcttcccaagccccgagagcagctgcggctttaccagcgagagctaccagcagggcgtgctgagcgccaccatcctgtacgagatcctgctgggcaaggccaccctgtacgccgtgctggtgtctgccctggtgctgatggctatggtcaagcggaaggacagccggggacgcgccaagagaagcggatctggcgtgaagcagaccctgaatttcgacctgctgaagctggctggcgacgtggaatccaacccaggccctactagtatggactggatttggcgcatccttttccttgtcggcgctgctaccggcgcccattccgggcccatggaccccgacctggaaatcagagccgccttcctgcggcagagaaacacagccctgagaacagaggtggccgagctggaacaagaggtgcagcggctggaaaacgaggtgtcccagtacgagacaagatacggccctctcggaggcggaaaaggatccggcggcggaggatctggcggaggcggatctgggggcggaggctctttcgaacaagttcagctggttcagagcggagccgaagtgaagaaacctggggcctctgtgaaggtgtcctgcaaggcttccggctataccttcaccagcttttggctgaactgggtccgacaggcccctggacaaggactggaatggatgggcaacatctaccccagcaccagctacaccgtgtacaaccagaaattcaaggaccgcgtgaccatgaccagggacaccagcacaagcacagtgtacatggaactgagcagcctgcggagcgaggataccgccgtgtattattgcgccagaacctggcggggcaacagcttcgattattggggccagggaaccaccgtgaccgtgtcatctacgcgtgaggacctgaagaacgtgttcccacctgaggtggccgtgttcgagcctagcgaggccgagatcagccacacccagaaagccaccctcgtgtgcctggctaccggcttctaccccgaccatgtggaactgtcttggtgggtcaacggcaaagaggtgcacagcggcgtgtgtaccgacccccagccactgaaagaacagcccgccctgaacgacagccggtactgcctgagcagcagactgagagtgtccgccaccttctggcagaacccccggaaccacttcagatgccaggtgcagttctacggcctgagcgagaacgacgagtggacccaggacagagccaagcccgtgacccagatcgtgtctgccgaagcctggggcagagccgattgcgacgtgaagctggtggaaaagagcttcgagacagacaccaacctgaacttccagaacctgagcgtgatcggcttcagaatcctgctgctgaaagtggccggctttaacctgctgatgaccctgcggctgtggtccagc

SEQ ID NO: 37527 - DNA, 2013 bp, synthetic construct
  source 1..2013: mol_type = other DNA
atggccttaccagtgaccgccttgctcctgccgctggccttgctgctccacgccgccaggccggacatcgtgatgacacagagccctgatagcctggccgtgtctctgggagagagagccaccatcaactgcaagagcagccagagcctgctgaacagcggcaaccagaagaactacctggcctggtatcagcagaagcccggccagcctcctaagctgctgatctactggggcagcaccagatccacaggcgtgcccgatagattttctggctctggcagcggcaccgacttcaccctgacaatttctagcctgcaagccgaggacgtggccgtgtactactgccagaacgactacacataccccttcaccttcggccagggcaccaagctggaaatcaaactcgaggacctgaagaacgtgttcccacctgaggtggccgtgttcgagcctagcgaggccgagatcagccacacccagaaagccaccctcgtgtgcctggctaccggcttctaccccgaccatgtggaactgtcttggtgggtcaacggcaaagaggtgcacagcggcgtgtgtaccgacccccagccactgaaagaacagcccgccctgaacgacagccggtactgcctgagcagcagactgagagtgtccgccaccttctggcagaacccccggaaccacttcagatgccaggtgcagttctacggcctgagcgagaacgacgagtggacccaggacagagccaagcccgtgacccagatcgtgtctgccgaagcctggggcagagccgattgcgacgtgaagctggtggaaaagagcttcgagacagacaccaacctgaacttccagaacctgagcgtgatcggcttcagaatcctgctgctgaaagtggccggctttaacctgctgatgaccctgcggctgtggtccagcagggccaagcgatctggatctggagcaacaaacttctcactactcaaacaagcaggtgacgtggaggagaatcccgggcctactagtatggactggatttggcgcatccttttccttgtcggcgctgctaccggcgcccattccgggcccgaagttgctgccctcgagaaggaggtagcagctttggaaaaagaagtcgcagcccttgagaaagaagttgcggctctggagaagggatccggcggcggaggatctggcggaggcggatctgggggcggaggctctttcgaacaagttcagctggttcagagcggagccgaagtgaagaaacctggggcctctgtgaaggtgtcctgcaaggcttccggctataccttcaccagcttttggctgaactgggtccgacaggcccctggacaaggactggaatggatgggcaacatctaccccagcaccagctacaccgtgtacaaccagaaattcaaggaccgcgtgaccatgaccagggacaccagcacaagcacagtgtacatggaactgagcagcctgcggagcgaggataccgccgtgtattattgcgccagaacctggcggggcaacagcttcgattattggggccagggaaccaccgtgaccgtgtcatctacgcgtatccagaaccctgatcctgccgtgtaccagctgcgggatagcaagagcagcgacaagagcgtgtgtctgttcaccgacttcgacagccagaccaacgtgtcccagagcaaggactccgacgtgtacatcaccgataagtgcgtgctggacatgcggagcatggacttcaagagcaactccgccgtggcctggtccaacaagtccgatttcgcctgcgccaacgccttcaacaacagcattatccccgaggacacattcttcccaagccccgagagcagctgcggctttaccagcgagagctaccagcagggcgtgctgagcgccaccatcctgtacgagatcctgctgggcaaggccaccctgtacgccgtgctggtgtctgccctggtgctgatggctatggtcaagcggaaggacagccgggga

SEQ ID NO: 37528 - DNA, 2025 bp, synthetic construct
  source 1..2025: mol_type = other DNA
atggccttaccagtgaccgccttgctcctgccgctggccttgctgctccacgccgccaggccggacatcgtgatgacacagagccctgatagcctggccgtgtctctgggagagagagccaccatcaactgcaagagcagccagagcctgctgaacagcggcaaccagaagaactacctggcctggtatcagcagaagcccggccagcctcctaagctgctgatctactggggcagcaccagatccacaggcgtgcccgatagattttctggctctggcagcggcaccgacttcaccctgacaatttctagcctgcaagccgaggacgtggccgtgtactactgccagaacgactacacataccccttcaccttcggccagggcaccaagctggaaatcaaactcgagatccagaaccctgatcctgccgtgtaccagctgcgggatagcaagagcagcgacaagagcgtgtgtctgttcaccgacttcgacagccagaccaacgtgtcccagagcaaggactccgacgtgtacatcaccgataagtgcgtgctggacatgcggagcatggacttcaagagcaactccgccgtggcctggtccaacaagtccgatttcgcctgcgccaacgccttcaacaacagcattatccccgaggacacattcttcccaagccccgagagcagctgcggctttaccagcgagagctaccagcagggcgtgctgagcgccaccatcctgtacgagatcctgctgggcaaggccaccctgtacgccgtgctggtgtctgccctggtgctgatggctatggtcaagcggaaggacagccggggacgcgccaagagaagcggatctggcgtgaagcagaccctgaatttcgacctgctgaagctggctggcgacgtggaatccaacccaggccctactagtatggactggatttggcgcatccttttccttgtcggcgctgctaccggcgcccattccgggcccgaagttgctgccctcgagaaggaggtagcagctttggaaaaagaagtcgcagcccttgagaaagaagttgcggctctggagaagggatccggcggcggaggatctggcggaggcggatctgggggcggaggctctttcgaacaagttcagctggttcagagcggagccgaagtgaagaaacctggggcctctgtgaaggtgtcctgcaaggcttccggctataccttcaccagcttttggctgaactgggtccgacaggcccctggacaaggactggaatggatgggcaacatctaccccagcaccagctacaccgtgtacaaccagaaattcaaggaccgcgtgaccatgaccagggacaccagcacaagcacagtgtacatggaactgagcagcctgcggagcgaggataccgccgtgtattattgcgccagaacctggcggggcaacagcttcgattattggggccagggaaccaccgtgaccgtgtcatctacgcgtgaggacctgaagaacgtgttcccacctgaggtggccgtgttcgagcctagcgaggccgagatcagccacacccagaaagccaccctcgtgtgcctggctaccggcttctaccccgaccatgtggaactgtcttggtgggtcaacggcaaagaggtgcacagcggcgtgtgtaccgacccccagccactgaaagaacagcccgccctgaacgacagccggtactgcctgagcagcagactgagagtgtccgccaccttctggcagaacccccggaaccacttcagatgccaggtgcagttctacggcctgagcgagaacgacgagtggacccaggacagagccaagcccgtgacccagatcgtgtctgccgaagcctggggcagagccgattgcgacgtgaagctggtggaaaagagcttcgagacagacaccaacctgaacttccagaacctgagcgtgatcggcttcagaatcctgctgctgaaagtggccggctttaacctgctgatgaccctgcggctgtggtccagc

SEQ ID NO: 37529 - DNA, 2283 bp, synthetic construct
  source 1..2283: mol_type = other DNA
atggccttaccagtgaccgccttgctcctgccgctggccttgctgctccacgccgccaggccggacatcgtgatgacacagagccctgatagcctggccgtgtctctgggagagagagccaccatcaactgcaagagcagccagagcctgctgaacagcggcaaccagaagaactacctggcctggtatcagcagaagcccggccagcctcctaagctgctgatctactggggcagcaccagatccacaggcgtgcccgatagattttctggctctggcagcggcaccgacttcaccctgacaatttctagcctgcaagccgaggacgtggccgtgtactactgccagaacgactacacataccccttcaccttcggccagggcaccaagctggaaatcaaactcgaggacctgaagaacgtgttcccacctgaggtggccgtgttcgagcctagcgaggccgagatcagccacacccagaaagccaccctcgtgtgcctggctaccggcttctaccccgaccatgtggaactgtcttggtgggtcaacggcaaagaggtgcacagcggcgtgtgtaccgacccccagccactgaaagaacagcccgccctgaacgacagccggtactgcctgagcagcagactgagagtgtccgccaccttctggcagaacccccggaaccacttcagatgccaggtgcagttctacggcctgagcgagaacgacgagtggacccaggacagagccaagcccgtgacccagatcgtgtctgccgaagcctggggcagagccgattgcgacgtgaagctggtggaaaagagcttcgagacagacaccaacctgaacttccagaacctgagcgtgatcggcttcagaatcctgctgctgaaagtggccggctttaacctgctgatgaccctgcggctgtggtccagcagggccaagcgatctggatctggagcaacaaacttctcactactcaaacaagcaggtgacgtggaggagaatcccgggcctactagtatggactggatttggcgcatccttttccttgtcggcgctgctaccggcgcccattccgggccccaggttcagctgcaagagtctggcggaggacttgctcaagctggcggaagcctgagactgtcttgtgccgcctctggcagaaccttcagcatgggctggtttagacaggcccctggcaaagagagagagttcgtcgccgccatcacatacagcggcggcagcccttactacgcctcttctgtcagaggccggttcaccatcagccgggacaacgccaagaacaccgtgtacctccagatgaacagcctgaagccagaggacaccgccgtgtactactgtgccgccaatccaacctacggcagcgactggaatgccgagaattggggccagggcacccaagtgacagtgtctagtggatccggcggcggaggatctggcggaggcggatctgggggcggaggctctttcgaacaagttcagctggttcagagcggagccgaagtgaagaaacctggggcctctgtgaaggtgtcctgcaaggcttccggctataccttcaccagcttttggctgaactgggtccgacaggcccctggacaaggactggaatggatgggcaacatctaccccagcaccagctacaccgtgtacaaccagaaattcaaggaccgcgtgaccatgaccagggacaccagcacaagcacagtgtacatggaactgagcagcctgcggagcgaggataccgccgtgtattattgcgccagaacctggcggggcaacagcttcgattattggggccagggaaccaccgtgaccgtgtcatctacgcgtatccagaaccctgatcctgccgtgtaccagctgcgggatagcaagagcagcgacaagagcgtgtgtctgttcaccgacttcgacagccagaccaacgtgtcccagagcaaggactccgacgtgtacatcaccgataagtgcgtgctggacatgcggagcatggacttcaagagcaactccgccgtggcctggtccaacaagtccgatttcgcctgcgccaacgccttcaacaacagcattatccccgaggacacattcttcccaagccccgagagcagctgcggctttaccagcgagagctaccagcagggcgtgctgagcgccaccatcctgtacgagatcctgctgggcaaggccaccctgtacgccgtgctggtgtctgccctggtgctgatggctatggtcaagcggaaggacagccgggga

SEQ ID NO: 37530 - DNA, 2295 bp, synthetic construct
  source 1..2295: mol_type = other DNA
atggccttaccagtgaccgccttgctcctgccgctggccttgctgctccacgccgccaggccggacatcgtgatgacacagagccctgatagcctggccgtgtctctgggagagagagccaccatcaactgcaagagcagccagagcctgctgaacagcggcaaccagaagaactacctggcctggtatcagcagaagcccggccagcctcctaagctgctgatctactggggcagcaccagatccacaggcgtgcccgatagattttctggctctggcagcggcaccgacttcaccctgacaatttctagcctgcaagccgaggacgtggccgtgtactactgccagaacgactacacataccccttcaccttcggccagggcaccaagctggaaatcaaactcgagatccagaaccctgatcctgccgtgtaccagctgcgggatagcaagagcagcgacaagagcgtgtgtctgttcaccgacttcgacagccagaccaacgtgtcccagagcaaggactccgacgtgtacatcaccgataagtgcgtgctggacatgcggagcatggacttcaagagcaactccgccgtggcctggtccaacaagtccgatttcgcctgcgccaacgccttcaacaacagcattatccccgaggacacattcttcccaagccccgagagcagctgcggctttaccagcgagagctaccagcagggcgtgctgagcgccaccatcctgtacgagatcctgctgggcaaggccaccctgtacgccgtgctggtgtctgccctggtgctgatggctatggtcaagcggaaggacagccggggacgcgccaagagaagcggatctggcgtgaagcagaccctgaatttcgacctgctgaagctggctggcgacgtggaatccaacccaggccctactagtatggactggatttggcgcatccttttccttgtcggcgctgctaccggcgcccattccgggccccaggttcagctgcaagagtctggcggaggacttgctcaagctggcggaagcctgagactgtcttgtgccgcctctggcagaaccttcagcatgggctggtttagacaggcccctggcaaagagagagagttcgtcgccgccatcacatacagcggcggcagcccttactacgcctcttctgtcagaggccggttcaccatcagccgggacaacgccaagaacaccgtgtacctccagatgaacagcctgaagccagaggacaccgccgtgtactactgtgccgccaatccaacctacggcagcgactggaatgccgagaattggggccagggcacccaagtgacagtgtctagtggatccggcggcggaggatctggcggaggcggatctgggggcggaggctctttcgaacaagttcagctggttcagagcggagccgaagtgaagaaacctggggcctctgtgaaggtgtcctgcaaggcttccggctataccttcaccagcttttggctgaactgggtccgacaggcccctggacaaggactggaatggatgggcaacatctaccccagcaccagctacaccgtgtacaaccagaaattcaaggaccgcgtgaccatgaccagggacaccagcacaagcacagtgtacatggaactgagcagcctgcggagcgaggataccgccgtgtattattgcgccagaacctggcggggcaacagcttcgattattggggccagggaaccaccgtgaccgtgtcatctacgcgtgaggacctgaagaacgtgttcccacctgaggtggccgtgttcgagcctagcgaggccgagatcagccacacccagaaagccaccctcgtgtgcctggctaccggcttctaccccgaccatgtggaactgtcttggtgggtcaacggcaaagaggtgcacagcggcgtgtgtaccgacccccagccactgaaagaacagcccgccctgaacgacagccggtactgcctgagcagcagactgagagtgtccgccaccttctggcagaacccccggaaccacttcagatgccaggtgcagttctacggcctgagcgagaacgacgagtggacccaggacagagccaagcccgtgacccagatcgtgtctgccgaagcctggggcagagccgattgcgacgtgaagctggtggaaaagagcttcgagacagacaccaacctgaacttccagaacctgagcgtgatcggcttcagaatcctgctgctgaaagtggccggctttaacctgctgatgaccctgcggctgtggtccagc

SEQ ID NO: 37531 - DNA, 2301 bp, synthetic construct
  source 1..2301: mol_type = other DNA
atggccttaccagtgaccgccttgctcctgccgctggccttgctgctccacgccgccaggccggaagtgcaactggtggaatctggaggctctctggtgcagccagggggaagcctgagactgtcttgtgccgcttccggcttcaccttcgacgactacgccatgagctgggtgcgccaggtgccaggcaaaggcctggaatgggtgtccagcatcaactggagcggcacccacaccgattacgccgactccgtgaaaggcagattcacaatcagcagaaacaacgccaacaataccctgtacctgcagatgaactccctgaagtctgaggatacagcagtgtattattgcgccaagaactggcgggacgccggcaccacttggtttgagaaaagcggctctgccggacagggaacccaagtgacagtgtcctccggtaccggcggaggcggatctggcggcggaggtagcggtggcggaggatctgaattcgacatcgtgatgacacagagccctgatagcctggccgtgtctctgggagagagagccaccatcaactgcaagagcagccagagcctgctgaacagcggcaaccagaagaactacctggcctggtatcagcagaagcccggccagcctcctaagctgctgatctactggggcagcaccagatccacaggcgtgcccgatagattttctggctctggcagcggcaccgacttcaccctgacaatttctagcctgcaagccgaggacgtggccgtgtactactgccagaacgactacacataccccttcaccttcggccagggcaccaagctggaaatcaaactcgaggacctgaagaacgtgttcccacctgaggtggccgtgttcgagcctagcgaggccgagatcagccacacccagaaagccaccctcgtgtgcctggctaccggcttctaccccgaccatgtggaactgtcttggtgggtcaacggcaaagaggtgcacagcggcgtgtgtaccgacccccagccactgaaagaacagcccgccctgaacgacagccggtactgcctgagcagcagactgagagtgtccgccaccttctggcagaacccccggaaccacttcagatgccaggtgcagttctacggcctgagcgagaacgacgagtggacccaggacagagccaagcccgtgacccagatcgtgtctgccgaagcctggggcagagccgattgcgacgtgaagctggtggaaaagagcttcgagacagacaccaacctgaacttccagaacctgagcgtgatcggcttcagaatcctgctgctgaaagtggccggctttaacctgctgatgaccctgcggctgtggtccagcagggccaagcgatctggatctggagcaacaaacttctcactactcaaacaagcaggtgacgtggaggagaatcccgggcctactagtatggactggatttggcgcatccttttccttgtcggcgctgctaccggcgcgcattccttcgaacaagttcagctggttcagagcggagccgaagtgaagaaacctggggcctctgtgaaggtgtcctgcaaggcttccggctataccttcaccagcttttggctgaactgggtccgacaggcccctggacaaggactggaatggatgggcaacatctaccccagcaccagctacaccgtgtacaaccagaaattcaaggaccgcgtgaccatgaccagggacaccagcacaagcacagtgtacatggaactgagcagcctgcggagcgaggataccgccgtgtattattgcgccagaacctggcggggcaacagcttcgattattggggccagggaaccaccgtgaccgtgtcatctacgcgtatccagaaccctgatcctgccgtgtaccagctgcgggatagcaagagcagcgacaagagcgtgtgtctgttcaccgacttcgacagccagaccaacgtgtcccagagcaaggactccgacgtgtacatcaccgataagtgcgtgctggacatgcggagcatggacttcaagagcaactccgccgtggcctggtccaacaagtccgatttcgcctgcgccaacgccttcaacaacagcattatccccgaggacacattcttcccaagccccgagagcagctgcggctttaccagcgagagctaccagcagggcgtgctgagcgccaccatcctgtacgagatcctgctgggcaaggccaccctgtacgccgtgctggtgtctgccctggtgctgatggctatggtcaagcggaaggacagccgggga

SEQ ID NO: 37532 - DNA, 2313 bp, synthetic construct
  source 1..2313: mol_type = other DNA
atggccttaccagtgaccgccttgctcctgccgctggccttgctgctccacgccgccaggccggaagtgcaactggtggaatctggaggctctctggtgcagccagggggaagcctgagactgtcttgtgccgcttccggcttcaccttcgacgactacgccatgagctgggtgcgccaggtgccaggcaaaggcctggaatgggtgtccagcatcaactggagcggcacccacaccgattacgccgactccgtgaaaggcagattcacaatcagcagaaacaacgccaacaataccctgtacctgcagatgaactccctgaagtctgaggatacagcagtgtattattgcgccaagaactggcgggacgccggcaccacttggtttgagaaaagcggctctgccggacagggaacccaagtgacagtgtcctccggtaccggcggaggcggatctggcggcggaggtagcggtggcggaggatctgaattcgacatcgtgatgacacagagccctgatagcctggccgtgtctctgggagagagagccaccatcaactgcaagagcagccagagcctgctgaacagcggcaaccagaagaactacctggcctggtatcagcagaagcccggccagcctcctaagctgctgatctactggggcagcaccagatccacaggcgtgcccgatagattttctggctctggcagcggcaccgacttcaccctgacaatttctagcctgcaagccgaggacgtggccgtgtactactgccagaacgactacacataccccttcaccttcggccagggcaccaagctggaaatcaaactcgagatccagaaccctgatcctgccgtgtaccagctgcgggatagcaagagcagcgacaagagcgtgtgtctgttcaccgacttcgacagccagaccaacgtgtcccagagcaaggactccgacgtgtacatcaccgataagtgcgtgctggacatgcggagcatggacttcaagagcaactccgccgtggcctggtccaacaagtccgatttcgcctgcgccaacgccttcaacaacagcattatccccgaggacacattcttcccaagccccgagagcagctgcggctttaccagcgagagctaccagcagggcgtgctgagcgccaccatcctgtacgagatcctgctgggcaaggccaccctgtacgccgtgctggtgtctgccctggtgctgatggctatggtcaagcggaaggacagccggggacgcgccaagagaagcggatctggcgtgaagcagaccctgaatttcgacctgctgaagctggctggcgacgtggaatccaacccaggccctactagtatggactggatttggcgcatccttttccttgtcggcgctgctaccggcgcgcattccttcgaacaagttcagctggttcagagcggagccgaagtgaagaaacctggggcctctgtgaaggtgtcctgcaaggcttccggctataccttcaccagcttttggctgaactgggtccgacaggcccctggacaaggactggaatggatgggcaacatctaccccagcaccagctacaccgtgtacaaccagaaattcaaggaccgcgtgaccatgaccagggacaccagcacaagcacagtgtacatggaactgagcagcctgcggagcgaggataccgccgtgtattattgcgccagaacctggcggggcaacagcttcgattattggggccagggaaccaccgtgaccgtgtcatctacgcgtgaggacctgaagaacgtgttcccacctgaggtggccgtgttcgagcctagcgaggccgagatcagccacacccagaaagccaccctcgtgtgcctggctaccggcttctaccccgaccatgtggaactgtcttggtgggtcaacggcaaagaggtgcacagcggcgtgtgtaccgacccccagccactgaaagaacagcccgccctgaacgacagccggtactgcctgagcagcagactgagagtgtccgccaccttctggcagaacccccggaaccacttcagatgccaggtgcagttctacggcctgagcgagaacgacgagtggacccaggacagagccaagcccgtgacccagatcgtgtctgccgaagcctggggcagagccgattgcgacgtgaagctggtggaaaagagcttcgagacagacaccaacctgaacttccagaacctgagcgtgatcggcttcagaatcctgctgctgaaagtggccggctttaacctgctgatgaccctgcggctgtggtccagc

SEQ ID NO: 37533 - DNA, 2295 bp, synthetic construct
  source 1..2295: mol_type = other DNA
atggccttaccagtgaccgccttgctcctgccgctggccttgctgctccacgccgccaggccggaagttcagctgcttgagtctggcggaggactggttcaacctggcggaagcctgagactgtcttgtgccgccagcggcttcatcttcagcagctacgccatgagctgggtccgacaggctcctggaaagggccaagaatgggtttccggcgttagcggcacaggcgtgaacacctactacgccgatagcgtgaagggcagattcaccatcagccgggacaacagcaagaacaccctgtacctccagatgaacagcctgagagccgaggacaccgccgtgtactattgtgcctctggcaaaggctgggacagcggctcttggtacgaggactatagaggccagggcaccctggtcacagtttcttcaggtaccggcggaggcggatctggcggcggaggtagcggtggcggaggatctgaattcgacatcgtgatgacacagagccctgatagcctggccgtgtctctgggagagagagccaccatcaactgcaagagcagccagagcctgctgaacagcggcaaccagaagaactacctggcctggtatcagcagaagcccggccagcctcctaagctgctgatctactggggcagcaccagatccacaggcgtgcccgatagattttctggctctggcagcggcaccgacttcaccctgacaatttctagcctgcaagccgaggacgtggccgtgtactactgccagaacgactacacataccccttcaccttcggccagggcaccaagctggaaatcaaactcgaggacctgaagaacgtgttcccacctgaggtggccgtgttcgagcctagcgaggccgagatcagccacacccagaaagccaccctcgtgtgcctggctaccggcttctaccccgaccatgtggaactgtcttggtgggtcaacggcaaagaggtgcacagcggcgtgtgtaccgacccccagccactgaaagaacagcccgccctgaacgacagccggtactgcctgagcagcagactgagagtgtccgccaccttctggcagaacccccggaaccacttcagatgccaggtgcagttctacggcctgagcgagaacgacgagtggacccaggacagagccaagcccgtgacccagatcgtgtctgccgaagcctggggcagagccgattgcgacgtgaagctggtggaaaagagcttcgagacagacaccaacctgaacttccagaacctgagcgtgatcggcttcagaatcctgctgctgaaagtggccggctttaacctgctgatgaccctgcggctgtggtccagcagggccaagcgatctggatctggagcaacaaacttctcactactcaaacaagcaggtgacgtggaggagaatcccgggcctactagtatggactggatttggcgcatccttttccttgtcggcgctgctaccggcgcgcattccttcgaacaagttcagctggttcagagcggagccgaagtgaagaaacctggggcctctgtgaaggtgtcctgcaaggcttccggctataccttcaccagcttttggctgaactgggtccgacaggcccctggacaaggactggaatggatgggcaacatctaccccagcaccagctacaccgtgtacaaccagaaattcaaggaccgcgtgaccatgaccagggacaccagcacaagcacagtgtacatggaactgagcagcctgcggagcgaggataccgccgtgtattattgcgccagaacctggcggggcaacagcttcgattattggggccagggaaccaccgtgaccgtgtcatctacgcgtatccagaaccctgatcctgccgtgtaccagctgcgggatagcaagagcagcgacaagagcgtgtgtctgttcaccgacttcgacagccagaccaacgtgtcccagagcaaggactccgacgtgtacatcaccgataagtgcgtgctggacatgcggagcatggacttcaagagcaactccgccgtggcctggtccaacaagtccgatttcgcctgcgccaacgccttcaacaacagcattatccccgaggacacattcttcccaagccccgagagcagctgcggctttaccagcgagagctaccagcagggcgtgctgagcgccaccatcctgtacgagatcctgctgggcaaggccaccctgtacgccgtgctggtgtctgccctggtgctgatggctatggtcaagcggaaggacagccgggga

SEQ ID NO: 37534 - DNA, 2307 bp, synthetic construct
  source 1..2307: mol_type = other DNA
atggccttaccagtgaccgccttgctcctgccgctggccttgctgctccacgccgccaggccggaagttcagctgcttgagtctggcggaggactggttcaacctggcggaagcctgagactgtcttgtgccgccagcggcttcatcttcagcagctacgccatgagctgggtccgacaggctcctggaaagggccaagaatgggtttccggcgttagcggcacaggcgtgaacacctactacgccgatagcgtgaagggcagattcaccatcagccgggacaacagcaagaacaccctgtacctccagatgaacagcctgagagccgaggacaccgccgtgtactattgtgcctctggcaaaggctgggacagcggctcttggtacgaggactatagaggccagggcaccctggtcacagtttcttcaggtaccggcggaggcggatctggcggcggaggtagcggtggcggaggatctgaattcgacatcgtgatgacacagagccctgatagcctggccgtgtctctgggagagagagccaccatcaactgcaagagcagccagagcctgctgaacagcggcaaccagaagaactacctggcctggtatcagcagaagcccggccagcctcctaagctgctgatctactggggcagcaccagatccacaggcgtgcccgatagattttctggctctggcagcggcaccgacttcaccctgacaatttctagcctgcaagccgaggacgtggccgtgtactactgccagaacgactacacataccccttcaccttcggccagggcaccaagctggaaatcaaactcgagatccagaaccctgatcctgccgtgtaccagctgcgggatagcaagagcagcgacaagagcgtgtgtctgttcaccgacttcgacagccagaccaacgtgtcccagagcaaggactccgacgtgtacatcaccgataagtgcgtgctggacatgcggagcatggacttcaagagcaactccgccgtggcctggtccaacaagtccgatttcgcctgcgccaacgccttcaacaacagcattatccccgaggacacattcttcccaagccccgagagcagctgcggctttaccagcgagagctaccagcagggcgtgctgagcgccaccatcctgtacgagatcctgctgggcaaggccaccctgtacgccgtgctggtgtctgccctggtgctgatggctatggtcaagcggaaggacagccggggacgcgccaagagaagcggatctggcgtgaagcagaccctgaatttcgacctgctgaagctggctggcgacgtggaatccaacccaggccctactagtatggactggatttggcgcatccttttccttgtcggcgctgctaccggcgcgcattccttcgaacaagttcagctggttcagagcggagccgaagtgaagaaacctggggcctctgtgaaggtgtcctgcaaggcttccggctataccttcaccagcttttggctgaactgggtccgacaggcccctggacaaggactggaatggatgggcaacatctaccccagcaccagctacaccgtgtacaaccagaaattcaaggaccgcgtgaccatgaccagggacaccagcacaagcacagtgtacatggaactgagcagcctgcggagcgaggataccgccgtgtattattgcgccagaacctggcggggcaacagcttcgattattggggccagggaaccaccgtgaccgtgtcatctacgcgtgaggacctgaagaacgtgttcccacctgaggtggccgtgttcgagcctagcgaggccgagatcagccacacccagaaagccaccctcgtgtgcctggctaccggcttctaccccgaccatgtggaactgtcttggtgggtcaacggcaaagaggtgcacagcggcgtgtgtaccgacccccagccactgaaagaacagcccgccctgaacgacagccggtactgcctgagcagcagactgagagtgtccgccaccttctggcagaacccccggaaccacttcagatgccaggtgcagttctacggcctgagcgagaacgacgagtggacccaggacagagccaagcccgtgacccagatcgtgtctgccgaagcctggggcagagccgattgcgacgtgaagctggtggaaaagagcttcgagacagacaccaacctgaacttccagaacctgagcgtgatcggcttcagaatcctgctgctgaaagtggccggctttaacctgctgatgaccctgcggctgtggtccagc

SEQ ID NO: 37535 - DNA, 2199 bp, synthetic construct
  source 1..2199: mol_type = other DNA
atggccttaccagtgaccgccttgctcctgccgctggccttgctgctccacgccgccaggccgatgctgcccgctcctaagaatctggtggtgtccagaatcaccgaggacagcgccagactgtcttggacagctcctgatgccgccttcgacagcttccccatccggtacatcgagacactgatctggggcgaagccatctggctggatgtgcctggaagcgagagaagctacgacctgaccggactgaagcctggcacagagtatgccgtggtcatcaccggcgtgaaaggcggcagattctctagccctctggtggcctctttcaccaccggtaccggcggaggcggatctggcggcggaggtagcggtggcggaggatctgaattcgacatcgtgatgacacagagccctgatagcctggccgtgtctctgggagagagagccaccatcaactgcaagagcagccagagcctgctgaacagcggcaaccagaagaactacctggcctggtatcagcagaagcccggccagcctcctaagctgctgatctactggggcagcaccagatccacaggcgtgcccgatagattttctggctctggcagcggcaccgacttcaccctgacaatttctagcctgcaagccgaggacgtggccgtgtactactgccagaacgactacacataccccttcaccttcggccagggcaccaagctggaaatcaaactcgaggacctgaagaacgtgttcccacctgaggtggccgtgttcgagcctagcgaggccgagatcagccacacccagaaagccaccctcgtgtgcctggctaccggcttctaccccgaccatgtggaactgtcttggtgggtcaacggcaaagaggtgcacagcggcgtgtgtaccgacccccagccactgaaagaacagcccgccctgaacgacagccggtactgcctgagcagcagactgagagtgtccgccaccttctggcagaacccccggaaccacttcagatgccaggtgcagttctacggcctgagcgagaacgacgagtggacccaggacagagccaagcccgtgacccagatcgtgtctgccgaagcctggggcagagccgattgcgacgtgaagctggtggaaaagagcttcgagacagacaccaacctgaacttccagaacctgagcgtgatcggcttcagaatcctgctgctgaaagtggccggctttaacctgctgatgaccctgcggctgtggtccagcagggccaagcgatctggatctggagcaacaaacttctcactactcaaacaagcaggtgacgtggaggagaatcccgggcctactagtatggactggatttggcgcatccttttccttgtcggcgctgctaccggcgcgcattccttcgaacaagttcagctggttcagagcggagccgaagtgaagaaacctggggcctctgtgaaggtgtcctgcaaggcttccggctataccttcaccagcttttggctgaactgggtccgacaggcccctggacaaggactggaatggatgggcaacatctaccccagcaccagctacaccgtgtacaaccagaaattcaaggaccgcgtgaccatgaccagggacaccagcacaagcacagtgtacatggaactgagcagcctgcggagcgaggataccgccgtgtattattgcgccagaacctggcggggcaacagcttcgattattggggccagggaaccaccgtgaccgtgtcatctacgcgtatccagaaccctgatcctgccgtgtaccagctgcgggatagcaagagcagcgacaagagcgtgtgtctgttcaccgacttcgacagccagaccaacgtgtcccagagcaaggactccgacgtgtacatcaccgataagtgcgtgctggacatgcggagcatggacttcaagagcaactccgccgtggcctggtccaacaagtccgatttcgcctgcgccaacgccttcaacaacagcattatccccgaggacacattcttcccaagccccgagagcagctgcggctttaccagcgagagctaccagcagggcgtgctgagcgccaccatcctgtacgagatcctgctgggcaaggccaccctgtacgccgtgctggtgtctgccctggtgctgatggctatggtcaagcggaaggacagccgggga

SEQ ID NO: 37536 - DNA, 2211 bp, synthetic construct
  source 1..2211: mol_type = other DNA
atggccttaccagtgaccgccttgctcctgccgctggccttgctgctccacgccgccaggccgatgctgcccgctcctaagaatctggtggtgtccagaatcaccgaggacagcgccagactgtcttggacagctcctgatgccgccttcgacagcttccccatccggtacatcgagacactgatctggggcgaagccatctggctggatgtgcctggaagcgagagaagctacgacctgaccggactgaagcctggcacagagtatgccgtggtcatcaccggcgtgaaaggcggcagattctctagccctctggtggcctctttcaccaccggtaccggcggaggcggatctggcggcggaggtagcggtggcggaggatctgaattcgacatcgtgatgacacagagccctgatagcctggccgtgtctctgggagagagagccaccatcaactgcaagagcagccagagcctgctgaacagcggcaaccagaagaactacctggcctggtatcagcagaagcccggccagcctcctaagctgctgatctactggggcagcaccagatccacaggcgtgcccgatagattttctggctctggcagcggcaccgacttcaccctgacaatttctagcctgcaagccgaggacgtggccgtgtactactgccagaacgactacacataccccttcaccttcggccagggcaccaagctggaaatcaaactcgagatccagaaccctgatcctgccgtgtaccagctgcgggatagcaagagcagcgacaagagcgtgtgtctgttcaccgacttcgacagccagaccaacgtgtcccagagcaaggactccgacgtgtacatcaccgataagtgcgtgctggacatgcggagcatggacttcaagagcaactccgccgtggcctggtccaacaagtccgatttcgcctgcgccaacgccttcaacaacagcattatccccgaggacacattcttcccaagccccgagagcagctgcggctttaccagcgagagctaccagcagggcgtgctgagcgccaccatcctgtacgagatcctgctgggcaaggccaccctgtacgccgtgctggtgtctgccctggtgctgatggctatggtcaagcggaaggacagccggggacgcgccaagagaagcggatctggcgtgaagcagaccctgaatttcgacctgctgaagctggctggcgacgtggaatccaacccaggccctactagtatggactggatttggcgcatccttttccttgtcggcgctgctaccggcgcgcattccttcgaacaagttcagctggttcagagcggagccgaagtgaagaaacctggggcctctgtgaaggtgtcctgcaaggcttccggctataccttcaccagcttttggctgaactgggtccgacaggcccctggacaaggactggaatggatgggcaacatctaccccagcaccagctacaccgtgtacaaccagaaattcaaggaccgcgtgaccatgaccagggacaccagcacaagcacagtgtacatggaactgagcagcctgcggagcgaggataccgccgtgtattattgcgccagaacctggcggggcaacagcttcgattattggggccagggaaccaccgtgaccgtgtcatctacgcgtgaggacctgaagaacgtgttcccacctgaggtggccgtgttcgagcctagcgaggccgagatcagccacacccagaaagccaccctcgtgtgcctggctaccggcttctaccccgaccatgtggaactgtcttggtgggtcaacggcaaagaggtgcacagcggcgtgtgtaccgacccccagccactgaaagaacagcccgccctgaacgacagccggtactgcctgagcagcagactgagagtgtccgccaccttctggcagaacccccggaaccacttcagatgccaggtgcagttctacggcctgagcgagaacgacgagtggacccaggacagagccaagcccgtgacccagatcgtgtctgccgaagcctggggcagagccgattgcgacgtgaagctggtggaaaagagcttcgagacagacaccaacctgaacttccagaacctgagcgtgatcggcttcagaatcctgctgctgaaagtggccggctttaacctgctgatgaccctgcggctgtggtccagc

SEQ ID NO: 37537 - DNA, 2286 bp, synthetic construct
  source 1..2286: mol_type = other DNA
atggccttaccagtgaccgccttgctcctgccgctggccttgctgctccacgccgccaggccggaggtgcagctggttgaatctggcggaggactggttcagcctggcggatctctgagactgtcttgtgccgccagcggcttcaacatcaaggatacctgtatcggctgggttcgcagagcccctggcaaagaggaagaactggtcgccaaaatctgcaagtacagcggccacaccagatacgccgacagcgtgaagggcagattcaccatcagcgccgacaccagcaagaacaccgcctacctccagatgaacagcctgagagccgaggacaccgccgtgtactattgtgccgctgtgtccgtcagagatgggcactacaattactggggccagggcaccaccgtgaccgtttcttcaggtaccggcggaggcggatctggcggcggaggtagcggtggcggaggatctgaattcgacatcgtgatgacacagagccctgatagcctggccgtgtctctgggagagagagccaccatcaactgcaagagcagccagagcctgctgaacagcggcaaccagaagaactacctggcctggtatcagcagaagcccggccagcctcctaagctgctgatctactggggcagcaccagatccacaggcgtgcccgatagattttctggctctggcagcggcaccgacttcaccctgacaatttctagcctgcaagccgaggacgtggccgtgtactactgccagaacgactacacataccccttcaccttcggccagggcaccaagctggaaatcaaactcgaggacctgaagaacgtgttcccacctgaggtggccgtgttcgagcctagcgaggccgagatcagccacacccagaaagccaccctcgtgtgcctggctaccggcttctaccccgaccatgtggaactgtcttggtgggtcaacggcaaagaggtgcacagcggcgtgtgtaccgacccccagccactgaaagaacagcccgccctgaacgacagccggtactgcctgagcagcagactgagagtgtccgccaccttctggcagaacccccggaaccacttcagatgccaggtgcagttctacggcctgagcgagaacgacgagtggacccaggacagagccaagcccgtgacccagatcgtgtctgccgaagcctggggcagagccgattgcgacgtgaagctggtggaaaagagcttcgagacagacaccaacctgaacttccagaacctgagcgtgatcggcttcagaatcctgctgctgaaagtggccggctttaacctgctgatgaccctgcggctgtggtccagcagggccaagcgatctggatctggagcaacaaacttctcactactcaaacaagcaggtgacgtggaggagaatcccgggcctactagtatggactggatttggcgcatccttttccttgtcggcgctgctaccggcgcgcattccttcgaacaagttcagctggttcagagcggagccgaagtgaagaaacctggggcctctgtgaaggtgtcctgcaaggcttccggctataccttcaccagcttttggctgaactgggtccgacaggcccctggacaaggactggaatggatgggcaacatctaccccagcaccagctacaccgtgtacaaccagaaattcaaggaccgcgtgaccatgaccagggacaccagcacaagcacagtgtacatggaactgagcagcctgcggagcgaggataccgccgtgtattattgcgccagaacctggcggggcaacagcttcgattattggggccagggaaccaccgtgaccgtgtcatctacgcgtatccagaaccctgatcctgccgtgtaccagctgcgggatagcaagagcagcgacaagagcgtgtgtctgttcaccgacttcgacagccagaccaacgtgtcccagagcaaggactccgacgtgtacatcaccgataagtgcgtgctggacatgcggagcatggacttcaagagcaactccgccgtggcctggtccaacaagtccgatttcgcctgcgccaacgccttcaacaacagcattatccccgaggacacattcttcccaagccccgagagcagctgcggctttaccagcgagagctaccagcagggcgtgctgagcgccaccatcctgtacgagatcctgctgggcaaggccaccctgtacgccgtgctggtgtctgccctggtgctgatggctatggtcaagcggaaggacagccgggga

SEQ ID NO: 37538 - DNA, 2298 bp, synthetic construct
  source 1..2298: mol_type = other DNA
atggccttaccagtgaccgccttgctcctgccgctggccttgctgctccacgccgccaggccggaggtgcagctggttgaatctggcggaggactggttcagcctggcggatctctgagactgtcttgtgccgccagcggcttcaacatcaaggatacctgtatcggctgggttcgcagagcccctggcaaagaggaagaactggtcgccaaaatctgcaagtacagcggccacaccagatacgccgacagcgtgaagggcagattcaccatcagcgccgacaccagcaagaacaccgcctacctccagatgaacagcctgagagccgaggacaccgccgtgtactattgtgccgctgtgtccgtcagagatgggcactacaattactggggccagggcaccaccgtgaccgtttcttcaggtaccggcggaggcggatctggcggcggaggtagcggtggcggaggatctgaattcgacatcgtgatgacacagagccctgatagcctggccgtgtctctgggagagagagccaccatcaactgcaagagcagccagagcctgctgaacagcggcaaccagaagaactacctggcctggtatcagcagaagcccggccagcctcctaagctgctgatctactggggcagcaccagatccacaggcgtgcccgatagattttctggctctggcagcggcaccgacttcaccctgacaatttctagcctgcaagccgaggacgtggccgtgtactactgccagaacgactacacataccccttcaccttcggccagggcaccaagctggaaatcaaactcgagatccagaaccctgatcctgccgtgtaccagctgcgggatagcaagagcagcgacaagagcgtgtgtctgttcaccgacttcgacagccagaccaacgtgtcccagagcaaggactccgacgtgtacatcaccgataagtgcgtgctggacatgcggagcatggacttcaagagcaactccgccgtggcctggtccaacaagtccgatttcgcctgcgccaacgccttcaacaacagcattatccccgaggacacattcttcccaagccccgagagcagctgcggctttaccagcgagagctaccagcagggcgtgctgagcgccaccatcctgtacgagatcctgctgggcaaggccaccctgtacgccgtgctggtgtctgccctggtgctgatggctatggtcaagcggaaggacagccggggacgcgccaagagaagcggatctggcgtgaagcagaccctgaatttcgacctgctgaagctggctggcgacgtggaatccaacccaggccctactagtatggactggatttggcgcatccttttccttgtcggcgctgctaccggcgcgcattccttcgaacaagttcagctggttcagagcggagccgaagtgaagaaacctggggcctctgtgaaggtgtcctgcaaggcttccggctataccttcaccagcttttggctgaactgggtccgacaggcccctggacaaggactggaatggatgggcaacatctaccccagcaccagctacaccgtgtacaaccagaaattcaaggaccgcgtgaccatgaccagggacaccagcacaagcacagtgtacatggaactgagcagcctgcggagcgaggataccgccgtgtattattgcgccagaacctggcggggcaacagcttcgattattggggccagggaaccaccgtgaccgtgtcatctacgcgtgaggacctgaagaacgtgttcccacctgaggtggccgtgttcgagcctagcgaggccgagatcagccacacccagaaagccaccctcgtgtgcctggctaccggcttctaccccgaccatgtggaactgtcttggtgggtcaacggcaaagaggtgcacagcggcgtgtgtaccgacccccagccactgaaagaacagcccgccctgaacgacagccggtactgcctgagcagcagactgagagtgtccgccaccttctggcagaacccccggaaccacttcagatgccaggtgcagttctacggcctgagcgagaacgacgagtggacccaggacagagccaagcccgtgacccagatcgtgtctgccgaagcctggggcagagccgattgcgacgtgaagctggtggaaaagagcttcgagacagacaccaacctgaacttccagaacctgagcgtgatcggcttcagaatcctgctgctgaaagtggccggctttaacctgctgatgaccctgcggctgtggtccagc

SEQ ID NO: 37539 - DNA, 3402 bp, synthetic construct
  source 1..3402: mol_type = other DNA
atggccttaccagtgaccgccttgctcctgccgctggccttgctgctccacgccgccaggccggaagtgcagctggttgaatctggcggaggactggttcaggctggcggatctctgagactgtcttgtgccgccagcggcagaacctttagcatgggctggtttagacaggcccctggcaaagagagagagttcgtcgccgccatcacatactctggcggcagcccttactacgccgactctgtgaagggcagattcaccatcagccgggacaacgccaagaacaccgtgtacctccagatgaacagcctgaagcctgaggacaccgccgtgtactactgcgccgccaatccaacatacggcagcgactggaacgccgagaattggggccagggaacccaagtgacagtgtctagcggtaccggcggaggcggatctggcggcggaggtagcggtggcggaggatctgaattcgacatcgtgatgacacagagccctgatagcctggccgtgtctctgggagagagagccaccatcaactgcaagagcagccagagcctgctgaacagcggcaaccagaagaactacctggcctggtatcagcagaagcccggccagcctcctaagctgctgatctactggggcagcaccagatccacaggcgtgcccgatagattttctggctctggcagcggcaccgacttcaccctgacaatttctagcctgcaagccgaggacgtggccgtgtactactgccagaacgactacacataccccttcaccttcggccagggcaccaagctggaaatcaaactcgaggacctgaagaacgtgttcccacctgaggtggccgtgttcgagcctagcgaggccgagatcagccacacccagaaagccaccctcgtgtgcctggctaccggcttctaccccgaccatgtggaactgtcttggtgggtcaacggcaaagaggtgcacagcggcgtgtgtaccgacccccagccactgaaagaacagcccgccctgaacgacagccggtactgcctgagcagcagactgagagtgtccgccaccttctggcagaacccccggaaccacttcagatgccaggtgcagttctacggcctgagcgagaacgacgagtggacccaggacagagccaagcccgtgacccagatcgtgtctgccgaagcctggggcagagccgattgcgacgtgaagctggtggaaaagagcttcgagacagacaccaacctgaacttccagaacctgagcgtgatcggcttcagaatcctgctgctgaaagtggccggctttaacctgctgatgaccctgcggctgtggtccagcagggccaagcgatctggatctggagcaacaaacttctcactactcaaacaagcaggtgacgtggaggagaatcccgggcctactagtgccaccatggactggatttggcgcatccttttccttgtcggcgctgctaccggcgcccattccgggcccgaagtgcaactggttgaatccggtggcggcctggtgcaagcaggcggatctctcagacttagctgtgccgcctccggcagaaccttcacaatgggatggtttaggcaggctccagggaaagagagagagttcgtcgccgccatctctctgtctcccacactggcctactacgccgactctgtgaaaggccggttcaccatctccagagataatgccaagaacaccgtggtgctgcaaatgaactctctgaaacccgaggatacagccctgtactattgtgccgctgaccggaagtccgtgatgagcatcagacccgattactggggacagggcacacaagtcacagtgtcctctggatccggcggcggaggatctggcggaggcggatctgggggcggaggctctttcgaacaagttcagctggttcagagcggagccgaagtgaagaaacctggggcctctgtgaaggtgtcctgcaaggcttccggctataccttcaccagcttttggctgaactgggtccgacaggcccctggacaaggactggaatggatgggcaacatctaccccagcaccagctacaccgtgtacaaccagaaattcaaggaccgcgtgaccatgaccagggacaccagcacaagcacagtgtacatggaactgagcagcctgcggagcgaggataccgccgtgtattattgcgccagaacctggcggggcaacagcttcgattattggggccagggaaccaccgtgaccgtgtcatctacgcgtatccagaaccctgatcctgccgtgtaccagctgcgggatagcaagagcagcgacaagagcgtgtgtctgttcaccgacttcgacagccagaccaacgtgtcccagagcaaggactccgacgtgtacatcaccgataagtgcgtgctggacatgcggagcatggacttcaagagcaactccgccgtggcctggtccaacaagtccgatttcgcctgcgccaacgccttcaacaacagcattatccccgaggacacattcttcccaagccccgagagcagctgcggctttaccagcgagagctaccagcagggcgtgctgagcgccaccatcctgtacgagatcctgctgggcaaggccaccctgtacgccgtgctggtgtctgccctggtgctgatggctatggtcaagcggaaggacagccggggacgcgccaagagaagcggatctggcgtgaagcagaccctgaatttcgacctgctgaagctggctggcgacgtggaatccaacccaggcccttctagaggccatatgaccgagtacaagcccacggtgcgcctcgccacccgcgacgacgtccccagggccgtacgcaccctcgccgccgcgttcgccgactaccccgccacgcgccacaccgtcgatccggaccgccacatcgagcgggtcaccgagctgcaagaactcttcctcacgcgcgtcgggctcgacatcggcaaggtgtgggtcgcggacgacggcgccgcggtggcggtctggaccacgccggagagcgtcgaagcgggggcggtgttcgccgagatcggcccgcgcatggccgagttgagcggttcccggctggccgcgcagcaacagatggaaggcctcctggcgccgcaccggcccaaggagcccgcgtggttcctggccaccgtcggcgtctcgcccgaccaccagggcaagggtctgggcagcgccgtcgtgctccccggagtggaggcggccgagcgcgccggggtgcccgccttcctggagacctccgcgccccgcaacctccccttctacgagcggctcggcttcaccgtcaccgccgacgtcgaggtgcccgaaggaccgcgcacctggtgcatgacccgcaagcccggtgcctga

SEQ ID NO: 37540 - DNA, 2316 bp, synthetic construct
  source 1..2316: mol_type = other DNA
atggccttaccagtgaccgccttgctcctgccgctggccttgctgctccacgccgccaggccggaagtgcagctggttgaatctggcggaggactggttcagcctggcggatctctgagactgtcttgtgccgcctctggcttcgccagcgactactatatcatcggctggttcagacaggcccctggcaaagagagagagggcgtcagctgtatcagcagcagatacgccaacaccaactacgccgacagcgtgaagggcagattcaccatcagccgggacaacgccaagaacaccgtgtacctccagatgaacagcctgaagcctgaggacaccgccgtgtactactgtgccgccgacaccagaagatacacctgtcctgacattgccaccatgcaccggaacttcgattcttggggccagggcacactggtcaccgtttcttctggtaccggcggaggcggatctggcggcggaggtagcggtggcggaggatctgaattcgacatcgtgatgacacagagccctgatagcctggccgtgtctctgggagagagagccaccatcaactgcaagagcagccagagcctgctgaacagcggcaaccagaagaactacctggcctggtatcagcagaagcccggccagcctcctaagctgctgatctactggggcagcaccagatccacaggcgtgcccgatagattttctggctctggcagcggcaccgacttcaccctgacaatttctagcctgcaagccgaggacgtggccgtgtactactgccagaacgactacacataccccttcaccttcggccagggcaccaagctggaaatcaaactcgaggacctgaagaacgtgttcccacctgaggtggccgtgttcgagcctagcgaggccgagatcagccacacccagaaagccaccctcgtgtgcctggctaccggcttctaccccgaccatgtggaactgtcttggtgggtcaacggcaaagaggtgcacagcggcgtgtgtaccgacccccagccactgaaagaacagcccgccctgaacgacagccggtactgcctgagcagcagactgagagtgtccgccaccttctggcagaacccccggaaccacttcagatgccaggtgcagttctacggcctgagcgagaacgacgagtggacccaggacagagccaagcccgtgacccagatcgtgtctgccgaagcctggggcagagccgattgcgacgtgaagctggtggaaaagagcttcgagacagacaccaacctgaacttccagaacctgagcgtgatcggcttcagaatcctgctgctgaaagtggccggctttaacctgctgatgaccctgcggctgtggtccagcagggccaagcgatctggatctggagcaacaaacttctcactactcaaacaagcaggtgacgtggaggagaatcccgggcctactagtatggactggatttggcgcatccttttccttgtcggcgctgctaccggcgcgcattccttcgaacaagttcagctggttcagagcggagccgaagtgaagaaacctggggcctctgtgaaggtgtcctgcaaggcttccggctataccttcaccagcttttggctgaactgggtccgacaggcccctggacaaggactggaatggatgggcaacatctaccccagcaccagctacaccgtgtacaaccagaaattcaaggaccgcgtgaccatgaccagggacaccagcacaagcacagtgtacatggaactgagcagcctgcggagcgaggataccgccgtgtattattgcgccagaacctggcggggcaacagcttcgattattggggccagggaaccaccgtgaccgtgtcatctacgcgtatccagaaccctgatcctgccgtgtaccagctgcgggatagcaagagcagcgacaagagcgtgtgtctgttcaccgacttcgacagccagaccaacgtgtcccagagcaaggactccgacgtgtacatcaccgataagtgcgtgctggacatgcggagcatggacttcaagagcaactccgccgtggcctggtccaacaagtccgatttcgcctgcgccaacgccttcaacaacagcattatccccgaggacacattcttcccaagccccgagagcagctgcggctttaccagcgagagctaccagcagggcgtgctgagcgccaccatcctgtacgagatcctgctgggcaaggccaccctgtacgccgtgctggtgtctgccctggtgctgatggctatggtcaagcggaaggacagccggggataa

SEQ ID NO: 37541 - DNA, 2316 bp, synthetic construct
  source 1..2316: mol_type = other DNA
atggccttaccagtgaccgccttgctcctgccgctggccttgctgctccacgccgccaggccggaagtgcagctggttgaatctggcggaggactggttcagcctggcggatctctgagactgagctgtgaagccagcggcttcgccagcgacgattacatcatcggctggttcagacaggcccctggcaaagagagagagggcgtcagctgcatcagctctaagtacgccaacaccgtgtacaccgacagcgtgaagggcagattcagactgagcagaggcaccgccaagaataccgtgtacctccagatgagcgccctgaagcctgaggataccgccgtgtactactgcgctatggacagccgcagagtgacatgccctgagatcagcaccatgcaccggaacttcgattcttggggccagggcacactggtcacagtgtcatctggtaccggcggaggcggatctggcggcggaggtagcggtggcggaggatctgaattcgacatcgtgatgacacagagccctgatagcctggccgtgtctctgggagagagagccaccatcaactgcaagagcagccagagcctgctgaacagcggcaaccagaagaactacctggcctggtatcagcagaagcccggccagcctcctaagctgctgatctactggggcagcaccagatccacaggcgtgcccgatagattttctggctctggcagcggcaccgacttcaccctgacaatttctagcctgcaagccgaggacgtggccgtgtactactgccagaacgactacacataccccttcaccttcggccagggcaccaagctggaaatcaaactcgaggacctgaagaacgtgttcccacctgaggtggccgtgttcgagcctagcgaggccgagatcagccacacccagaaagccaccctcgtgtgcctggctaccggcttctaccccgaccatgtggaactgtcttggtgggtcaacggcaaagaggtgcacagcggcgtgtgtaccgacccccagccactgaaagaacagcccgccctgaacgacagccggtactgcctgagcagcagactgagagtgtccgccaccttctggcagaacccccggaaccacttcagatgccaggtgcagttctacggcctgagcgagaacgacgagtggacccaggacagagccaagcccgtgacccagatcgtgtctgccgaagcctggggcagagccgattgcgacgtgaagctggtggaaaagagcttcgagacagacaccaacctgaacttccagaacctgagcgtgatcggcttcagaatcctgctgctgaaagtggccggctttaacctgctgatgaccctgcggctgtggtccagcagggccaagcgatctggatctggagcaacaaacttctcactactcaaacaagcaggtgacgtggaggagaatcccgggcctactagtatggactggatttggcgcatccttttccttgtcggcgctgctaccggcgcgcattccttcgaacaagttcagctggttcagagcggagccgaagtgaagaaacctggggcctctgtgaaggtgtcctgcaaggcttccggctataccttcaccagcttttggctgaactgggtccgacaggcccctggacaaggactggaatggatgggcaacatctaccccagcaccagctacaccgtgtacaaccagaaattcaaggaccgcgtgaccatgaccagggacaccagcacaagcacagtgtacatggaactgagcagcctgcggagcgaggataccgccgtgtattattgcgccagaacctggcggggcaacagcttcgattattggggccagggaaccaccgtgaccgtgtcatctacgcgtatccagaaccctgatcctgccgtgtaccagctgcgggatagcaagagcagcgacaagagcgtgtgtctgttcaccgacttcgacagccagaccaacgtgtcccagagcaaggactccgacgtgtacatcaccgataagtgcgtgctggacatgcggagcatggacttcaagagcaactccgccgtggcctggtccaacaagtccgatttcgcctgcgccaacgccttcaacaacagcattatccccgaggacacattcttcccaagccccgagagcagctgcggctttaccagcgagagctaccagcagggcgtgctgagcgccaccatcctgtacgagatcctgctgggcaaggccaccctgtacgccgtgctggtgtctgccctggtgctgatggctatggtcaagcggaaggacagccggggataa

SEQ ID NO: 37542 - DNA, 2313 bp, synthetic construct
  source 1..2313: mol_type = other DNA
atggccttaccagtgaccgccttgctcctgccgctggccttgctgctccacgccgccaggccggaagtgcagctggttgaatctggcggaggactggttcagcctggcggatctctgagactgtcttgtgccgcctctggcttcgccagcgactactatatcatcggctggttcagacaggcccctggcaaagagagagagggcgtcagctgtatcagcagcagatacgccaacaccaactacgccgacagcgtgaagggcagattcaccatcagccgggacaacgccaagaacaccgtgtacctccagatgaacagcctgaagcctgaggacaccgccgtgtactactgtgccgccgacaccagaagatacacctgtcctgacattgccaccatgcaccggaacttcgattcttggggccagggcacactggtcaccgtttcttctggtaccggcggaggcggatctggcggcggaggtagcggtggcggaggatctgaattcgacatcgtgatgacacagagccctgatagcctggccgtgtctctgggagagagagccaccatcaactgcaagagcagccagagcctgctgaacagcggcaaccagaagaactacctggcctggtatcagcagaagcccggccagcctcctaagctgctgatctactggggcagcaccagatccacaggcgtgcccgatagattttctggctctggcagcggcaccgacttcaccctgacaatttctagcctgcaagccgaggacgtggccgtgtactactgccagaacgactacacataccccttcaccttcggccagggcaccaagctggaaatcaaactcgagatccagaaccctgatcctgccgtgtaccagctgcgggatagcaagagcagcgacaagagcgtgtgtctgttcaccgacttcgacagccagaccaacgtgtcccagagcaaggactccgacgtgtacatcaccgataagtgcgtgctggacatgcggagcatggacttcaagagcaactccgccgtggcctggtccaacaagtccgatttcgcctgcgccaacgccttcaacaacagcattatccccgaggacacattcttcccaagccccgagagcagctgcggctttaccagcgagagctaccagcagggcgtgctgagcgccaccatcctgtacgagatcctgctgggcaaggccaccctgtacgccgtgctggtgtctgccctggtgctgatggctatggtcaagcggaaggacagccggggaagggccaagcgatctggatctggagcaacaaacttctcactactcaaacaagcaggtgacgtggaggagaatcccgggcctactagtatggactggatttggcgcatccttttccttgtcggcgctgctaccggcgcgcattccttcgaacaagttcagctggttcagagcggagccgaagtgaagaaacctggggcctctgtgaaggtgtcctgcaaggcttccggctataccttcaccagcttttggctgaactgggtccgacaggcccctggacaaggactggaatggatgggcaacatctaccccagcaccagctacaccgtgtacaaccagaaattcaaggaccgcgtgaccatgaccagggacaccagcacaagcacagtgtacatggaactgagcagcctgcggagcgaggataccgccgtgtattattgcgccagaacctggcggggcaacagcttcgattattggggccagggaaccaccgtgaccgtgtcatctacgcgtgacctgaagaacgtgttcccacctgaggtggccgtgttcgagcctagcgaggccgagatcagccacacccagaaagccaccctcgtgtgcctggctaccggcttctaccccgaccatgtggaactgtcttggtgggtcaacggcaaagaggtgcacagcggcgtgtgtaccgacccccagccactgaaagaacagcccgccctgaacgacagccggtactgcctgagcagcagactgagagtgtccgccaccttctggcagaacccccggaaccacttcagatgccaggtgcagttctacggcctgagcgagaacgacgagtggacccaggacagagccaagcccgtgacccagatcgtgtctgccgaagcctggggcagagccgattgcgacgtgaagctggtggaaaagagcttcgagacagacaccaacctgaacttccagaacctgagcgtgatcggcttcagaatcctgctgctgaaagtggccggctttaacctgctgatgaccctgcggctgtggtccagc

SEQ ID NO: 37543 - DNA, 2313 bp, synthetic construct
  source 1..2313: mol_type = other DNA
atggccttaccagtgaccgccttgctcctgccgctggccttgctgctccacgccgccaggccggaagtgcagctggttgaatctggcggaggactggttcagcctggcggatctctgagactgagctgtgaagccagcggcttcgccagcgacgattacatcatcggctggttcagacaggcccctggcaaagagagagagggcgtcagctgcatcagctctaagtacgccaacaccgtgtacaccgacagcgtgaagggcagattcagactgagcagaggcaccgccaagaataccgtgtacctccagatgagcgccctgaagcctgaggataccgccgtgtactactgcgctatggacagccgcagagtgacatgccctgagatcagcaccatgcaccggaacttcgattcttggggccagggcacactggtcacagtgtcatctggtaccggcggaggcggatctggcggcggaggtagcggtggcggaggatctgaattcgacatcgtgatgacacagagccctgatagcctggccgtgtctctgggagagagagccaccatcaactgcaagagcagccagagcctgctgaacagcggcaaccagaagaactacctggcctggtatcagcagaagcccggccagcctcctaagctgctgatctactggggcagcaccagatccacaggcgtgcccgatagattttctggctctggcagcggcaccgacttcaccctgacaatttctagcctgcaagccgaggacgtggccgtgtactactgccagaacgactacacataccccttcaccttcggccagggcaccaagctggaaatcaaactcgagatccagaaccctgatcctgccgtgtaccagctgcgggatagcaagagcagcgacaagagcgtgtgtctgttcaccgacttcgacagccagaccaacgtgtcccagagcaaggactccgacgtgtacatcaccgataagtgcgtgctggacatgcggagcatggacttcaagagcaactccgccgtggcctggtccaacaagtccgatttcgcctgcgccaacgccttcaacaacagcattatccccgaggacacattcttcccaagccccgagagcagctgcggctttaccagcgagagctaccagcagggcgtgctgagcgccaccatcctgtacgagatcctgctgggcaaggccaccctgtacgccgtgctggtgtctgccctggtgctgatggctatggtcaagcggaaggacagccggggaagggccaagcgatctggatctggagcaacaaacttctcactactcaaacaagcaggtgacgtggaggagaatcccgggcctactagtatggactggatttggcgcatccttttccttgtcggcgctgctaccggcgcgcattccttcgaacaagttcagctggttcagagcggagccgaagtgaagaaacctggggcctctgtgaaggtgtcctgcaaggcttccggctataccttcaccagcttttggctgaactgggtccgacaggcccctggacaaggactggaatggatgggcaacatctaccccagcaccagctacaccgtgtacaaccagaaattcaaggaccgcgtgaccatgaccagggacaccagcacaagcacagtgtacatggaactgagcagcctgcggagcgaggataccgccgtgtattattgcgccagaacctggcggggcaacagcttcgattattggggccagggaaccaccgtgaccgtgtcatctacgcgtgacctgaagaacgtgttcccacctgaggtggccgtgttcgagcctagcgaggccgagatcagccacacccagaaagccaccctcgtgtgcctggctaccggcttctaccccgaccatgtggaactgtcttggtgggtcaacggcaaagaggtgcacagcggcgtgtgtaccgacccccagccactgaaagaacagcccgccctgaacgacagccggtactgcctgagcagcagactgagagtgtccgccaccttctggcagaacccccggaaccacttcagatgccaggtgcagttctacggcctgagcgagaacgacgagtggacccaggacagagccaagcccgtgacccagatcgtgtctgccgaagcctggggcagagccgattgcgacgtgaagctggtggaaaagagcttcgagacagacaccaacctgaacttccagaacctgagcgtgatcggcttcagaatcctgctgctgaaagtggccggctttaacctgctgatgaccctgcggctgtggtccagc

SEQ ID NO: 37544 - DNA, 2286 bp, synthetic construct
  source 1..2286: mol_type = other DNA
atggccttaccagtgaccgccttgctcctgccgctggccttgctgctccacgccgccaggccgcaagtcaaactggaagaaagcggtggcggcctggtgcaacctggcgaatctctgagactgagctgtagcgccagcggctccatcttcaaggtgttcagagtgttcgccatgagctggtacaggcaaggccctggcaagcagagagagctggtcgcctctatcagcagcggcgagacaaccacatacgccgaatctgtgaaaggccggttcaccatcagccgggataatgccaagaataccgcctatctccagatggactccctgaagcctgaagatacagctgtgtactactgcaacgccgaccataccttcaccggcgatttttggggccagggaacccaagtgaccgtgtctagtggtaccggcggaggcggatctggcggcggaggtagcggtggcggaggatctgaattcgacatcgtgatgacacagagccctgatagcctggccgtgtctctgggagagagagccaccatcaactgcaagagcagccagagcctgctgaacagcggcaaccagaagaactacctggcctggtatcagcagaagcccggccagcctcctaagctgctgatctactggggcagcaccagatccacaggcgtgcccgatagattttctggctctggcagcggcaccgacttcaccctgacaatttctagcctgcaagccgaggacgtggccgtgtactactgccagaacgactacacataccccttcaccttcggccagggcaccaagctggaaatcaaactcgagatccagaaccctgatcctgccgtgtaccagctgcgggatagcaagagcagcgacaagagcgtgtgtctgttcaccgacttcgacagccagaccaacgtgtcccagagcaaggactccgacgtgtacatcaccgataagtgcgtgctggacatgcggagcatggacttcaagagcaactccgccgtggcctggtccaacaagtccgatttcgcctgcgccaacgccttcaacaacagcattatccccgaggacacattcttcccaagccccgagagcagctgcggctttaccagcgagagctaccagcagggcgtgctgagcgccaccatcctgtacgagatcctgctgggcaaggccaccctgtacgccgtgctggtgtctgccctggtgctgatggctatggtcaagcggaaggacagccggggaagggccaagcgatctggatctggagcaacaaacttctcactactcaaacaagcaggtgacgtggaggagaatcccgggcctactagtatggactggatttggcgcatccttttccttgtcggcgctgctaccggcgcgcattccttcgaacaagttcagctggttcagagcggagccgaagtgaagaaacctggggcctctgtgaaggtgtcctgcaaggcttccggctataccttcaccagcttttggctgaactgggtccgacaggcccctggacaaggactggaatggatgggcaacatctaccccagcaccagctacaccgtgtacaaccagaaattcaaggaccgcgtgaccatgaccagggacaccagcacaagcacagtgtacatggaactgagcagcctgcggagcgaggataccgccgtgtattattgcgccagaacctggcggggcaacagcttcgattattggggccagggaaccaccgtgaccgtgtcatctacgcgtgacctgaagaacgtgttcccacctgaggtggccgtgttcgagcctagcgaggccgagatcagccacacccagaaagccaccctcgtgtgcctggctaccggcttctaccccgaccatgtggaactgtcttggtgggtcaacggcaaagaggtgcacagcggcgtgtgtaccgacccccagccactgaaagaacagcccgccctgaacgacagccggtactgcctgagcagcagactgagagtgtccgccaccttctggcagaacccccggaaccacttcagatgccaggtgcagttctacggcctgagcgagaacgacgagtggacccaggacagagccaagcccgtgacccagatcgtgtctgccgaagcctggggcagagccgattgcgacgtgaagctggtggaaaagagcttcgagacagacaccaacctgaacttccagaacctgagcgtgatcggcttcagaatcctgctgctgaaagtggccggctttaacctgctgatgaccctgcggctgtggtccagc

SEQ ID NO: 37545 - DNA, 2292 bp, synthetic construct
  source 1..2292: mol_type = other DNA
atggccttaccagtgaccgccttgctcctgccgctggccttgctgctccacgccgccaggccggacatcgtgatgacacagagccctgatagcctggccgtgtctctgggagagagagccaccatcaactgcaagagcagccagagcctgctgaacagcggcaaccagaagaactacctggcctggtatcagcagaagcccggccagcctcctaagctgctgatctactggggcagcaccagatccacaggcgtgcccgatagattttctggctctggcagcggcaccgacttcaccctgacaatttctagcctgcaagccgaggacgtggccgtgtactactgccagaacgactacacataccccttcaccttcggccagggcaccaagctggaaatcaaactcgaggacctgaagaacgtgttcccacctgaggtggccgtgttcgagcctagcgaggccgagatcagccacacccagaaagccaccctcgtgtgcctggctaccggcttctaccccgaccatgtggaactgtcttggtgggtcaacggcaaagaggtgcacagcggcgtgtgtaccgacccccagccactgaaagaacagcccgccctgaacgacagccggtactgcctgagcagcagactgagagtgtccgccaccttctggcagaacccccggaaccacttcagatgccaggtgcagttctacggcctgagcgagaacgacgagtggacccaggacagagccaagcccgtgacccagatcgtgtctgccgaagcctggggcagagccgattgcgacgtgaagctggtggaaaagagcttcgagacagacaccaacctgaacttccagaacctgagcgtgatcggcttcagaatcctgctgctgaaagtggccggctttaacctgctgatgaccctgcggctgtggtccagcagggccaagcgatctggatctggagcaacaaacttctcactactcaaacaagcaggtgacgtggaggagaatcccgggcctactagtgccaccatggactggatttggcgcatccttttccttgtcggcgctgctaccggcgcccattccgggcccgaagtgcagctggttgaatctggcggaggactggttcaggctggcggatctctgagactgtcttgtgccgccagcggcagaacctttagcatgggctggtttagacaggcccctggcaaagagagagagttcgtcgccgccatcacatactctggcggcagcccttactacgccgactctgtgaagggcagattcaccatcagccgggacaacgccaagaacaccgtgtacctccagatgaacagcctgaagcctgaggacaccgccgtgtactactgcgccgccaatccaacatacggcagcgactggaacgccgagaattggggccagggaacccaagtgacagtgtctagcggatccggcggcggaggatctggcggaggcggatctgggggcggaggctctttcgaacaagttcagctggttcagagcggagccgaagtgaagaaacctggggcctctgtgaaggtgtcctgcaaggcttccggctataccttcaccagcttttggctgaactgggtccgacaggcccctggacaaggactggaatggatgggcaacatctaccccagcaccagctacaccgtgtacaaccagaaattcaaggaccgcgtgaccatgaccagggacaccagcacaagcacagtgtacatggaactgagcagcctgcggagcgaggataccgccgtgtattattgcgccagaacctggcggggcaacagcttcgattattggggccagggaaccaccgtgaccgtgtcatctacgcgtatccagaaccctgatcctgccgtgtaccagctgcgggatagcaagagcagcgacaagagcgtgtgtctgttcaccgacttcgacagccagaccaacgtgtcccagagcaaggactccgacgtgtacatcaccgataagtgcgtgctggacatgcggagcatggacttcaagagcaactccgccgtggcctggtccaacaagtccgatttcgcctgcgccaacgccttcaacaacagcattatccccgaggacacattcttcccaagccccgagagcagctgcggctttaccagcgagagctaccagcagggcgtgctgagcgccaccatcctgtacgagatcctgctgggcaaggccaccctgtacgccgtgctggtgtctgccctggtgctgatggctatggtcaagcggaaggacagccggggataa

SEQ ID NO: 37546 - DNA, 2295 bp, synthetic construct
  source 1..2295: mol_type = other DNA
atggccttaccagtgaccgccttgctcctgccgctggccttgctgctccacgccgccaggccggacatcgtgatgacacagagccctgatagcctggccgtgtctctgggagagagagccaccatcaactgcaagagcagccagagcctgctgaacagcggcaaccagaagaactacctggcctggtatcagcagaagcccggccagcctcctaagctgctgatctactggggcagcaccagatccacaggcgtgcccgatagattttctggctctggcagcggcaccgacttcaccctgacaatttctagcctgcaagccgaggacgtggccgtgtactactgccagaacgactacacataccccttcaccttcggccagggcaccaagctggaaatcaaactcgaggacctgaagaacgtgttcccacctgaggtggccgtgttcgagcctagcgaggccgagatcagccacacccagaaagccaccctcgtgtgcctggctaccggcttctaccccgaccatgtggaactgtcttggtgggtcaacggcaaagaggtgcacagcggcgtgtgtaccgacccccagccactgaaagaacagcccgccctgaacgacagccggtactgcctgagcagcagactgagagtgtccgccaccttctggcagaacccccggaaccacttcagatgccaggtgcagttctacggcctgagcgagaacgacgagtggacccaggacagagccaagcccgtgacccagatcgtgtctgccgaagcctggggcagagccgattgcgacgtgaagctggtggaaaagagcttcgagacagacaccaacctgaacttccagaacctgagcgtgatcggcttcagaatcctgctgctgaaagtggccggctttaacctgctgatgaccctgcggctgtggtccagcagggccaagcgatctggatctggagcaacaaacttctcactactcaaacaagcaggtgacgtggaggagaatcccgggcctactagtgccaccatggactggatttggcgcatccttttccttgtcggcgctgctaccggcgcccattccgggcccgaagtgcaactggtggaatctgggggcggactggtgcagccaggcggaagtctgaggctgtcttgtgccgcctccggcagcatcttcggcttcaacgacatggcctggtatcggcaggctcccggaaaacagcgcgagctggtggctctgattagcagagtgggcgtgaccagcagcgccgactctgtgaagggcagattcacaatctccagagtgaacgccaaggatacagtgtacctccagatgaactctctgaaacctgaggatacagcagtgtactattgctacatggaccagcggctggacggcagcacactggcctactggggacagggaactcaagtgacagtgtctagcggatccggcggcggaggatctggcggaggcggatctgggggcggaggctctttcgaacaagttcagctggttcagagcggagccgaagtgaagaaacctggggcctctgtgaaggtgtcctgcaaggcttccggctataccttcaccagcttttggctgaactgggtccgacaggcccctggacaaggactggaatggatgggcaacatctaccccagcaccagctacaccgtgtacaaccagaaattcaaggaccgcgtgaccatgaccagggacaccagcacaagcacagtgtacatggaactgagcagcctgcggagcgaggataccgccgtgtattattgcgccagaacctggcggggcaacagcttcgattattggggccagggaaccaccgtgaccgtgtcatctacgcgtatccagaaccctgatcctgccgtgtaccagctgcgggatagcaagagcagcgacaagagcgtgtgtctgttcaccgacttcgacagccagaccaacgtgtcccagagcaaggactccgacgtgtacatcaccgataagtgcgtgctggacatgcggagcatggacttcaagagcaactccgccgtggcctggtccaacaagtccgatttcgcctgcgccaacgccttcaacaacagcattatccccgaggacacattcttcccaagccccgagagcagctgcggctttaccagcgagagctaccagcagggcgtgctgagcgccaccatcctgtacgagatcctgctgggcaaggccaccctgtacgccgtgctggtgtctgccctggtgctgatggctatggtcaagcggaaggacagccggggataa

SEQ ID NO: 37547 - DNA, 2283 bp, synthetic construct
  source 1..2283: mol_type = other DNA
atggccttaccagtgaccgccttgctcctgccgctggccttgctgctccacgccgccaggccggacatcgtgatgacacagagccctgatagcctggccgtgtctctgggagagagagccaccatcaactgcaagagcagccagagcctgctgaacagcggcaaccagaagaactacctggcctggtatcagcagaagcccggccagcctcctaagctgctgatctactggggcagcaccagatccacaggcgtgcccgatagattttctggctctggcagcggcaccgacttcaccctgacaatttctagcctgcaagccgaggacgtggccgtgtactactgccagaacgactacacataccccttcaccttcggccagggcaccaagctggaaatcaaactcgaggacctgaagaacgtgttcccacctgaggtggccgtgttcgagcctagcgaggccgagatcagccacacccagaaagccaccctcgtgtgcctggctaccggcttctaccccgaccatgtggaactgtcttggtgggtcaacggcaaagaggtgcacagcggcgtgtgtaccgacccccagccactgaaagaacagcccgccctgaacgacagccggtactgcctgagcagcagactgagagtgtccgccaccttctggcagaacccccggaaccacttcagatgccaggtgcagttctacggcctgagcgagaacgacgagtggacccaggacagagccaagcccgtgacccagatcgtgtctgccgaagcctggggcagagccgattgcgacgtgaagctggtggaaaagagcttcgagacagacaccaacctgaacttccagaacctgagcgtgatcggcttcagaatcctgctgctgaaagtggccggctttaacctgctgatgaccctgcggctgtggtccagcagggccaagcgatctggatctggagcaacaaacttctcactactcaaacaagcaggtgacgtggaggagaatcccgggcctactagtgccaccatggactggatttggcgcatccttttccttgtcggcgctgctaccggcgcccattccgggcccgaggtgcagctggttgaatctggcggaggactggttcaggctggcggatctctgagactgtcttgtgccgccagcggctctgtgttcagcggcaatgtgatgggctggtacagacaggcccctggcaaagaaagagagtgggttgccgccattgccagcggcggcagcatctactacagagactctgtgaagggcagattcaccatcagccgggacaacgccaagaacaccgtgtacctccagatgaacagcctgaagcctgaggacaccgccgtgtactactgcaactctcaccctcctacactgccctattggggcctgggaacccaagtgacagtgtcctctggatccggcggcggaggatctggcggaggcggatctgggggcggaggctctttcgaacaagttcagctggttcagagcggagccgaagtgaagaaacctggggcctctgtgaaggtgtcctgcaaggcttccggctataccttcaccagcttttggctgaactgggtccgacaggcccctggacaaggactggaatggatgggcaacatctaccccagcaccagctacaccgtgtacaaccagaaattcaaggaccgcgtgaccatgaccagggacaccagcacaagcacagtgtacatggaactgagcagcctgcggagcgaggataccgccgtgtattattgcgccagaacctggcggggcaacagcttcgattattggggccagggaaccaccgtgaccgtgtcatctacgcgtatccagaaccctgatcctgccgtgtaccagctgcgggatagcaagagcagcgacaagagcgtgtgtctgttcaccgacttcgacagccagaccaacgtgtcccagagcaaggactccgacgtgtacatcaccgataagtgcgtgctggacatgcggagcatggacttcaagagcaactccgccgtggcctggtccaacaagtccgatttcgcctgcgccaacgccttcaacaacagcattatccccgaggacacattcttcccaagccccgagagcagctgcggctttaccagcgagagctaccagcagggcgtgctgagcgccaccatcctgtacgagatcctgctgggcaaggccaccctgtacgccgtgctggtgtctgccctggtgctgatggctatggtcaagcggaaggacagccggggataa

SEQ ID NO: 37548 - DNA, 2277 bp, synthetic construct
  source 1..2277: mol_type = other DNA
atggccttaccagtgaccgccttgctcctgccgctggccttgctgctccacgccgccaggccggacatcgtgatgacacagagccctgatagcctggccgtgtctctgggagagagagccaccatcaactgcaagagcagccagagcctgctgaacagcggcaaccagaagaactacctggcctggtatcagcagaagcccggccagcctcctaagctgctgatctactggggcagcaccagatccacaggcgtgcccgatagattttctggctctggcagcggcaccgacttcaccctgacaatttctagcctgcaagccgaggacgtggccgtgtactactgccagaacgactacacataccccttcaccttcggccagggcaccaagctggaaatcaaactcgaggacctgaagaacgtgttcccacctgaggtggccgtgttcgagcctagcgaggccgagatcagccacacccagaaagccaccctcgtgtgcctggctaccggcttctaccccgaccatgtggaactgtcttggtgggtcaacggcaaagaggtgcacagcggcgtgtgtaccgacccccagccactgaaagaacagcccgccctgaacgacagccggtactgcctgagcagcagactgagagtgtccgccaccttctggcagaacccccggaaccacttcagatgccaggtgcagttctacggcctgagcgagaacgacgagtggacccaggacagagccaagcccgtgacccagatcgtgtctgccgaagcctggggcagagccgattgcgacgtgaagctggtggaaaagagcttcgagacagacaccaacctgaacttccagaacctgagcgtgatcggcttcagaatcctgctgctgaaagtggccggctttaacctgctgatgaccctgcggctgtggtccagcagggccaagcgatctggatctggagcaacaaacttctcactactcaaacaagcaggtgacgtggaggagaatcccgggcctactagtgccaccatggactggatttggcgcatccttttccttgtcggcgctgctaccggcgcccattccgggcccgaagttcagctgctggaatctggcggaggactcgttcaacctggcggctctctgagactgagctgtgccgcttctggcttcagcttctctagctacgccctgagctgggttcgacaagctcccggaaagggccttgaatgggtgtccagcatcggcgagaatgacggcaccacagactatgccgatgccgtgaaaggccggtttaccatcagcagagacaattccaagaacacgctctatctgcaaatgaactccctgcgcgtggaagatacagccgtgtattattgcgtgaaggacggcatccactggggacagggaaccctggttacagtgtctagcggatccggcggcggaggatctggcggaggcggatctgggggcggaggctctttcgaacaagttcagctggttcagagcggagccgaagtgaagaaacctggggcctctgtgaaggtgtcctgcaaggcttccggctataccttcaccagcttttggctgaactgggtccgacaggcccctggacaaggactggaatggatgggcaacatctaccccagcaccagctacaccgtgtacaaccagaaattcaaggaccgcgtgaccatgaccagggacaccagcacaagcacagtgtacatggaactgagcagcctgcggagcgaggataccgccgtgtattattgcgccagaacctggcggggcaacagcttcgattattggggccagggaaccaccgtgaccgtgtcatctacgcgtatccagaaccctgatcctgccgtgtaccagctgcgggatagcaagagcagcgacaagagcgtgtgtctgttcaccgacttcgacagccagaccaacgtgtcccagagcaaggactccgacgtgtacatcaccgataagtgcgtgctggacatgcggagcatggacttcaagagcaactccgccgtggcctggtccaacaagtccgatttcgcctgcgccaacgccttcaacaacagcattatccccgaggacacattcttcccaagccccgagagcagctgcggctttaccagcgagagctaccagcagggcgtgctgagcgccaccatcctgtacgagatcctgctgggcaaggccaccctgtacgccgtgctggtgtctgccctggtgctgatggctatggtcaagcggaaggacagccggggataa

SEQ ID NO: 37549 - DNA, 3384 bp, synthetic construct
  source 1..3384: mol_type = other DNA
atgggacccagactgctgttttgggctctgctgtgtctgctcggcacaggacctgttgaagctggcgtgacacagagccccacacacctgattaagaccagaggccagcaggccacactgagatgcagccctatcagcggccacaccagcgtgtactggtatcagcaggctctcggactgggcctccagttcctgctttggtacgacgagggcgaagagagaaaccggggcaacttccctcctcggttttccggcagacagttccccaactacagcagcgagctgaacgtgaacgccctggaactggaagatagcgccctgtacctgtgtgcctcttctcttggtggacctcgcggactggctggactgagaggggatgagcagtttttcggccctggcaccagactgaccgtgctggaaggtaccggcggaggcggatctggcggcggagaattcgacatcgtgatgacacagagccctgatagcctggccgtgtctctgggagagagagccaccatcaactgcaagagcagccagagcctgctgaacagcggcaaccagaagaactacctggcctggtatcagcagaagcccggccagcctcctaagctgctgatctactggggcagcaccagatccacaggcgtgcccgatagattttctggctctggcagcggcaccgacttcaccctgacaatttctagcctgcaagccgaggacgtggccgtgtactactgccagaacgactacacataccccttcaccttcggccagggcaccaagctggaaatcaaactcgaggacctgaagaacgtgttcccacctgaggtggccgtgttcgagcctagcgaggccgagatcagccacacccagaaagccaccctcgtgtgcctggctaccggcttctaccccgaccatgtggaactgtcttggtgggtcaacggcaaagaggtgcacagcggcgtgtgtaccgacccccagccactgaaagaacagcccgccctgaacgacagccggtactgcctgagcagcagactgagagtgtccgccaccttctggcagaacccccggaaccacttcagatgccaggtgcagttctacggcctgagcgagaacgacgagtggacccaggacagagccaagcccgtgacccagatcgtgtctgccgaagcctggggcagagccgattgcgacgtgaagctggtggaaaagagcttcgagacagacaccaacctgaacttccagaacctgagcgtgatcggcttcagaatcctgctgctgaaagtggccggctttaacctgctgatgaccctgcggctgtggtccagcagggccaagcgatctggatctggagcaacaaacttctcactactcaaacaagcaggtgacgtggaggagaatcccgggcctactagtgccaccatggactggatttggcgcatccttttccttgtcggcgctgctaccggcgcccattccgggcccgaagtgcagctggttgaatctggcggaggactggttcaggctggcggatctctgagactgtcttgtgccgccagcggcagaacctttagcatgggctggtttagacaggcccctggcaaagagagagagttcgtcgccgccatcacatactctggcggcagcccttactacgccgactctgtgaagggcagattcaccatcagccgggacaacgccaagaacaccgtgtacctccagatgaacagcctgaagcctgaggacaccgccgtgtactactgcgccgccaatccaacatacggcagcgactggaacgccgagaattggggccagggaacccaagtgacagtgtctagcggatccggcggcggaggatctggcggaggcggatctgggggcggaggctctttcgaacaagttcagctggttcagagcggagccgaagtgaagaaacctggggcctctgtgaaggtgtcctgcaaggcttccggctataccttcaccagcttttggctgaactgggtccgacaggcccctggacaaggactggaatggatgggcaacatctaccccagcaccagctacaccgtgtacaaccagaaattcaaggaccgcgtgaccatgaccagggacaccagcacaagcacagtgtacatggaactgagcagcctgcggagcgaggataccgccgtgtattattgcgccagaacctggcggggcaacagcttcgattattggggccagggaaccaccgtgaccgtgtcatctacgcgtatccagaaccctgatcctgccgtgtaccagctgcgggatagcaagagcagcgacaagagcgtgtgtctgttcaccgacttcgacagccagaccaacgtgtcccagagcaaggactccgacgtgtacatcaccgataagtgcgtgctggacatgcggagcatggacttcaagagcaactccgccgtggcctggtccaacaagtccgatttcgcctgcgccaacgccttcaacaacagcattatccccgaggacacattcttcccaagccccgagagcagctgcggctttaccagcgagagctaccagcagggcgtgctgagcgccaccatcctgtacgagatcctgctgggcaaggccaccctgtacgccgtgctggtgtctgccctggtgctgatggctatggtcaagcggaaggacagccggggacgcgccaagagaagcggatctggcgtgaagcagaccctgaatttcgacctgctgaagctggctggcgacgtggaatccaacccaggcccttctagaggccatatgaccgagtacaagcccacggtgcgcctcgccacccgcgacgacgtccccagggccgtacgcaccctcgccgccgcgttcgccgactaccccgccacgcgccacaccgtcgatccggaccgccacatcgagcgggtcaccgagctgcaagaactcttcctcacgcgcgtcgggctcgacatcggcaaggtgtgggtcgcggacgacggcgccgcggtggcggtctggaccacgccggagagcgtcgaagcgggggcggtgttcgccgagatcggcccgcgcatggccgagttgagcggttcccggctggccgcgcagcaacagatggaaggcctcctggcgccgcaccggcccaaggagcccgcgtggttcctggccaccgtcggcgtctcgcccgaccaccagggcaagggtctgggcagcgccgtcgtgctccccggagtggaggcggccgagcgcgccggggtgcccgccttcctggagacctccgcgccccgcaacctccccttctacgagcggctcggcttcaccgtcaccgccgacgtcgaggtgcccgaaggaccgcgcacctggtgcatgacccgcaagcccggtgcctga

SEQ ID NO: 37550 - DNA, 3381 bp, synthetic construct
  source 1..3381: mol_type = other DNA
atgggacccagactgctgttttgggctctgctgtgtctgctcggcacaggacctgttgaagctggcgtgacacagagccccacacacctgattaagaccagaggccagcaggccacactgagatgcagccctatcagcggccacaccagcgtgtactggtatcagcaggctctcggactgggcctccagttcctgctttggtacgacgagggcgaagagagaaaccggggcaacttccctcctcggttttccggcagacagttccccaactacagcagcgagctgaacgtgaacgccctggaactggaagatagcgccctgtacctgtgtgccagctctctcggcggagatgaactgggagccgatggcaacgagcagttctttggccctggcaccagactgaccgtgctggaaggtaccggcggaggcggatctggcggcggaagcgaattcgacatcgtgatgacacagagccctgatagcctggccgtgtctctgggagagagagccaccatcaactgcaagagcagccagagcctgctgaacagcggcaaccagaagaactacctggcctggtatcagcagaagcccggccagcctcctaagctgctgatctactggggcagcaccagatccacaggcgtgcccgatagattttctggctctggcagcggcaccgacttcaccctgacaatttctagcctgcaagccgaggacgtggccgtgtactactgccagaacgactacacataccccttcaccttcggccagggcaccaagctggaaatcaaactcgaggacctgaagaacgtgttcccacctgaggtggccgtgttcgagcctagcgaggccgagatcagccacacccagaaagccaccctcgtgtgcctggctaccggcttctaccccgaccatgtggaactgtcttggtgggtcaacggcaaagaggtgcacagcggcgtgtgtaccgacccccagccactgaaagaacagcccgccctgaacgacagccggtactgcctgagcagcagactgagagtgtccgccaccttctggcagaacccccggaaccacttcagatgccaggtgcagttctacggcctgagcgagaacgacgagtggacccaggacagagccaagcccgtgacccagatcgtgtctgccgaagcctggggcagagccgattgcgacgtgaagctggtggaaaagagcttcgagacagacaccaacctgaacttccagaacctgagcgtgatcggcttcagaatcctgctgctgaaagtggccggctttaacctgctgatgaccctgcggctgtggtccagcagggccaagcgatctggatctggagcaacaaacttctcactactcaaacaagcaggtgacgtggaggagaatcccgggcctactagtgccaccatggactggatttggcgcatccttttccttgtcggcgctgctaccggcgcccattccgggcccgaagtgcagctggttgaatctggcggaggactggttcaggctggcggatctctgagactgtcttgtgccgccagcggcagaacctttagcatgggctggtttagacaggcccctggcaaagagagagagttcgtcgccgccatcacatactctggcggcagcccttactacgccgactctgtgaagggcagattcaccatcagccgggacaacgccaagaacaccgtgtacctccagatgaacagcctgaagcctgaggacaccgccgtgtactactgcgccgccaatccaacatacggcagcgactggaacgccgagaattggggccagggaacccaagtgacagtgtctagcggatccggcggcggaggatctggcggaggcggatctgggggcggaggctctttcgaacaagttcagctggttcagagcggagccgaagtgaagaaacctggggcctctgtgaaggtgtcctgcaaggcttccggctataccttcaccagcttttggctgaactgggtccgacaggcccctggacaaggactggaatggatgggcaacatctaccccagcaccagctacaccgtgtacaaccagaaattcaaggaccgcgtgaccatgaccagggacaccagcacaagcacagtgtacatggaactgagcagcctgcggagcgaggataccgccgtgtattattgcgccagaacctggcggggcaacagcttcgattattggggccagggaaccaccgtgaccgtgtcatctacgcgtatccagaaccctgatcctgccgtgtaccagctgcgggatagcaagagcagcgacaagagcgtgtgtctgttcaccgacttcgacagccagaccaacgtgtcccagagcaaggactccgacgtgtacatcaccgataagtgcgtgctggacatgcggagcatggacttcaagagcaactccgccgtggcctggtccaacaagtccgatttcgcctgcgccaacgccttcaacaacagcattatccccgaggacacattcttcccaagccccgagagcagctgcggctttaccagcgagagctaccagcagggcgtgctgagcgccaccatcctgtacgagatcctgctgggcaaggccaccctgtacgccgtgctggtgtctgccctggtgctgatggctatggtcaagcggaaggacagccggggacgcgccaagagaagcggatctggcgtgaagcagaccctgaatttcgacctgctgaagctggctggcgacgtggaatccaacccaggcccttctagaggccatatgaccgagtacaagcccacggtgcgcctcgccacccgcgacgacgtccccagggccgtacgcaccctcgccgccgcgttcgccgactaccccgccacgcgccacaccgtcgatccggaccgccacatcgagcgggtcaccgagctgcaagaactcttcctcacgcgcgtcgggctcgacatcggcaaggtgtgggtcgcggacgacggcgccgcggtggcggtctggaccacgccggagagcgtcgaagcgggggcggtgttcgccgagatcggcccgcgcatggccgagttgagcggttcccggctggccgcgcagcaacagatggaaggcctcctggcgccgcaccggcccaaggagcccgcgtggttcctggccaccgtcggcgtctcgcccgaccaccagggcaagggtctgggcagcgccgtcgtgctccccggagtggaggcggccgagcgcgccggggtgcccgccttcctggagacctccgcgccccgcaacctccccttctacgagcggctcggcttcaccgtcaccgccgacgtcgaggtgcccgaaggaccgcgcacctggtgcatgacccgcaagcccggtgcctga

SEQ ID NO: 37551 - DNA, 2856 bp, synthetic construct
  source 1..2856: mol_type = other DNA
atggccttaccagtgaccgccttgctcctgccgctggccttgctgctccacgccgccaggccggacatcgtgatgacacagagccctgatagcctggccgtgtctctgggagagagagccaccatcaactgcaagagcagccagagcctgctgaacagcggcaaccagaagaactacctggcctggtatcagcagaagcccggccagcctcctaagctgctgatctactggggcagcaccagatccacaggcgtgcccgatagattttctggctctggcagcggcaccgacttcaccctgacaatttctagcctgcaagccgaggacgtggccgtgtactactgccagaacgactacacataccccttcaccttcggccagggcaccaagctggaaatcaaactcgaggacctgaagaacgtgttcccacctgaggtggccgtgttcgagcctagcgaggccgagatcagccacacccagaaagccaccctcgtgtgcctggctaccggcttctaccccgaccatgtggaactgtcttggtgggtcaacggcaaagaggtgcacagcggcgtgtgtaccgacccccagccactgaaagaacagcccgccctgaacgacagccggtactgcctgagcagcagactgagagtgtccgccaccttctggcagaacccccggaaccacttcagatgccaggtgcagttctacggcctgagcgagaacgacgagtggacccaggacagagccaagcccgtgacccagatcgtgtctgccgaagcctggggcagagccgattgcgacgtgaagctggtggaaaagagcttcgagacagacaccaacctgaacttccagaacctgagcgtgatcggcttcagaatcctgctgctgaaagtggccggctttaacctgctgatgaccctgcggctgtggtccagcagggccaagcgatctggatctggagcaacaaacttctcactactcaaacaagcaggtgacgtggaggagaatcccgggcctactagtgccaccatggactggatttggcgcatccttttccttgtcggcgctgctaccggcgcccattccgggcccatgggaagctggcttgagttctaccacagactcaacgccattgacagcaggctgtgggcacttggcggaagcgaagctgaactcgccgcttttgaaaaagaaattgccgctttcgagtccgagcttcaggcttacaaaggcaaagggaatcctgaggtcgagagcctgagagatcacgctgcccacattagagagtggttgcaggcataccggcacaatggatccggcggcggaggatctggcggaggcggatctgggggcggaggctctttcgaacaagttcagctggttcagagcggagccgaagtgaagaaacctggggcctctgtgaaggtgtcctgcaaggcttccggctataccttcaccagcttttggctgaactgggtccgacaggcccctggacaaggactggaatggatgggcaacatctaccccagcaccagctacaccgtgtacaaccagaaattcaaggaccgcgtgaccatgaccagggacaccagcacaagcacagtgtacatggaactgagcagcctgcggagcgaggataccgccgtgtattattgcgccagaacctggcggggcaacagcttcgattattggggccagggaaccaccgtgaccgtgtcatctacgcgtatccagaaccctgatcctgccgtgtaccagctgcgggatagcaagagcagcgacaagagcgtgtgtctgttcaccgacttcgacagccagaccaacgtgtcccagagcaaggactccgacgtgtacatcaccgataagtgcgtgctggacatgcggagcatggacttcaagagcaactccgccgtggcctggtccaacaagtccgatttcgcctgcgccaacgccttcaacaacagcattatccccgaggacacattcttcccaagccccgagagcagctgcggctttaccagcgagagctaccagcagggcgtgctgagcgccaccatcctgtacgagatcctgctgggcaaggccaccctgtacgccgtgctggtgtctgccctggtgctgatggctatggtcaagcggaaggacagccggggacgcgccaagagaagcggatctggcgtgaagcagaccctgaatttcgacctgctgaagctggctggcgacgtggaatccaacccaggcccttctagaggccatatgaccgagtacaagcccacggtgcgcctcgccacccgcgacgacgtccccagggccgtacgcaccctcgccgccgcgttcgccgactaccccgccacgcgccacaccgtcgatccggaccgccacatcgagcgggtcaccgagctgcaagaactcttcctcacgcgcgtcgggctcgacatcggcaaggtgtgggtcgcggacgacggcgccgcggtggcggtctggaccacgccggagagcgtcgaagcgggggcggtgttcgccgagatcggcccgcgcatggccgagttgagcggttcccggctggccgcgcagcaacagatggaaggcctcctggcgccgcaccggcccaaggagcccgcgtggttcctggccaccgtcggcgtctcgcccgaccaccagggcaagggtctgggcagcgccgtcgtgctccccggagtggaggcggccgagcgcgccggggtgcccgccttcctggagacctccgcgccccgcaacctccccttctacgagcggctcggcttcaccgtcaccgccgacgtcgaggtgcccgaaggaccgcgcacctggtgcatgacccgcaagcccggtgcctga

SEQ ID NO: 37552 - DNA, 2856 bp, synthetic construct
  source 1..2856: mol_type = other DNA
atggccttaccagtgaccgccttgctcctgccgctggccttgctgctccacgccgccaggccggcatgcatgggcagttggttcgagttctacgaccggctgaatgccatcgacgccagactgtgggctctcggaggatctgaagctgagctggccgccttcgagaaagagatcgccgcctttgagagcgagctgcaagcctacaaaggcaagggcaaccccgaggtggaaaacctgagagtgcacgccgctgccatcagagaatggctccaggcttacagacacaacggtaccggcggaggcggatctggcggcggaggtagcggtggcggaggatctgaattcgacatcgtgatgacacagagccctgatagcctggccgtgtctctgggagagagagccaccatcaactgcaagagcagccagagcctgctgaacagcggcaaccagaagaactacctggcctggtatcagcagaagcccggccagcctcctaagctgctgatctactggggcagcaccagatccacaggcgtgcccgatagattttctggctctggcagcggcaccgacttcaccctgacaatttctagcctgcaagccgaggacgtggccgtgtactactgccagaacgactacacataccccttcaccttcggccagggcaccaagctggaaatcaaactcgaggacctgaagaacgtgttcccacctgaggtggccgtgttcgagcctagcgaggccgagatcagccacacccagaaagccaccctcgtgtgcctggctaccggcttctaccccgaccatgtggaactgtcttggtgggtcaacggcaaagaggtgcacagcggcgtgtgtaccgacccccagccactgaaagaacagcccgccctgaacgacagccggtactgcctgagcagcagactgagagtgtccgccaccttctggcagaacccccggaaccacttcagatgccaggtgcagttctacggcctgagcgagaacgacgagtggacccaggacagagccaagcccgtgacccagatcgtgtctgccgaagcctggggcagagccgattgcgacgtgaagctggtggaaaagagcttcgagacagacaccaacctgaacttccagaacctgagcgtgatcggcttcagaatcctgctgctgaaagtggccggctttaacctgctgatgaccctgcggctgtggtccagcagggccaagcgatctggatctggagcaacaaacttctcactactcaaacaagcaggtgacgtggaggagaatcccgggcctactagtatggactggatttggcgcatccttttccttgtcggcgctgctaccggcgcgcattccttcgaacaagttcagctggttcagagcggagccgaagtgaagaaacctggggcctctgtgaaggtgtcctgcaaggcttccggctataccttcaccagcttttggctgaactgggtccgacaggcccctggacaaggactggaatggatgggcaacatctaccccagcaccagctacaccgtgtacaaccagaaattcaaggaccgcgtgaccatgaccagggacaccagcacaagcacagtgtacatggaactgagcagcctgcggagcgaggataccgccgtgtattattgcgccagaacctggcggggcaacagcttcgattattggggccagggaaccaccgtgaccgtgtcatctacgcgtatccagaaccctgatcctgccgtgtaccagctgcgggatagcaagagcagcgacaagagcgtgtgtctgttcaccgacttcgacagccagaccaacgtgtcccagagcaaggactccgacgtgtacatcaccgataagtgcgtgctggacatgcggagcatggacttcaagagcaactccgccgtggcctggtccaacaagtccgatttcgcctgcgccaacgccttcaacaacagcattatccccgaggacacattcttcccaagccccgagagcagctgcggctttaccagcgagagctaccagcagggcgtgctgagcgccaccatcctgtacgagatcctgctgggcaaggccaccctgtacgccgtgctggtgtctgccctggtgctgatggctatggtcaagcggaaggacagccggggacgcgccaagagaagcggatctggcgtgaagcagaccctgaatttcgacctgctgaagctggctggcgacgtggaatccaacccaggcccttctagaggccatatgaccgagtacaagcccacggtgcgcctcgccacccgcgacgacgtccccagggccgtacgcaccctcgccgccgcgttcgccgactaccccgccacgcgccacaccgtcgatccggaccgccacatcgagcgggtcaccgagctgcaagaactcttcctcacgcgcgtcgggctcgacatcggcaaggtgtgggtcgcggacgacggcgccgcggtggcggtctggaccacgccggagagcgtcgaagcgggggcggtgttcgccgagatcggcccgcgcatggccgagttgagcggttcccggctggccgcgcagcaacagatggaaggcctcctggcgccgcaccggcccaaggagcccgcgtggttcctggccaccgtcggcgtctcgcccgaccaccagggcaagggtctgggcagcgccgtcgtgctccccggagtggaggcggccgagcgcgccggggtgcccgccttcctggagacctccgcgccccgcaacctccccttctacgagcggctcggcttcaccgtcaccgccgacgtcgaggtgcccgaaggaccgcgcacctggtgcatgacccgcaagcccggtgcctga

SEQ ID NO: 37553 - DNA, 3207 bp, synthetic construct
  source 1..3207: mol_type = other DNA
atggccttaccagtgaccgccttgctcctgccgctggccttgctgctccacgccgccaggccggcatgcatggaccccgacctggaaatcagagccgccttcctgcggcagagaaacacagccctgagaacagaggtggccgagctggaacaagaggtgcagcggctggaaaacgaggtgtcccagtacgagacaagatacggccctctcggaggcggaaaaggtaccggcggaggcggatctggcggcggaggtagcggtggcggaggatctgaattcgacatcgtgatgacacagagccctgatagcctggccgtgtctctgggagagagagccaccatcaactgcaagagcagccagagcctgctgaacagcggcaaccagaagaactacctggcctggtatcagcagaagcccggccagcctcctaagctgctgatctactggggcagcaccagatccacaggcgtgcccgatagattttctggctctggcagcggcaccgacttcaccctgacaatttctagcctgcaagccgaggacgtggccgtgtactactgccagaacgactacacataccccttcaccttcggccagggcaccaagctggaaatcaaactcgaggacctgaagaacgtgttcccacctgaggtggccgtgttcgagcctagcgaggccgagatcagccacacccagaaagccaccctcgtgtgcctggctaccggcttctaccccgaccatgtggaactgtcttggtgggtcaacggcaaagaggtgcacagcggcgtgtgtaccgacccccagccactgaaagaacagcccgccctgaacgacagccggtactgcctgagcagcagactgagagtgtccgccaccttctggcagaacccccggaaccacttcagatgccaggtgcagttctacggcctgagcgagaacgacgagtggacccaggacagagccaagcccgtgacccagatcgtgtctgccgaagcctggggcagagccgattgcgacgtgaagctggtggaaaagagcttcgagacagacaccaacctgaacttccagaacctgagcgtgatcggcttcagaatcctgctgctgaaagtggccggctttaacctgctgatgaccctgcggctgtggtccagcagggccaagcgatctggatctggagcaacaaacttctcactactcaaacaagcaggtgacgtggaggagaatcccgggcctactagtgccaccatggactggatttggcgcatccttttccttgtcggcgctgctaccggcgcccattccgggcccgaagtgcagctggttgaatctggcggaggactggttcaggctggcggatctctgagactgtcttgtgccgccagcggcagaacctttagcatgggctggtttagacaggcccctggcaaagagagagagttcgtcgccgccatcacatactctggcggcagcccttactacgccgactctgtgaagggcagattcaccatcagccgggacaacgccaagaacaccgtgtacctccagatgaacagcctgaagcctgaggacaccgccgtgtactactgcgccgccaatccaacatacggcagcgactggaacgccgagaattggggccagggaacccaagtgacagtgtctagcggatccggcggcggaggatctggcggaggcggatctgggggcggaggctctttcgaacaagttcagctggttcagagcggagccgaagtgaagaaacctggggcctctgtgaaggtgtcctgcaaggcttccggctataccttcaccagcttttggctgaactgggtccgacaggcccctggacaaggactggaatggatgggcaacatctaccccagcaccagctacaccgtgtacaaccagaaattcaaggaccgcgtgaccatgaccagggacaccagcacaagcacagtgtacatggaactgagcagcctgcggagcgaggataccgccgtgtattattgcgccagaacctggcggggcaacagcttcgattattggggccagggaaccaccgtgaccgtgtcatctacgcgtatccagaaccctgatcctgccgtgtaccagctgcgggatagcaagagcagcgacaagagcgtgtgtctgttcaccgacttcgacagccagaccaacgtgtcccagagcaaggactccgacgtgtacatcaccgataagtgcgtgctggacatgcggagcatggacttcaagagcaactccgccgtggcctggtccaacaagtccgatttcgcctgcgccaacgccttcaacaacagcattatccccgaggacacattcttcccaagccccgagagcagctgcggctttaccagcgagagctaccagcagggcgtgctgagcgccaccatcctgtacgagatcctgctgggcaaggccaccctgtacgccgtgctggtgtctgccctggtgctgatggctatggtcaagcggaaggacagccggggacgcgccaagagaagcggatctggcgtgaagcagaccctgaatttcgacctgctgaagctggctggcgacgtggaatccaacccaggcccttctagaggccatatgaccgagtacaagcccacggtgcgcctcgccacccgcgacgacgtccccagggccgtacgcaccctcgccgccgcgttcgccgactaccccgccacgcgccacaccgtcgatccggaccgccacatcgagcgggtcaccgagctgcaagaactcttcctcacgcgcgtcgggctcgacatcggcaaggtgtgggtcgcggacgacggcgccgcggtggcggtctggaccacgccggagagcgtcgaagcgggggcggtgttcgccgagatcggcccgcgcatggccgagttgagcggttcccggctggccgcgcagcaacagatggaaggcctcctggcgccgcaccggcccaaggagcccgcgtggttcctggccaccgtcggcgtctcgcccgaccaccagggcaagggtctgggcagcgccgtcgtgctccccggagtggaggcggccgagcgcgccggggtgcccgccttcctggagacctccgcgccccgcaacctccccttctacgagcggctcggcttcaccgtcaccgccgacgtcgaggtgcccgaaggaccgcgcacctggtgcatgacccgcaagcccggtgcctga

SEQ ID NO: 37554 - DNA, 2856 bp, synthetic construct
  source 1..2856: mol_type = other DNA
atggccttaccagtgaccgccttgctcctgccgctggccttgctgctccacgccgccaggccggacatcgtgatgacacagagccctgatagcctggccgtgtctctgggagagagagccaccatcaactgcaagagcagccagagcctgctgaacagcggcaaccagaagaactacctggcctggtatcagcagaagcccggccagcctcctaagctgctgatctactggggcagcaccagatccacaggcgtgcccgatagattttctggctctggcagcggcaccgacttcaccctgacaatttctagcctgcaagccgaggacgtggccgtgtactactgccagaacgactacacataccccttcaccttcggccagggcaccaagctggaaatcaaactcgaggacctgaagaacgtgttcccacctgaggtggccgtgttcgagcctagcgaggccgagatcagccacacccagaaagccaccctcgtgtgcctggctaccggcttctaccccgaccatgtggaactgtcttggtgggtcaacggcaaagaggtgcacagcggcgtgtgtaccgacccccagccactgaaagaacagcccgccctgaacgacagccggtactgcctgagcagcagactgagagtgtccgccaccttctggcagaacccccggaaccacttcagatgccaggtgcagttctacggcctgagcgagaacgacgagtggacccaggacagagccaagcccgtgacccagatcgtgtctgccgaagcctggggcagagccgattgcgacgtgaagctggtggaaaagagcttcgagacagacaccaacctgaacttccagaacctgagcgtgatcggcttcagaatcctgctgctgaaagtggccggctttaacctgctgatgaccctgcggctgtggtccagcagggccaagcgatctggatctggagcaacaaacttctcactactcaaacaagcaggtgacgtggaggagaatcccgggcctactagtgccaccatggactggatttggcgcatccttttccttgtcggcgctgctaccggcgcccattccgggcccatgggatcttggagcgagttttacgatcggctgcacgccattcaccaccggctgtatgctctcggaggaagcgaagctgagctggccgcttttgaaaaagaaattgccgctttcgagtccgagcttcaggcttacaaaggcaaagggaatcctgaggtcgaggccctgagagataccgccgccttcatcagaacccggttgcaggcataccggcacaacggatccggcggcggaggatctggcggaggcggatctgggggcggaggctctttcgaacaagttcagctggttcagagcggagccgaagtgaagaaacctggggcctctgtgaaggtgtcctgcaaggcttccggctataccttcaccagcttttggctgaactgggtccgacaggcccctggacaaggactggaatggatgggcaacatctaccccagcaccagctacaccgtgtacaaccagaaattcaaggaccgcgtgaccatgaccagggacaccagcacaagcacagtgtacatggaactgagcagcctgcggagcgaggataccgccgtgtattattgcgccagaacctggcggggcaacagcttcgattattggggccagggaaccaccgtgaccgtgtcatctacgcgtatccagaaccctgatcctgccgtgtaccagctgcgggatagcaagagcagcgacaagagcgtgtgtctgttcaccgacttcgacagccagaccaacgtgtcccagagcaaggactccgacgtgtacatcaccgataagtgcgtgctggacatgcggagcatggacttcaagagcaactccgccgtggcctggtccaacaagtccgatttcgcctgcgccaacgccttcaacaacagcattatccccgaggacacattcttcccaagccccgagagcagctgcggctttaccagcgagagctaccagcagggcgtgctgagcgccaccatcctgtacgagatcctgctgggcaaggccaccctgtacgccgtgctggtgtctgccctggtgctgatggctatggtcaagcggaaggacagccggggacgcgccaagagaagcggatctggcgtgaagcagaccctgaatttcgacctgctgaagctggctggcgacgtggaatccaacccaggcccttctagaggccatatgaccgagtacaagcccacggtgcgcctcgccacccgcgacgacgtccccagggccgtacgcaccctcgccgccgcgttcgccgactaccccgccacgcgccacaccgtcgatccggaccgccacatcgagcgggtcaccgagctgcaagaactcttcctcacgcgcgtcgggctcgacatcggcaaggtgtgggtcgcggacgacggcgccgcggtggcggtctggaccacgccggagagcgtcgaagcgggggcggtgttcgccgagatcggcccgcgcatggccgagttgagcggttcccggctggccgcgcagcaacagatggaaggcctcctggcgccgcaccggcccaaggagcccgcgtggttcctggccaccgtcggcgtctcgcccgaccaccagggcaagggtctgggcagcgccgtcgtgctccccggagtggaggcggccgagcgcgccggggtgcccgccttcctggagacctccgcgccccgcaacctccccttctacgagcggctcggcttcaccgtcaccgccgacgtcgaggtgcccgaaggaccgcgcacctggtgcatgacccgcaagcccggtgcctga

SEQ ID NO: 37555 - DNA, 3486 bp, synthetic construct
  source 1..3486: mol_type = other DNA
atggccttaccagtgaccgccttgctcctgccgctggccttgctgctccacgccgccaggccggacatcgtgatgacacagagccctgatagcctggccgtgtctctgggagagagagccaccatcaactgcaagagcagccagagcctgctgaacagcggcaaccagaagaactacctggcctggtatcagcagaagcccggccagcctcctaagctgctgatctactggggcagcaccagatccacaggcgtgcccgatagattttctggctctggcagcggcaccgacttcaccctgacaatttctagcctgcaagccgaggacgtggccgtgtactactgccagaacgactacacataccccttcaccttcggccagggcaccaagctggaaatcaaactcgaggacctgaagaacgtgttcccacctgaggtggccgtgttcgagcctagcgaggccgagatcagccacacccagaaagccaccctcgtgtgcctggctaccggcttctaccccgaccatgtggaactgtcttggtgggtcaacggcaaagaggtgcacagcggcgtgtgtaccgacccccagccactgaaagaacagcccgccctgaacgacagccggtactgcctgagcagcagactgagagtgtccgccaccttctggcagaacccccggaaccacttcagatgccaggtgcagttctacggcctgagcgagaacgacgagtggacccaggacagagccaagcccgtgacccagatcgtgtctgccgaagcctggggcagagccgattgcgacgtgaagctggtggaaaagagcttcgagacagacaccaacctgaacttccagaacctgagcgtgatcggcttcagaatcctgctgctgaaagtggccggctttaacctgctgatgaccctgcggctgtggtccagcagggccaagcgatctggatctggagcaacaaacttctcactactcaaacaagcaggtgacgtggaggagaatcccgggcctactagtaccatggactggatttggcgcatccttttccttgtcggcgctgctaccggcgcccattccctgttcaatcaagaggtgcagatccctctgaccgagagctactgtggcccctgtcctaagaactggatctgctacaagaacaactgctaccagttcttcgacgagagcaagaattggtacgagagccaggccagctgcatgagccagaatgccagcctgctgaaggtgtacagcaaagaggaccaggacctgctgaaactggtcaagagcgcccactggatgggccttgtgcacatccccaccaatggctcttggcagtgggaggacggcagcattctgagccctaacctgctgaccatcatcgagatgcagaagggcgactgcgccctgtacgccagcagctttaagggctacatcgagaattgcagcaccccgaacacctacatctgtatgcagagaaccgtttctggcggaggcggctctggaggaggcggaagtggcggcggaggcgacctctttaatcaagaagtccagattccactcaccgaatcctactgcggaccttgtccaaaaaattggatttgttataagaacaactgttatcaattctttgatgagtctaaaaattggtatgagtcccaggcttcctgcatgtctcagaacgcttctctgctgaaagtctactctaaagaagatcaggatctcctgaagctcgtcaagtctgcccattggatggggctcgtccacattcctaccaacggaagctggcaatgggaagatggctccatcctgtctccaaatctgctcacgattattgaaatgcagaaaggggattgtgctctctacgccagctccttcaagggatatattgagaactgtagcacgcccaatacttatatctgtatgcaacggaccgtgggatccggcggcggaggatctggcggaggcggatctgggggcggaggctctttcgaacaagttcagctggttcagagcggagccgaagtgaagaaacctggggcctctgtgaaggtgtcctgcaaggcttccggctataccttcaccagcttttggctgaactgggtccgacaggcccctggacaaggactggaatggatgggcaacatctaccccagcaccagctacaccgtgtacaaccagaaattcaaggaccgcgtgaccatgaccagggacaccagcacaagcacagtgtacatggaactgagcagcctgcggagcgaggataccgccgtgtattattgcgccagaacctggcggggcaacagcttcgattattggggccagggaaccaccgtgaccgtgtcatctacgcgtatccagaaccctgatcctgccgtgtaccagctgcgggatagcaagagcagcgacaagagcgtgtgtctgttcaccgacttcgacagccagaccaacgtgtcccagagcaaggactccgacgtgtacatcaccgataagtgcgtgctggacatgcggagcatggacttcaagagcaactccgccgtggcctggtccaacaagtccgatttcgcctgcgccaacgccttcaacaacagcattatccccgaggacacattcttcccaagccccgagagcagctgcggctttaccagcgagagctaccagcagggcgtgctgagcgccaccatcctgtacgagatcctgctgggcaaggccaccctgtacgccgtgctggtgtctgccctggtgctgatggctatggtcaagcggaaggacagccggggacgcgccaagagaagcggatctggcgtgaagcagaccctgaatttcgacctgctgaagctggctggcgacgtggaatccaacccaggcccttctagaggccatatgaccgagtacaagcccacggtgcgcctcgccacccgcgacgacgtccccagggccgtacgcaccctcgccgccgcgttcgccgactaccccgccacgcgccacaccgtcgatccggaccgccacatcgagcgggtcaccgagctgcaagaactcttcctcacgcgcgtcgggctcgacatcggcaaggtgtgggtcgcggacgacggcgccgcggtggcggtctggaccacgccggagagcgtcgaagcgggggcggtgttcgccgagatcggcccgcgcatggccgagttgagcggttcccggctggccgcgcagcaacagatggaaggcctcctggcgccgcaccggcccaaggagcccgcgtggttcctggccaccgtcggcgtctcgcccgaccaccagggcaagggtctgggcagcgccgtcgtgctccccggagtggaggcggccgagcgcgccggggtgcccgccttcctggagacctccgcgccccgcaacctccccttctacgagcggctcggcttcaccgtcaccgccgacgtcgaggtgcccgaaggaccgcgcacctggtgcatgacccgcaagcccggtgcctga

SEQ ID NO: 37556 - DNA, 1872 bp, synthetic construct
  source 1..1872: mol_type = other DNA
atggccttaccagtgaccgccttgctcctgccgctggccttgctgctccacgccgccaggccggacatcgtgatgacacagagccctgatagcctggccgtgtctctgggagagagagccaccatcaactgcaagagcagccagagcctgctgaacagcggcaaccagaagaactacctggcctggtatcagcagaagcccggccagcctcctaagctgctgatctactggggcagcaccagatccacaggcgtgcccgatagattttctggctctggcagcggcaccgacttcaccctgacaatttctagcctgcaagccgaggacgtggccgtgtactactgccagaacgactacacataccccttcaccttcggccagggcaccaagctggaaatcaaactcgaggacctgaagaacgtgttcccacctgaggtggccgtgttcgagcctagcgaggccgagatcagccacacccagaaagccaccctcgtgtgcctggctaccggcttctaccccgaccatgtggaactgtcttggtgggtcaacggcaaagaggtgcacagcggcgtgtgtaccgacccccagccactgaaagaacagcccgccctgaacgacagccggtactgcctgagcagcagactgagagtgtccgccaccttctggcagaacccccggaaccacttcagatgccaggtgcagttctacggcctgagcgagaacgacgagtggacccaggacagagccaagcccgtgacccagatcgtgtctgccgaagcctggggcagagccgattgcggctttaccagcgagagctaccagcagggcgtgctgagcgccaccaacctgagcgtgatcggcttcagaatcctgctgctgaaagtggccggctttaacctgctgatgaccctgcggctgtggtccagcagggccaagcgatctggatctggagcaacaaacttctcactactcaaacaagcaggtgacgtggaggagaatcccgggcctactagtatggactggatttggcgcatccttttccttgtcggcgctgctaccggcgcgcattccttcgaacaagttcagctggttcagagcggagccgaagtgaagaaacctggggcctctgtgaaggtgtcctgcaaggcttccggctataccttcaccagcttttggctgaactgggtccgacaggcccctggacaaggactggaatggatgggcaacatctaccccagcaccagctacaccgtgtacaaccagaaattcaaggaccgcgtgaccatgaccagggacaccagcacaagcacagtgtacatggaactgagcagcctgcggagcgaggataccgccgtgtattattgcgccagaacctggcggggcaacagcttcgattattggggccagggaaccaccgtgaccgtgtcatctacgcgtatccagaaccctgatcctgccgtgtaccagctgcgggatagcaagagcagcgacaagagcgtgtgtctgttcaccgacttcgacagccagaccaacgtgtcccagagcaaggactccgacgtgtacatcaccgataagtgcgtgctggacatgcggagcatggacttcaagagcaactccgccgtggcctggtccaacaagtccgatttcgcctgcgccaacgccttcaacaacagcattatccccgaggacacattcttcccaagccccgagagcagctgcgacgtgaagctggtggaaaagagcttcgagacagacaccaacctgaacttccagatcctgtacgagatcctgctgggcaaggccaccctgtacgccgtgctggtgtctgccctggtgctgatggctatggtcaagcggaaggacagccgggga

SEQ ID NO: 37557 - DNA, 1884 bp, synthetic construct
  source 1..1884: mol_type = other DNA
atggccttaccagtgaccgccttgctcctgccgctggccttgctgctccacgccgccaggccggacatcgtgatgacacagagccctgatagcctggccgtgtctctgggagagagagccaccatcaactgcaagagcagccagagcctgctgaacagcggcaaccagaagaactacctggcctggtatcagcagaagcccggccagcctcctaagctgctgatctactggggcagcaccagatccacaggcgtgcccgatagattttctggctctggcagcggcaccgacttcaccctgacaatttctagcctgcaagccgaggacgtggccgtgtactactgccagaacgactacacataccccttcaccttcggccagggcaccaagctggaaatcaaactcgagatccagaaccctgatcctgccgtgtaccagctgcgggatagcaagagcagcgacaagagcgtgtgtctgttcaccgacttcgacagccagaccaacgtgtcccagagcaaggactccgacgtgtacatcaccgataagtgcgtgctggacatgcggagcatggacttcaagagcaactccgccgtggcctggtccaacaagtccgatttcgcctgcgccaacgccttcaacaacagcattatccccgaggacacattcttcccaagccccgagagcagctgcgacgtgaagctggtggaaaagagcttcgagacagacaccaacctgaacttccagatcctgtacgagatcctgctgggcaaggccaccctgtacgccgtgctggtgtctgccctggtgctgatggctatggtcaagcggaaggacagccggggacgcgccaagagaagcggatctggcgtgaagcagaccctgaatttcgacctgctgaagctggctggcgacgtggaatccaacccaggccctactagtatggactggatttggcgcatccttttccttgtcggcgctgctaccggcgcgcattccttcgaacaagttcagctggttcagagcggagccgaagtgaagaaacctggggcctctgtgaaggtgtcctgcaaggcttccggctataccttcaccagcttttggctgaactgggtccgacaggcccctggacaaggactggaatggatgggcaacatctaccccagcaccagctacaccgtgtacaaccagaaattcaaggaccgcgtgaccatgaccagggacaccagcacaagcacagtgtacatggaactgagcagcctgcggagcgaggataccgccgtgtattattgcgccagaacctggcggggcaacagcttcgattattggggccagggaaccaccgtgaccgtgtcatctacgcgtgaggacctgaagaacgtgttcccacctgaggtggccgtgttcgagcctagcgaggccgagatcagccacacccagaaagccaccctcgtgtgcctggctaccggcttctaccccgaccatgtggaactgtcttggtgggtcaacggcaaagaggtgcacagcggcgtgtgtaccgacccccagccactgaaagaacagcccgccctgaacgacagccggtactgcctgagcagcagactgagagtgtccgccaccttctggcagaacccccggaaccacttcagatgccaggtgcagttctacggcctgagcgagaacgacgagtggacccaggacagagccaagcccgtgacccagatcgtgtctgccgaagcctggggcagagccgattgcggctttaccagcgagagctaccagcagggcgtgctgagcgccaccaacctgagcgtgatcggcttcagaatcctgctgctgaaagtggccggctttaacctgctgatgaccctgcggctgtggtccagc

SEQ ID NO: 37558 - DNA, 2277 bp, synthetic construct
  source 1..2277: mol_type = other DNA
atggccttaccagtgaccgccttgctcctgccgctggccttgctgctccacgccgccaggccggaagtgcagctggttgaatctggcggaggactggttcagcctggcggatctctgagactgtcttgtgccgccagcggcttcagcttcagcgacttttggatgagctgggtccgacaggcccctggcaaaggacttgaatgggtcgccacaatcagccaggccggcagcgagaaggactacgtggactctgtgaagggcagattcaccatcagccgggacaacgccaagaagtccctgtacctccagatgaacagcctgagagccgaggacaccgccgtgtactattgtgcctctggcgtgtacagcttcgactacagaggccagggcaccctggtcacagtctcttctggtaccggcggaggcggatctggcggcggaggtagcggtggcggaggatctgaattcgacatcgtgatgacacagagccctgatagcctggccgtgtctctgggagagagagccaccatcaactgcaagagcagccagagcctgctgaacagcggcaaccagaagaactacctggcctggtatcagcagaagcccggccagcctcctaagctgctgatctactggggcagcaccagatccacaggcgtgcccgatagattttctggctctggcagcggcaccgacttcaccctgacaatttctagcctgcaagccgaggacgtggccgtgtactactgccagaacgactacacataccccttcaccttcggccagggcaccaagctggaaatcaaactcgaggacctgaagaacgtgttcccacctgaggtggccgtgttcgagcctagcgaggccgagatcagccacacccagaaagccaccctcgtgtgcctggctaccggcttctaccccgaccatgtggaactgtcttggtgggtcaacggcaaagaggtgcacagcggcgtgtgtaccgacccccagccactgaaagaacagcccgccctgaacgacagccggtactgcctgagcagcagactgagagtgtccgccaccttctggcagaacccccggaaccacttcagatgccaggtgcagttctacggcctgagcgagaacgacgagtggacccaggacagagccaagcccgtgacccagatcgtgtctgccgaagcctggggcagagccgattgcggctttaccagcgagagctaccagcagggcgtgctgagcgccaccaacctgagcgtgatcggcttcagaatcctgctgctgaaagtggccggctttaacctgctgatgaccctgcggctgtggtccagcagggccaagcgatctggatctggagcaacaaacttctcactactcaaacaagcaggtgacgtggaggagaatcccgggcctactagtatggactggatttggcgcatccttttccttgtcggcgctgctaccggcgcgcattccttcgaacaagttcagctggttcagagcggagccgaagtgaagaaacctggggcctctgtgaaggtgtcctgcaaggcttccggctataccttcaccagcttttggctgaactgggtccgacaggcccctggacaaggactggaatggatgggcaacatctaccccagcaccagctacaccgtgtacaaccagaaattcaaggaccgcgtgaccatgaccagggacaccagcacaagcacagtgtacatggaactgagcagcctgcggagcgaggataccgccgtgtattattgcgccagaacctggcggggcaacagcttcgattattggggccagggaaccaccgtgaccgtgtcatctacgcgtatccagaaccctgatcctgccgtgtaccagctgcgggatagcaagagcagcgacaagagcgtgtgtctgttcaccgacttcgacagccagaccaacgtgtcccagagcaaggactccgacgtgtacatcaccgataagtgcgtgctggacatgcggagcatggacttcaagagcaactccgccgtggcctggtccaacaagtccgatttcgcctgcgccaacgccttcaacaacagcattatccccgaggacacattcttcccaagccccgagagcagctgcgacgtgaagctggtggaaaagagcttcgagacagacaccaacctgaacttccagatcctgtacgagatcctgctgggcaaggccaccctgtacgccgtgctggtgtctgccctggtgctgatggctatggtcaagcggaaggacagccgggga

SEQ ID NO: 37559 - DNA, 2289 bp, synthetic construct
  source 1..2289: mol_type = other DNA
atggccttaccagtgaccgccttgctcctgccgctggccttgctgctccacgccgccaggccggaagtgcagctggttgaatctggcggaggactggttcagcctggcggatctctgagactgtcttgtgccgccagcggcttcagcttcagcgacttttggatgagctgggtccgacaggcccctggcaaaggacttgaatgggtcgccacaatcagccaggccggcagcgagaaggactacgtggactctgtgaagggcagattcaccatcagccgggacaacgccaagaagtccctgtacctccagatgaacagcctgagagccgaggacaccgccgtgtactattgtgcctctggcgtgtacagcttcgactacagaggccagggcaccctggtcacagtctcttctggtaccggcggaggcggatctggcggcggaggtagcggtggcggaggatctgaattcgacatcgtgatgacacagagccctgatagcctggccgtgtctctgggagagagagccaccatcaactgcaagagcagccagagcctgctgaacagcggcaaccagaagaactacctggcctggtatcagcagaagcccggccagcctcctaagctgctgatctactggggcagcaccagatccacaggcgtgcccgatagattttctggctctggcagcggcaccgacttcaccctgacaatttctagcctgcaagccgaggacgtggccgtgtactactgccagaacgactacacataccccttcaccttcggccagggcaccaagctggaaatcaaactcgagatccagaaccctgatcctgccgtgtaccagctgcgggatagcaagagcagcgacaagagcgtgtgtctgttcaccgacttcgacagccagaccaacgtgtcccagagcaaggactccgacgtgtacatcaccgataagtgcgtgctggacatgcggagcatggacttcaagagcaactccgccgtggcctggtccaacaagtccgatttcgcctgcgccaacgccttcaacaacagcattatccccgaggacacattcttcccaagccccgagagcagctgcgacgtgaagctggtggaaaagagcttcgagacagacaccaacctgaacttccagatcctgtacgagatcctgctgggcaaggccaccctgtacgccgtgctggtgtctgccctggtgctgatggctatggtcaagcggaaggacagccggggacgcgccaagagaagcggatctggcgtgaagcagaccctgaatttcgacctgctgaagctggctggcgacgtggaatccaacccaggccctactagtatggactggatttggcgcatccttttccttgtcggcgctgctaccggcgcgcattccttcgaacaagttcagctggttcagagcggagccgaagtgaagaaacctggggcctctgtgaaggtgtcctgcaaggcttccggctataccttcaccagcttttggctgaactgggtccgacaggcccctggacaaggactggaatggatgggcaacatctaccccagcaccagctacaccgtgtacaaccagaaattcaaggaccgcgtgaccatgaccagggacaccagcacaagcacagtgtacatggaactgagcagcctgcggagcgaggataccgccgtgtattattgcgccagaacctggcggggcaacagcttcgattattggggccagggaaccaccgtgaccgtgtcatctacgcgtgaggacctgaagaacgtgttcccacctgaggtggccgtgttcgagcctagcgaggccgagatcagccacacccagaaagccaccctcgtgtgcctggctaccggcttctaccccgaccatgtggaactgtcttggtgggtcaacggcaaagaggtgcacagcggcgtgtgtaccgacccccagccactgaaagaacagcccgccctgaacgacagccggtactgcctgagcagcagactgagagtgtccgccaccttctggcagaacccccggaaccacttcagatgccaggtgcagttctacggcctgagcgagaacgacgagtggacccaggacagagccaagcccgtgacccagatcgtgtctgccgaagcctggggcagagccgattgcggctttaccagcgagagctaccagcagggcgtgctgagcgccaccaacctgagcgtgatcggcttcagaatcctgctgctgaaagtggccggctttaacctgctgatgaccctgcggctgtggtccagc

SEQ ID NO: 37560 - DNA, 2688 bp, synthetic construct
  source 1..2688: mol_type = other DNA
atggccttaccagtgaccgccttgctcctgccgctggccttgctgctccacgccgccaggccggaagtgcagctggttgaatctggcggaggactggttcagcctggcggatctctgagactgtcttgtgccgccagcggcttcagcttcagcgacttttggatgagctgggtccgacaggcccctggcaaaggacttgaatgggtcgccacaatcagccaggccggcagcgagaaggactacgtggactctgtgaagggcagattcaccatcagccgggacaacgccaagaagtccctgtacctccagatgaacagcctgagagccgaggacaccgccgtgtactattgtgcctctggcgtgtacagcttcgactacagaggccagggcaccctggtcacagtctcttctggtaccggcggaggcggatctggcggcggaggtagcggtggcggaggatctgaattcgacatcgtgatgacacagagccctgatagcctggccgtgtctctgggagagagagccaccatcaactgcaagagcagccagagcctgctgaacagcggcaaccagaagaactacctggcctggtatcagcagaagcccggccagcctcctaagctgctgatctactggggcagcaccagatccacaggcgtgcccgatagattttctggctctggcagcggcaccgacttcaccctgacaatttctagcctgcaagccgaggacgtggccgtgtactactgccagaacgactacacataccccttcaccttcggccagggcaccaagctggaaatcaaactcgaggacctgaagaacgtgttcccacctgaggtggccgtgttcgagcctagcgaggccgagatcagccacacccagaaagccaccctcgtgtgcctggctaccggcttctaccccgaccatgtggaactgtcttggtgggtcaacggcaaagaggtgcacagcggcgtgtgtaccgacccccagccactgaaagaacagcccgccctgaacgacagccggtactgcctgagcagcagactgagagtgtccgccaccttctggcagaacccccggaaccacttcagatgccaggtgcagttctacggcctgagcgagaacgacgagtggacccaggacagagccaagcccgtgacccagatcgtgtctgccgaagcctggggcagagccgattgcggctttaccagcgagagctaccagcagggcgtgctgagcgccaccaacctgagcgtgatcggcttcagaatcctgctgctgaaagtggccggctttaacctgctgatgaccctgcggctgtggtccagcagggccaagcgatctggatctggagcaacaaacttctcactactcaaacaagcaggtgacgtggaggagaatcccgggcctactagtatggactggatttggcgcatccttttccttgtcggcgctgctaccggcgcgcattccgggccccagctccagctgcaagagtctggacctggcctggtcaagcctagcgagacactgagcctgacctgtaccgtgtccggcgatagcatcagcagcggcgattactactggggctggatcagacagcctcctggcaaaggactggaatggatcggccacatctactacagcggcgtgacctactacaaccccagcctgaagtccagagtgaccatcagcgtggacaccagccggaaccagttctccctgaagctgtctagcgtgacagccgccgataccgccgtgtactactgcaccagagaggacagcagcaactggcggagtagaggccagggaacactggtcacagttagctctggatccggcggaggcggaagtggaggcggaggatctggcggcggaggctctttcgaacaagttcagctggttcagagcggagccgaagtgaagaaacctggggcctctgtgaaggtgtcctgcaaggcttccggctataccttcaccagcttttggctgaactgggtccgacaggcccctggacaaggactggaatggatgggcaacatctaccccagcaccagctacaccgtgtacaaccagaaattcaaggaccgcgtgaccatgaccagggacaccagcacaagcacagtgtacatggaactgagcagcctgcggagcgaggataccgccgtgtattattgcgccagaacctggcggggcaacagcttcgattattggggccagggaaccaccgtgaccgtgtcatctacgcgtatccagaaccctgatcctgccgtgtaccagctgcgggatagcaagagcagcgacaagagcgtgtgtctgttcaccgacttcgacagccagaccaacgtgtcccagagcaaggactccgacgtgtacatcaccgataagtgcgtgctggacatgcggagcatggacttcaagagcaactccgccgtggcctggtccaacaagtccgatttcgcctgcgccaacgccttcaacaacagcattatccccgaggacacattcttcccaagccccgagagcagctgcgacgtgaagctggtggaaaagagcttcgagacagacaccaacctgaacttccagatcctgtacgagatcctgctgggcaaggccaccctgtacgccgtgctggtgtctgccctggtgctgatggctatggtcaagcggaaggacagccgggga

SEQ ID NO: 37561 - DNA, 2700 bp, synthetic construct
  source 1..2700: mol_type = other DNA
atggccttaccagtgaccgccttgctcctgccgctggccttgctgctccacgccgccaggccggaagtgcagctggttgaatctggcggaggactggttcagcctggcggatctctgagactgtcttgtgccgccagcggcttcagcttcagcgacttttggatgagctgggtccgacaggcccctggcaaaggacttgaatgggtcgccacaatcagccaggccggcagcgagaaggactacgtggactctgtgaagggcagattcaccatcagccgggacaacgccaagaagtccctgtacctccagatgaacagcctgagagccgaggacaccgccgtgtactattgtgcctctggcgtgtacagcttcgactacagaggccagggcaccctggtcacagtctcttctggtaccggcggaggcggatctggcggcggaggtagcggtggcggaggatctgaattcgacatcgtgatgacacagagccctgatagcctggccgtgtctctgggagagagagccaccatcaactgcaagagcagccagagcctgctgaacagcggcaaccagaagaactacctggcctggtatcagcagaagcccggccagcctcctaagctgctgatctactggggcagcaccagatccacaggcgtgcccgatagattttctggctctggcagcggcaccgacttcaccctgacaatttctagcctgcaagccgaggacgtggccgtgtactactgccagaacgactacacataccccttcaccttcggccagggcaccaagctggaaatcaaactcgagatccagaaccctgatcctgccgtgtaccagctgcgggatagcaagagcagcgacaagagcgtgtgtctgttcaccgacttcgacagccagaccaacgtgtcccagagcaaggactccgacgtgtacatcaccgataagtgcgtgctggacatgcggagcatggacttcaagagcaactccgccgtggcctggtccaacaagtccgatttcgcctgcgccaacgccttcaacaacagcattatccccgaggacacattcttcccaagccccgagagcagctgcgacgtgaagctggtggaaaagagcttcgagacagacaccaacctgaacttccagatcctgtacgagatcctgctgggcaaggccaccctgtacgccgtgctggtgtctgccctggtgctgatggctatggtcaagcggaaggacagccggggacgcgccaagagaagcggatctggcgtgaagcagaccctgaatttcgacctgctgaagctggctggcgacgtggaatccaacccaggccctactagtatggactggatttggcgcatccttttccttgtcggcgctgctaccggcgcgcattccgggccccagctccagctgcaagagtctggacctggcctggtcaagcctagcgagacactgagcctgacctgtaccgtgtccggcgatagcatcagcagcggcgattactactggggctggatcagacagcctcctggcaaaggactggaatggatcggccacatctactacagcggcgtgacctactacaaccccagcctgaagtccagagtgaccatcagcgtggacaccagccggaaccagttctccctgaagctgtctagcgtgacagccgccgataccgccgtgtactactgcaccagagaggacagcagcaactggcggagtagaggccagggaacactggtcacagttagctctggatccggcggaggcggaagtggaggcggaggatctggcggcggaggctctttcgaacaagttcagctggttcagagcggagccgaagtgaagaaacctggggcctctgtgaaggtgtcctgcaaggcttccggctataccttcaccagcttttggctgaactgggtccgacaggcccctggacaaggactggaatggatgggcaacatctaccccagcaccagctacaccgtgtacaaccagaaattcaaggaccgcgtgaccatgaccagggacaccagcacaagcacagtgtacatggaactgagcagcctgcggagcgaggataccgccgtgtattattgcgccagaacctggcggggcaacagcttcgattattggggccagggaaccaccgtgaccgtgtcatctacgcgtgaggacctgaagaacgtgttcccacctgaggtggccgtgttcgagcctagcgaggccgagatcagccacacccagaaagccaccctcgtgtgcctggctaccggcttctaccccgaccatgtggaactgtcttggtgggtcaacggcaaagaggtgcacagcggcgtgtgtaccgacccccagccactgaaagaacagcccgccctgaacgacagccggtactgcctgagcagcagactgagagtgtccgccaccttctggcagaacccccggaaccacttcagatgccaggtgcagttctacggcctgagcgagaacgacgagtggacccaggacagagccaagcccgtgacccagatcgtgtctgccgaagcctggggcagagccgattgcggctttaccagcgagagctaccagcagggcgtgctgagcgccaccaacctgagcgtgatcggcttcagaatcctgctgctgaaagtggccggctttaacctgctgatgaccctgcggctgtggtccagc

SEQ ID NO: 37562 - DNA, 2184 bp, synthetic construct
  source 1..2184: mol_type = other DNA
atggccttaccagtgaccgccttgctcctgccgctggccttgctgctccacgccgccaggccggacatcgtgatgacacagagccctgatagcctggccgtgtctctgggagagagagccaccatcaactgcaagagcagccagagcctgctgaacagcggcaaccagaagaactacctggcctggtatcagcagaagcccggccagcctcctaagctgctgatctactggggcagcaccagatccacaggcgtgcccgatagattttctggctctggcagcggcaccgacttcaccctgacaatttctagcctgcaagccgaggacgtggccgtgtactactgccagaacgactacacataccccttcaccttcggccagggcaccaagctggaaatcaaactcgaggacctgaagaacgtgttcccacctgaggtggccgtgttcgagcctagcgaggccgagatcagccacacccagaaagccaccctcgtgtgcctggctaccggcttctaccccgaccatgtggaactgtcttggtgggtcaacggcaaagaggtgcacagcggcgtgtgtaccgacccccagccactgaaagaacagcccgccctgaacgacagccggtactgcctgagcagcagactgagagtgtccgccaccttctggcagaacccccggaaccacttcagatgccaggtgcagttctacggcctgagcgagaacgacgagtggacccaggacagagccaagcccgtgacccagatcgtgtctgccgaagcctggggcagagccgatgatgtgattaagatccactggcaggaaaagaagtccaacaccatcctgggcagccaggaaggcaacaccatgaagaccaacgacacctacatgaagttcagctggctgaccgtgcccgagaagtccctggacaaagaacacagatgcatcgtgcggcacgaaaacaacaagaacggcgtggaccaggaaatcatcttcccacccatcaagaccgatgtgattacaatggaccccaaggacaactgctccaaggacgccaacgataccctgctgctccagctgaccaacaccagcgcctactacatgtacttgttgctgctgctgaagtccgtggtgtacttcgccatcatcacatgctgcctgctgatggctatggtcaagcggaaggacagccggggaagggccaagcgatctggatctggagcaacaaacttctcactactcaaacaagcaggtgacgtggaggagaatcccgggcctactagtatggactggatttggcgcatccttttccttgtcggcgctgctaccggcgcgcattccttcgaacaagttcagctggttcagagcggagccgaagtgaagaaacctggggcctctgtgaaggtgtcctgcaaggcttccggctataccttcaccagcttttggctgaactgggtccgacaggcccctggacaaggactggaatggatgggcaacatctaccccagcaccagctacaccgtgtacaaccagaaattcaaggaccgcgtgaccatgaccagggacaccagcacaagcacagtgtacatggaactgagcagcctgcggagcgaggataccgccgtgtattattgcgccagaacctggcggggcaacagcttcgattattggggccagggaaccaccgtgaccgtgtcatctacgcgtatccagaaccctgatcctgccgtgtaccagctgcgggatagcaagagcagcgacaagagcgtgtgtctgttcaccgacttcgacagccagaccaacgtgtcccagagcaaggactccgacgtgtacatcaccgataagtgcgtgctggacatgcggagcatggacttcaagagcaactccgccgtggcctggtccaacaagtccgatttcgcctgcgccaacgccttcaacaacagcattatccccgaggacacattcttcccaagccccgagagcagcgactccaccgaccacgtgaagcccaaagagacagagaacaccaagcagcccagcaagagctgccacaagcccaaggccatcgtgcacaccgagaaagtgaacatgatgagcctgaccgtgctgggcctgcggatgctgttcgccaaaaccgtggccgtgaacttcctgctgaccgccaagctgttcttcctcctcaccgcc

SEQ ID NO: 37563 - DNA, 2196 bp, synthetic construct
  source 1..2196: mol_type = other DNA
atggccttaccagtgaccgccttgctcctgccgctggccttgctgctccacgccgccaggccggacatcgtgatgacacagagccctgatagcctggccgtgtctctgggagagagagccaccatcaactgcaagagcagccagagcctgctgaacagcggcaaccagaagaactacctggcctggtatcagcagaagcccggccagcctcctaagctgctgatctactggggcagcaccagatccacaggcgtgcccgatagattttctggctctggcagcggcaccgacttcaccctgacaatttctagcctgcaagccgaggacgtggccgtgtactactgccagaacgactacacataccccttcaccttcggccagggcaccaagctggaaatcaaactcgagatccagaaccctgatcctgccgtgtaccagctgcgggatagcaagagcagcgacaagagcgtgtgtctgttcaccgacttcgacagccagaccaacgtgtcccagagcaaggactccgacgtgtacatcaccgataagtgcgtgctggacatgcggagcatggacttcaagagcaactccgccgtggcctggtccaacaagtccgatttcgcctgcgccaacgccttcaacaacagcattatccccgaggacacattcttcccaagccccgagagcagcgactccaccgaccacgtgaagcccaaagagacagagaacaccaagcagcccagcaagagctgccacaagcccaaggccatcgtgcacaccgagaaagtgaacatgatgagcctgaccgtgctgggcctgcggatgctgttcgccaaaaccgtggccgtgaacttcctgctgaccgccaagctgttcttcctcctcaccgcccgcgccaagagaagcggatctggcgtgaagcagaccctgaatttcgacctgctgaagctggctggcgacgtggaatccaacccaggccctactagtatggactggatttggcgcatccttttccttgtcggcgctgctaccggcgcgcattccttcgaacaagttcagctggttcagagcggagccgaagtgaagaaacctggggcctctgtgaaggtgtcctgcaaggcttccggctataccttcaccagcttttggctgaactgggtccgacaggcccctggacaaggactggaatggatgggcaacatctaccccagcaccagctacaccgtgtacaaccagaaattcaaggaccgcgtgaccatgaccagggacaccagcacaagcacagtgtacatggaactgagcagcctgcggagcgaggataccgccgtgtattattgcgccagaacctggcggggcaacagcttcgattattggggccagggaaccaccgtgaccgtgtcatctacgcgtgaggacctgaagaacgtgttcccacctgaggtggccgtgttcgagcctagcgaggccgagatcagccacacccagaaagccaccctcgtgtgcctggctaccggcttctaccccgaccatgtggaactgtcttggtgggtcaacggcaaagaggtgcacagcggcgtgtgtaccgacccccagccactgaaagaacagcccgccctgaacgacagccggtactgcctgagcagcagactgagagtgtccgccaccttctggcagaacccccggaaccacttcagatgccaggtgcagttctacggcctgagcgagaacgacgagtggacccaggacagagccaagcccgtgacccagatcgtgtctgccgaagcctggggcagagccgatgatgtgattaagatccactggcaggaaaagaagtccaacaccatcctgggcagccaggaaggcaacaccatgaagaccaacgacacctacatgaagttcagctggctgaccgtgcccgagaagtccctggacaaagaacacagatgcatcgtgcggcacgaaaacaacaagaacggcgtggaccaggaaatcatcttcccacccatcaagaccgatgtgattacaatggaccccaaggacaactgctccaaggacgccaacgataccctgctgctccagctgaccaacaccagcgcctactacatgtacttgttgctgctgctgaagtccgtggtgtacttcgccatcatcacatgctgcctgctgatggctatggtcaagcggaaggacagccgggga

SEQ ID NO: 37564 - DNA, 2589 bp, synthetic construct
  source 1..2589: mol_type = other DNA
atggccttaccagtgaccgccttgctcctgccgctggccttgctgctccacgccgccaggccggaagtgcagctggttgaatctggcggaggactggttcagcctggcggatctctgagactgtcttgtgccgccagcggcttcagcttcagcgacttttggatgagctgggtccgacaggcccctggcaaaggacttgaatgggtcgccacaatcagccaggccggcagcgagaaggactacgtggactctgtgaagggcagattcaccatcagccgggacaacgccaagaagtccctgtacctccagatgaacagcctgagagccgaggacaccgccgtgtactattgtgcctctggcgtgtacagcttcgactacagaggccagggcaccctggtcacagtctcttctggtaccggcggaggcggatctggcggcggaggtagcggtggcggaggatctgaattcgacatcgtgatgacacagagccctgatagcctggccgtgtctctgggagagagagccaccatcaactgcaagagcagccagagcctgctgaacagcggcaaccagaagaactacctggcctggtatcagcagaagcccggccagcctcctaagctgctgatctactggggcagcaccagatccacaggcgtgcccgatagattttctggctctggcagcggcaccgacttcaccctgacaatttctagcctgcaagccgaggacgtggccgtgtactactgccagaacgactacacataccccttcaccttcggccagggcaccaagctggaaatcaaactcgaggacctgaagaacgtgttcccacctgaggtggccgtgttcgagcctagcgaggccgagatcagccacacccagaaagccaccctcgtgtgcctggctaccggcttctaccccgaccatgtggaactgtcttggtgggtcaacggcaaagaggtgcacagcggcgtgtgtaccgacccccagccactgaaagaacagcccgccctgaacgacagccggtactgcctgagcagcagactgagagtgtccgccaccttctggcagaacccccggaaccacttcagatgccaggtgcagttctacggcctgagcgagaacgacgagtggacccaggacagagccaagcccgtgacccagatcgtgtctgccgaagcctggggcagagccgatgatgtgattaagatccactggcaggaaaagaagtccaacaccatcctgggcagccaggaaggcaacaccatgaagaccaacgacacctacatgaagttcagctggctgaccgtgcccgagaagtccctggacaaagaacacagatgcatcgtgcggcacgaaaacaacaagaacggcgtggaccaggaaatcatcttcccacccatcaagaccgatgtgattacaatggaccccaaggacaactgctccaaggacgccaacgataccctgctgctccagctgaccaacaccagcgcctactacatgtacttgttgctgctgctgaagtccgtggtgtacttcgccatcatcacatgctgcctgctgatggctatggtcaagcggaaggacagccggggaagggccaagcgatctggatctggagcaacaaacttctcactactcaaacaagcaggtgacgtggaggagaatcccgggcctactagtatggactggatttggcgcatccttttccttgtcggcgctgctaccggcgcgcattccttcgaacaagttcagctggttcagagcggagccgaagtgaagaaacctggggcctctgtgaaggtgtcctgcaaggcttccggctataccttcaccagcttttggctgaactgggtccgacaggcccctggacaaggactggaatggatgggcaacatctaccccagcaccagctacaccgtgtacaaccagaaattcaaggaccgcgtgaccatgaccagggacaccagcacaagcacagtgtacatggaactgagcagcctgcggagcgaggataccgccgtgtattattgcgccagaacctggcggggcaacagcttcgattattggggccagggaaccaccgtgaccgtgtcatctacgcgtatccagaaccctgatcctgccgtgtaccagctgcgggatagcaagagcagcgacaagagcgtgtgtctgttcaccgacttcgacagccagaccaacgtgtcccagagcaaggactccgacgtgtacatcaccgataagtgcgtgctggacatgcggagcatggacttcaagagcaactccgccgtggcctggtccaacaagtccgatttcgcctgcgccaacgccttcaacaacagcattatccccgaggacacattcttcccaagccccgagagcagcgactccaccgaccacgtgaagcccaaagagacagagaacaccaagcagcccagcaagagctgccacaagcccaaggccatcgtgcacaccgagaaagtgaacatgatgagcctgaccgtgctgggcctgcggatgctgttcgccaaaaccgtggccgtgaacttcctgctgaccgccaagctgttcttcctcctcaccgcc

SEQ ID NO: 37565 - DNA, 2601 bp, synthetic construct
  source 1..2601: mol_type = other DNA
atggccttaccagtgaccgccttgctcctgccgctggccttgctgctccacgccgccaggccggaagtgcagctggttgaatctggcggaggactggttcagcctggcggatctctgagactgtcttgtgccgccagcggcttcagcttcagcgacttttggatgagctgggtccgacaggcccctggcaaaggacttgaatgggtcgccacaatcagccaggccggcagcgagaaggactacgtggactctgtgaagggcagattcaccatcagccgggacaacgccaagaagtccctgtacctccagatgaacagcctgagagccgaggacaccgccgtgtactattgtgcctctggcgtgtacagcttcgactacagaggccagggcaccctggtcacagtctcttctggtaccggcggaggcggatctggcggcggaggtagcggtggcggaggatctgaattcgacatcgtgatgacacagagccctgatagcctggccgtgtctctgggagagagagccaccatcaactgcaagagcagccagagcctgctgaacagcggcaaccagaagaactacctggcctggtatcagcagaagcccggccagcctcctaagctgctgatctactggggcagcaccagatccacaggcgtgcccgatagattttctggctctggcagcggcaccgacttcaccctgacaatttctagcctgcaagccgaggacgtggccgtgtactactgccagaacgactacacataccccttcaccttcggccagggcaccaagctggaaatcaaactcgagatccagaaccctgatcctgccgtgtaccagctgcgggatagcaagagcagcgacaagagcgtgtgtctgttcaccgacttcgacagccagaccaacgtgtcccagagcaaggactccgacgtgtacatcaccgataagtgcgtgctggacatgcggagcatggacttcaagagcaactccgccgtggcctggtccaacaagtccgatttcgcctgcgccaacgccttcaacaacagcattatccccgaggacacattcttcccaagccccgagagcagcgactccaccgaccacgtgaagcccaaagagacagagaacaccaagcagcccagcaagagctgccacaagcccaaggccatcgtgcacaccgagaaagtgaacatgatgagcctgaccgtgctgggcctgcggatgctgttcgccaaaaccgtggccgtgaacttcctgctgaccgccaagctgttcttcctcctcaccgcccgcgccaagagaagcggatctggcgtgaagcagaccctgaatttcgacctgctgaagctggctggcgacgtggaatccaacccaggccctactagtatggactggatttggcgcatccttttccttgtcggcgctgctaccggcgcgcattccttcgaacaagttcagctggttcagagcggagccgaagtgaagaaacctggggcctctgtgaaggtgtcctgcaaggcttccggctataccttcaccagcttttggctgaactgggtccgacaggcccctggacaaggactggaatggatgggcaacatctaccccagcaccagctacaccgtgtacaaccagaaattcaaggaccgcgtgaccatgaccagggacaccagcacaagcacagtgtacatggaactgagcagcctgcggagcgaggataccgccgtgtattattgcgccagaacctggcggggcaacagcttcgattattggggccagggaaccaccgtgaccgtgtcatctacgcgtgaggacctgaagaacgtgttcccacctgaggtggccgtgttcgagcctagcgaggccgagatcagccacacccagaaagccaccctcgtgtgcctggctaccggcttctaccccgaccatgtggaactgtcttggtgggtcaacggcaaagaggtgcacagcggcgtgtgtaccgacccccagccactgaaagaacagcccgccctgaacgacagccggtactgcctgagcagcagactgagagtgtccgccaccttctggcagaacccccggaaccacttcagatgccaggtgcagttctacggcctgagcgagaacgacgagtggacccaggacagagccaagcccgtgacccagatcgtgtctgccgaagcctggggcagagccgatgatgtgattaagatccactggcaggaaaagaagtccaacaccatcctgggcagccaggaaggcaacaccatgaagaccaacgacacctacatgaagttcagctggctgaccgtgcccgagaagtccctggacaaagaacacagatgcatcgtgcggcacgaaaacaacaagaacggcgtggaccaggaaatcatcttcccacccatcaagaccgatgtgattacaatggaccccaaggacaactgctccaaggacgccaacgataccctgctgctccagctgaccaacaccagcgcctactacatgtacttgttgctgctgctgaagtccgtggtgtacttcgccatcatcacatgctgcctgctgatggctatggtcaagcggaaggacagccgggga

SEQ ID NO: 37566 - DNA, 3000 bp, synthetic construct
  source 1..3000: mol_type = other DNA
atggccttaccagtgaccgccttgctcctgccgctggccttgctgctccacgccgccaggccggaagtgcagctggttgaatctggcggaggactggttcagcctggcggatctctgagactgtcttgtgccgccagcggcttcagcttcagcgacttttggatgagctgggtccgacaggcccctggcaaaggacttgaatgggtcgccacaatcagccaggccggcagcgagaaggactacgtggactctgtgaagggcagattcaccatcagccgggacaacgccaagaagtccctgtacctccagatgaacagcctgagagccgaggacaccgccgtgtactattgtgcctctggcgtgtacagcttcgactacagaggccagggcaccctggtcacagtctcttctggtaccggcggaggcggatctggcggcggaggtagcggtggcggaggatctgaattcgacatcgtgatgacacagagccctgatagcctggccgtgtctctgggagagagagccaccatcaactgcaagagcagccagagcctgctgaacagcggcaaccagaagaactacctggcctggtatcagcagaagcccggccagcctcctaagctgctgatctactggggcagcaccagatccacaggcgtgcccgatagattttctggctctggcagcggcaccgacttcaccctgacaatttctagcctgcaagccgaggacgtggccgtgtactactgccagaacgactacacataccccttcaccttcggccagggcaccaagctggaaatcaaactcgaggacctgaagaacgtgttcccacctgaggtggccgtgttcgagcctagcgaggccgagatcagccacacccagaaagccaccctcgtgtgcctggctaccggcttctaccccgaccatgtggaactgtcttggtgggtcaacggcaaagaggtgcacagcggcgtgtgtaccgacccccagccactgaaagaacagcccgccctgaacgacagccggtactgcctgagcagcagactgagagtgtccgccaccttctggcagaacccccggaaccacttcagatgccaggtgcagttctacggcctgagcgagaacgacgagtggacccaggacagagccaagcccgtgacccagatcgtgtctgccgaagcctggggcagagccgatgatgtgattaagatccactggcaggaaaagaagtccaacaccatcctgggcagccaggaaggcaacaccatgaagaccaacgacacctacatgaagttcagctggctgaccgtgcccgagaagtccctggacaaagaacacagatgcatcgtgcggcacgaaaacaacaagaacggcgtggaccaggaaatcatcttcccacccatcaagaccgatgtgattacaatggaccccaaggacaactgctccaaggacgccaacgataccctgctgctccagctgaccaacaccagcgcctactacatgtacttgttgctgctgctgaagtccgtggtgtacttcgccatcatcacatgctgcctgctgatggctatggtcaagcggaaggacagccggggaagggccaagcgatctggatctggagcaacaaacttctcactactcaaacaagcaggtgacgtggaggagaatcccgggcctactagtatggactggatttggcgcatccttttccttgtcggcgctgctaccggcgcgcattccgggccccagctccagctgcaagagtctggacctggcctggtcaagcctagcgagacactgagcctgacctgtaccgtgtccggcgatagcatcagcagcggcgattactactggggctggatcagacagcctcctggcaaaggactggaatggatcggccacatctactacagcggcgtgacctactacaaccccagcctgaagtccagagtgaccatcagcgtggacaccagccggaaccagttctccctgaagctgtctagcgtgacagccgccgataccgccgtgtactactgcaccagagaggacagcagcaactggcggagtagaggccagggaacactggtcacagttagctctggatccggcggaggcggaagtggaggcggaggatctggcggcggaggctctttcgaacaagttcagctggttcagagcggagccgaagtgaagaaacctggggcctctgtgaaggtgtcctgcaaggcttccggctataccttcaccagcttttggctgaactgggtccgacaggcccctggacaaggactggaatggatgggcaacatctaccccagcaccagctacaccgtgtacaaccagaaattcaaggaccgcgtgaccatgaccagggacaccagcacaagcacagtgtacatggaactgagcagcctgcggagcgaggataccgccgtgtattattgcgccagaacctggcggggcaacagcttcgattattggggccagggaaccaccgtgaccgtgtcatctacgcgtatccagaaccctgatcctgccgtgtaccagctgcgggatagcaagagcagcgacaagagcgtgtgtctgttcaccgacttcgacagccagaccaacgtgtcccagagcaaggactccgacgtgtacatcaccgataagtgcgtgctggacatgcggagcatggacttcaagagcaactccgccgtggcctggtccaacaagtccgatttcgcctgcgccaacgccttcaacaacagcattatccccgaggacacattcttcccaagccccgagagcagcgactccaccgaccacgtgaagcccaaagagacagagaacaccaagcagcccagcaagagctgccacaagcccaaggccatcgtgcacaccgagaaagtgaacatgatgagcctgaccgtgctgggcctgcggatgctgttcgccaaaaccgtggccgtgaacttcctgctgaccgccaagctgttcttcctcctcaccgcc

SEQ ID NO: 37567 - DNA, 3012 bp, synthetic construct
  source 1..3012: mol_type = other DNA
atggccttaccagtgaccgccttgctcctgccgctggccttgctgctccacgccgccaggccggaagtgcagctggttgaatctggcggaggactggttcagcctggcggatctctgagactgtcttgtgccgccagcggcttcagcttcagcgacttttggatgagctgggtccgacaggcccctggcaaaggacttgaatgggtcgccacaatcagccaggccggcagcgagaaggactacgtggactctgtgaagggcagattcaccatcagccgggacaacgccaagaagtccctgtacctccagatgaacagcctgagagccgaggacaccgccgtgtactattgtgcctctggcgtgtacagcttcgactacagaggccagggcaccctggtcacagtctcttctggtaccggcggaggcggatctggcggcggaggtagcggtggcggaggatctgaattcgacatcgtgatgacacagagccctgatagcctggccgtgtctctgggagagagagccaccatcaactgcaagagcagccagagcctgctgaacagcggcaaccagaagaactacctggcctggtatcagcagaagcccggccagcctcctaagctgctgatctactggggcagcaccagatccacaggcgtgcccgatagattttctggctctggcagcggcaccgacttcaccctgacaatttctagcctgcaagccgaggacgtggccgtgtactactgccagaacgactacacataccccttcaccttcggccagggcaccaagctggaaatcaaactcgagatccagaaccctgatcctgccgtgtaccagctgcgggatagcaagagcagcgacaagagcgtgtgtctgttcaccgacttcgacagccagaccaacgtgtcccagagcaaggactccgacgtgtacatcaccgataagtgcgtgctggacatgcggagcatggacttcaagagcaactccgccgtggcctggtccaacaagtccgatttcgcctgcgccaacgccttcaacaacagcattatccccgaggacacattcttcccaagccccgagagcagcgactccaccgaccacgtgaagcccaaagagacagagaacaccaagcagcccagcaagagctgccacaagcccaaggccatcgtgcacaccgagaaagtgaacatgatgagcctgaccgtgctgggcctgcggatgctgttcgccaaaaccgtggccgtgaacttcctgctgaccgccaagctgttcttcctcctcaccgcccgcgccaagagaagcggatctggcgtgaagcagaccctgaatttcgacctgctgaagctggctggcgacgtggaatccaacccaggccctactagtatggactggatttggcgcatccttttccttgtcggcgctgctaccggcgcgcattccgggccccagctccagctgcaagagtctggacctggcctggtcaagcctagcgagacactgagcctgacctgtaccgtgtccggcgatagcatcagcagcggcgattactactggggctggatcagacagcctcctggcaaaggactggaatggatcggccacatctactacagcggcgtgacctactacaaccccagcctgaagtccagagtgaccatcagcgtggacaccagccggaaccagttctccctgaagctgtctagcgtgacagccgccgataccgccgtgtactactgcaccagagaggacagcagcaactggcggagtagaggccagggaacactggtcacagttagctctggatccggcggaggcggaagtggaggcggaggatctggcggcggaggctctttcgaacaagttcagctggttcagagcggagccgaagtgaagaaacctggggcctctgtgaaggtgtcctgcaaggcttccggctataccttcaccagcttttggctgaactgggtccgacaggcccctggacaaggactggaatggatgggcaacatctaccccagcaccagctacaccgtgtacaaccagaaattcaaggaccgcgtgaccatgaccagggacaccagcacaagcacagtgtacatggaactgagcagcctgcggagcgaggataccgccgtgtattattgcgccagaacctggcggggcaacagcttcgattattggggccagggaaccaccgtgaccgtgtcatctacgcgtgaggacctgaagaacgtgttcccacctgaggtggccgtgttcgagcctagcgaggccgagatcagccacacccagaaagccaccctcgtgtgcctggctaccggcttctaccccgaccatgtggaactgtcttggtgggtcaacggcaaagaggtgcacagcggcgtgtgtaccgacccccagccactgaaagaacagcccgccctgaacgacagccggtactgcctgagcagcagactgagagtgtccgccaccttctggcagaacccccggaaccacttcagatgccaggtgcagttctacggcctgagcgagaacgacgagtggacccaggacagagccaagcccgtgacccagatcgtgtctgccgaagcctggggcagagccgatgatgtgattaagatccactggcaggaaaagaagtccaacaccatcctgggcagccaggaaggcaacaccatgaagaccaacgacacctacatgaagttcagctggctgaccgtgcccgagaagtccctggacaaagaacacagatgcatcgtgcggcacgaaaacaacaagaacggcgtggaccaggaaatcatcttcccacccatcaagaccgatgtgattacaatggaccccaaggacaactgctccaaggacgccaacgataccctgctgctccagctgaccaacaccagcgcctactacatgtacttgttgctgctgctgaagtccgtggtgtacttcgccatcatcacatgctgcctgctgatggctatggtcaagcggaaggacagccgggga

SEQ ID NO: 37568 - DNA, 2178 bp, synthetic construct
  source 1..2178: mol_type = other DNA
atggccttaccagtgaccgccttgctcctgccgctggccttgctgctccacgccgccaggccggacatcgtgatgacacagagccctgatagcctggccgtgtctctgggagagagagccaccatcaactgcaagagcagccagagcctgctgaacagcggcaaccagaagaactacctggcctggtatcagcagaagcccggccagcctcctaagctgctgatctactggggcagcaccagatccacaggcgtgcccgatagattttctggctctggcagcggcaccgacttcaccctgacaatttctagcctgcaagccgaggacgtggccgtgtactactgccagaacgactacacataccccttcaccttcggccagggcaccaagctggaaatcaaactcgaggacctgaagaacgtgttcccacctgaggtggccgtgttcgagcctagcgaggccgagatcagccacacccagaaagccaccctcgtgtgcctggctaccggcttctaccccgaccatgtggaactgtcttggtgggtcaacggcaaagaggtgcacagcggcgtgtgtaccgacccccagccactgaaagaacagcccgccctgaacgacagccggtactgcctgagcagcagactgagagtgtccgccaccttctggcagaacccccggaaccacttcagatgccaggtgcagttctacggcctgagcgagaacgacgagtggacccaggacagagccaagcccgtgacccagatcgtgtctgccgaagcctggggcagagccgatgatgtgattaagatccactggcaggaaaagaagtccaacaccatcctgggcagccaggaaggcaacaccatgaagaccaacgacacctacatgaagttcagctggctgaccgtgcccgagaagtccctggacaaagaacacagatgcatcgtgcggcacgaaaacaacaagaacggcgtggaccaggaaatcatcttcccacccatcaagaccgatgtgattacaatggaccccaaggacaactgctccaaggacgccaacgataccctgctgctccagctgaccaacaccagcgcctactacatgtacttgttgctgctgctgaagtccgtggtgtacttcgccatcatcacatgctgcctgctgcggagaaccgccttctgctgcaacggcgagaagtctagggccaagcgatctggatctggagcaacaaacttctcactactcaaacaagcaggtgacgtggaggagaatcccgggcctactagtatggactggatttggcgcatccttttccttgtcggcgctgctaccggcgcgcattccttcgaacaagttcagctggttcagagcggagccgaagtgaagaaacctggggcctctgtgaaggtgtcctgcaaggcttccggctataccttcaccagcttttggctgaactgggtccgacaggcccctggacaaggactggaatggatgggcaacatctaccccagcaccagctacaccgtgtacaaccagaaattcaaggaccgcgtgaccatgaccagggacaccagcacaagcacagtgtacatggaactgagcagcctgcggagcgaggataccgccgtgtattattgcgccagaacctggcggggcaacagcttcgattattggggccagggaaccaccgtgaccgtgtcatctacgcgtatccagaaccctgatcctgccgtgtaccagctgcgggatagcaagagcagcgacaagagcgtgtgtctgttcaccgacttcgacagccagaccaacgtgtcccagagcaaggactccgacgtgtacatcaccgataagtgcgtgctggacatgcggagcatggacttcaagagcaactccgccgtggcctggtccaacaagtccgatttcgcctgcgccaacgccttcaacaacagcattatccccgaggacacattcttcccaagccccgagagcagcgactccaccgaccacgtgaagcccaaagagacagagaacaccaagcagcccagcaagagctgccacaagcccaaggccatcgtgcacaccgagaaagtgaacatgatgagcctgaccgtgctgggcctgcggatgctgttcgccaaaaccgtggccgtgaacttcctgctgaccgccaagctgttcttcctc

SEQ ID NO: 37569 - DNA, 2190 bp, synthetic construct
  source 1..2190: mol_type = other DNA
atggccttaccagtgaccgccttgctcctgccgctggccttgctgctccacgccgccaggccggacatcgtgatgacacagagccctgatagcctggccgtgtctctgggagagagagccaccatcaactgcaagagcagccagagcctgctgaacagcggcaaccagaagaactacctggcctggtatcagcagaagcccggccagcctcctaagctgctgatctactggggcagcaccagatccacaggcgtgcccgatagattttctggctctggcagcggcaccgacttcaccctgacaatttctagcctgcaagccgaggacgtggccgtgtactactgccagaacgactacacataccccttcaccttcggccagggcaccaagctggaaatcaaactcgagatccagaaccctgatcctgccgtgtaccagctgcgggatagcaagagcagcgacaagagcgtgtgtctgttcaccgacttcgacagccagaccaacgtgtcccagagcaaggactccgacgtgtacatcaccgataagtgcgtgctggacatgcggagcatggacttcaagagcaactccgccgtggcctggtccaacaagtccgatttcgcctgcgccaacgccttcaacaacagcattatccccgaggacacattcttcccaagccccgagagcagcgactccaccgaccacgtgaagcccaaagagacagagaacaccaagcagcccagcaagagctgccacaagcccaaggccatcgtgcacaccgagaaagtgaacatgatgagcctgaccgtgctgggcctgcggatgctgttcgccaaaaccgtggccgtgaacttcctgctgaccgccaagctgttcttcctccgcgccaagagaagcggatctggcgtgaagcagaccctgaatttcgacctgctgaagctggctggcgacgtggaatccaacccaggccctactagtatggactggatttggcgcatccttttccttgtcggcgctgctaccggcgcgcattccttcgaacaagttcagctggttcagagcggagccgaagtgaagaaacctggggcctctgtgaaggtgtcctgcaaggcttccggctataccttcaccagcttttggctgaactgggtccgacaggcccctggacaaggactggaatggatgggcaacatctaccccagcaccagctacaccgtgtacaaccagaaattcaaggaccgcgtgaccatgaccagggacaccagcacaagcacagtgtacatggaactgagcagcctgcggagcgaggataccgccgtgtattattgcgccagaacctggcggggcaacagcttcgattattggggccagggaaccaccgtgaccgtgtcatctacgcgtgaggacctgaagaacgtgttcccacctgaggtggccgtgttcgagcctagcgaggccgagatcagccacacccagaaagccaccctcgtgtgcctggctaccggcttctaccccgaccatgtggaactgtcttggtgggtcaacggcaaagaggtgcacagcggcgtgtgtaccgacccccagccactgaaagaacagcccgccctgaacgacagccggtactgcctgagcagcagactgagagtgtccgccaccttctggcagaacccccggaaccacttcagatgccaggtgcagttctacggcctgagcgagaacgacgagtggacccaggacagagccaagcccgtgacccagatcgtgtctgccgaagcctggggcagagccgatgatgtgattaagatccactggcaggaaaagaagtccaacaccatcctgggcagccaggaaggcaacaccatgaagaccaacgacacctacatgaagttcagctggctgaccgtgcccgagaagtccctggacaaagaacacagatgcatcgtgcggcacgaaaacaacaagaacggcgtggaccaggaaatcatcttcccacccatcaagaccgatgtgattacaatggaccccaaggacaactgctccaaggacgccaacgataccctgctgctccagctgaccaacaccagcgcctactacatgtacttgttgctgctgctgaagtccgtggtgtacttcgccatcatcacatgctgcctgctgcggagaaccgccttctgctgcaacggcgagaagtct

SEQ ID NO: 37570 - DNA, 2583 bp, synthetic construct
  source 1..2583: mol_type = other DNA
atggccttaccagtgaccgccttgctcctgccgctggccttgctgctccacgccgccaggccggaagtgcagctggttgaatctggcggaggactggttcagcctggcggatctctgagactgtcttgtgccgccagcggcttcagcttcagcgacttttggatgagctgggtccgacaggcccctggcaaaggacttgaatgggtcgccacaatcagccaggccggcagcgagaaggactacgtggactctgtgaagggcagattcaccatcagccgggacaacgccaagaagtccctgtacctccagatgaacagcctgagagccgaggacaccgccgtgtactattgtgcctctggcgtgtacagcttcgactacagaggccagggcaccctggtcacagtctcttctggtaccggcggaggcggatctggcggcggaggtagcggtggcggaggatctgaattcgacatcgtgatgacacagagccctgatagcctggccgtgtctctgggagagagagccaccatcaactgcaagagcagccagagcctgctgaacagcggcaaccagaagaactacctggcctggtatcagcagaagcccggccagcctcctaagctgctgatctactggggcagcaccagatccacaggcgtgcccgatagattttctggctctggcagcggcaccgacttcaccctgacaatttctagcctgcaagccgaggacgtggccgtgtactactgccagaacgactacacataccccttcaccttcggccagggcaccaagctggaaatcaaactcgaggacctgaagaacgtgttcccacctgaggtggccgtgttcgagcctagcgaggccgagatcagccacacccagaaagccaccctcgtgtgcctggctaccggcttctaccccgaccatgtggaactgtcttggtgggtcaacggcaaagaggtgcacagcggcgtgtgtaccgacccccagccactgaaagaacagcccgccctgaacgacagccggtactgcctgagcagcagactgagagtgtccgccaccttctggcagaacccccggaaccacttcagatgccaggtgcagttctacggcctgagcgagaacgacgagtggacccaggacagagccaagcccgtgacccagatcgtgtctgccgaagcctggggcagagccgatgatgtgattaagatccactggcaggaaaagaagtccaacaccatcctgggcagccaggaaggcaacaccatgaagaccaacgacacctacatgaagttcagctggctgaccgtgcccgagaagtccctggacaaagaacacagatgcatcgtgcggcacgaaaacaacaagaacggcgtggaccaggaaatcatcttcccacccatcaagaccgatgtgattacaatggaccccaaggacaactgctccaaggacgccaacgataccctgctgctccagctgaccaacaccagcgcctactacatgtacttgttgctgctgctgaagtccgtggtgtacttcgccatcatcacatgctgcctgctgcggagaaccgccttctgctgcaacggcgagaagtctagggccaagcgatctggatctggagcaacaaacttctcactactcaaacaagcaggtgacgtggaggagaatcccgggcctactagtatggactggatttggcgcatccttttccttgtcggcgctgctaccggcgcgcattccttcgaacaagttcagctggttcagagcggagccgaagtgaagaaacctggggcctctgtgaaggtgtcctgcaaggcttccggctataccttcaccagcttttggctgaactgggtccgacaggcccctggacaaggactggaatggatgggcaacatctaccccagcaccagctacaccgtgtacaaccagaaattcaaggaccgcgtgaccatgaccagggacaccagcacaagcacagtgtacatggaactgagcagcctgcggagcgaggataccgccgtgtattattgcgccagaacctggcggggcaacagcttcgattattggggccagggaaccaccgtgaccgtgtcatctacgcgtatccagaaccctgatcctgccgtgtaccagctgcgggatagcaagagcagcgacaagagcgtgtgtctgttcaccgacttcgacagccagaccaacgtgtcccagagcaaggactccgacgtgtacatcaccgataagtgcgtgctggacatgcggagcatggacttcaagagcaactccgccgtggcctggtccaacaagtccgatttcgcctgcgccaacgccttcaacaacagcattatccccgaggacacattcttcccaagccccgagagcagcgactccaccgaccacgtgaagcccaaagagacagagaacaccaagcagcccagcaagagctgccacaagcccaaggccatcgtgcacaccgagaaagtgaacatgatgagcctgaccgtgctgggcctgcggatgctgttcgccaaaaccgtggccgtgaacttcctgctgaccgccaagctgttcttcctc

SEQ ID NO: 37571 - DNA, 2994 bp, synthetic construct
  source 1..2994: mol_type = other DNA
atggccttaccagtgaccgccttgctcctgccgctggccttgctgctccacgccgccaggccggaagtgcagctggttgaatctggcggaggactggttcagcctggcggatctctgagactgtcttgtgccgccagcggcttcagcttcagcgacttttggatgagctgggtccgacaggcccctggcaaaggacttgaatgggtcgccacaatcagccaggccggcagcgagaaggactacgtggactctgtgaagggcagattcaccatcagccgggacaacgccaagaagtccctgtacctccagatgaacagcctgagagccgaggacaccgccgtgtactattgtgcctctggcgtgtacagcttcgactacagaggccagggcaccctggtcacagtctcttctggtaccggcggaggcggatctggcggcggaggtagcggtggcggaggatctgaattcgacatcgtgatgacacagagccctgatagcctggccgtgtctctgggagagagagccaccatcaactgcaagagcagccagagcctgctgaacagcggcaaccagaagaactacctggcctggtatcagcagaagcccggccagcctcctaagctgctgatctactggggcagcaccagatccacaggcgtgcccgatagattttctggctctggcagcggcaccgacttcaccctgacaatttctagcctgcaagccgaggacgtggccgtgtactactgccagaacgactacacataccccttcaccttcggccagggcaccaagctggaaatcaaactcgaggacctgaagaacgtgttcccacctgaggtggccgtgttcgagcctagcgaggccgagatcagccacacccagaaagccaccctcgtgtgcctggctaccggcttctaccccgaccatgtggaactgtcttggtgggtcaacggcaaagaggtgcacagcggcgtgtgtaccgacccccagccactgaaagaacagcccgccctgaacgacagccggtactgcctgagcagcagactgagagtgtccgccaccttctggcagaacccccggaaccacttcagatgccaggtgcagttctacggcctgagcgagaacgacgagtggacccaggacagagccaagcccgtgacccagatcgtgtctgccgaagcctggggcagagccgatgatgtgattaagatccactggcaggaaaagaagtccaacaccatcctgggcagccaggaaggcaacaccatgaagaccaacgacacctacatgaagttcagctggctgaccgtgcccgagaagtccctggacaaagaacacagatgcatcgtgcggcacgaaaacaacaagaacggcgtggaccaggaaatcatcttcccacccatcaagaccgatgtgattacaatggaccccaaggacaactgctccaaggacgccaacgataccctgctgctccagctgaccaacaccagcgcctactacatgtacttgttgctgctgctgaagtccgtggtgtacttcgccatcatcacatgctgcctgctgcggagaaccgccttctgctgcaacggcgagaagtctagggccaagcgatctggatctggagcaacaaacttctcactactcaaacaagcaggtgacgtggaggagaatcccgggcctactagtatggactggatttggcgcatccttttccttgtcggcgctgctaccggcgcgcattccgggccccagctccagctgcaagagtctggacctggcctggtcaagcctagcgagacactgagcctgacctgtaccgtgtccggcgatagcatcagcagcggcgattactactggggctggatcagacagcctcctggcaaaggactggaatggatcggccacatctactacagcggcgtgacctactacaaccccagcctgaagtccagagtgaccatcagcgtggacaccagccggaaccagttctccctgaagctgtctagcgtgacagccgccgataccgccgtgtactactgcaccagagaggacagcagcaactggcggagtagaggccagggaacactggtcacagttagctctggatccggcggaggcggaagtggaggcggaggatctggcggcggaggctctttcgaacaagttcagctggttcagagcggagccgaagtgaagaaacctggggcctctgtgaaggtgtcctgcaaggcttccggctataccttcaccagcttttggctgaactgggtccgacaggcccctggacaaggactggaatggatgggcaacatctaccccagcaccagctacaccgtgtacaaccagaaattcaaggaccgcgtgaccatgaccagggacaccagcacaagcacagtgtacatggaactgagcagcctgcggagcgaggataccgccgtgtattattgcgccagaacctggcggggcaacagcttcgattattggggccagggaaccaccgtgaccgtgtcatctacgcgtatccagaaccctgatcctgccgtgtaccagctgcgggatagcaagagcagcgacaagagcgtgtgtctgttcaccgacttcgacagccagaccaacgtgtcccagagcaaggactccgacgtgtacatcaccgataagtgcgtgctggacatgcggagcatggacttcaagagcaactccgccgtggcctggtccaacaagtccgatttcgcctgcgccaacgccttcaacaacagcattatccccgaggacacattcttcccaagccccgagagcagcgactccaccgaccacgtgaagcccaaagagacagagaacaccaagcagcccagcaagagctgccacaagcccaaggccatcgtgcacaccgagaaagtgaacatgatgagcctgaccgtgctgggcctgcggatgctgttcgccaaaaccgtggccgtgaacttcctgctgaccgccaagctgttcttcctc

SEQ ID NO: 37572 - DNA, 1872 bp, synthetic construct
  source 1..1872: mol_type = other DNA
atggccttaccagtgaccgccttgctcctgccgctggccttgctgctccacgccgccaggccggacatcgtgatgacacagagccctgatagcctggccgtgtctctgggagagagagccaccatcaactgcaagagcagccagagcctgctgaacagcggcaaccagaagaactacctggcctggtatcagcagaagcccggccagcctcctaagctgctgatctactggggcagcaccagatccacaggcgtgcccgatagattttctggctctggcagcggcaccgacttcaccctgacaatttctagcctgcaagccgaggacgtggccgtgtactactgccagaacgactacacataccccttcaccttcggccagggcaccaagctggaaatcaaactcgaggacctgaagaacgtgttcccacctgaggtggccgtgttcgagcctagcgaggccgagatcagccacacccagaaagccaccctcgtgtgcctggctaccggcttctaccccgaccatgtggaactgtcttggtgggtcaacggcaaagaggtgcacagcggcgtgtctaccgacccccagccactgaaagaacagcccgccctgaacgacagccggtactgcctgagcagcagactgagagtgtccgccaccttctggcagaacccccggaaccacttcagatgccaggtgcagttctacggcctgagcgagaacgacgagtggacccaggacagagccaagcccgtgacccagatcgtgtctgccgaagcctggggcagagccgattgcgacgtgaagctggtggaaaagagcttcgagacagacaccaacctgaacttccagaacctgagcgtgatcggcttcagaatcctgctgctgaaagtggccggctttaacctgctgatgaccctgcggctgtggtccagcagggccaagcgatctggatctggagcaacaaacttctcactactcaaacaagcaggtgacgtggaggagaatcccgggcctactagtatggactggatttggcgcatccttttccttgtcggcgctgctaccggcgcgcattccttcgaacaagttcagctggttcagagcggagccgaagtgaagaaacctggggcctctgtgaaggtgtcctgcaaggcttccggctataccttcaccagcttttggctgaactgggtccgacaggcccctggacaaggactggaatggatgggcaacatctaccccagcaccagctacaccgtgtacaaccagaaattcaaggaccgcgtgaccatgaccagggacaccagcacaagcacagtgtacatggaactgagcagcctgcggagcgaggataccgccgtgtattattgcgccagaacctggcggggcaacagcttcgattattggggccagggaaccaccgtgaccgtgtcatctacgcgtatccagaaccctgatcctgccgtgtaccagctgcgggatagcaagagcagcgacaagagcgtgtgtctgttcaccgacttcgacagccagaccaacgtgtcccagagcaaggactccgacgtgtacatcaccgataagaccgtgctggacatgcggagcatggacttcaagagcaactccgccgtggcctggtccaacaagtccgatttcgcctgcgccaacgccttcaacaacagcattatccccgaggacacattcttcccaagccccgagagcagctgcggctttaccagcgagagctaccagcagggcgtgctgagcgccaccatcctgtacgagatcctgctgggcaaggccaccctgtacgccgtgctggtgtctgccctggtgctgatggctatggtcaagcggaaggacagccgggga

SEQ ID NO: 37573 - DNA, 1872 bp, synthetic construct
  source 1..1872: mol_type = other DNA
atggccttaccagtgaccgccttgctcctgccgctggccttgctgctccacgccgccaggccggacatcgtgatgacacagagccctgatagcctggccgtgtctctgggagagagagccaccatcaactgcaagagcagccagagcctgctgaacagcggcaaccagaagaactacctggcctggtatcagcagaagcccggccagcctcctaagctgctgatctactggggcagcaccagatccacaggcgtgcccgatagattttctggctctggcagcggcaccgacttcaccctgacaatttctagcctgcaagccgaggacgtggccgtgtactactgccagaacgactacacataccccttcaccttcggccagggcaccaagctggaaatcaaactcgaggacctgaagaacgtgttcccacctgaggtggccgtgttcgagcctagcgaggccgagatcagccacacccagaaagccaccctcgtgtgcctggctaccggcttctaccccgaccatgtggaactgtcttggtgggtcaacggcaaagaggtgcacagcggcgtgtctaccgacccccagccactgaaagaacagcccgccctgaacgacagccggtactgcctgagcagcagactgagagtgtccgccaccttctggcagaacccccggaaccacttcagatgccaggtgcagttctacggcctgagcgagaacgacgagtggacccaggacagagccaagcccgtgacccagatcgtgtctgccgaagcctggggcagagccgattgcggctttaccagcgagagctaccagcagggcgtgctgagcgccaccaacctgagcgtgatcggcttcagaatcctgctgctgaaagtggccggctttaacctgctgatgaccctgcggctgtggtccagcagggccaagcgatctggatctggagcaacaaacttctcactactcaaacaagcaggtgacgtggaggagaatcccgggcctactagtatggactggatttggcgcatccttttccttgtcggcgctgctaccggcgcgcattccttcgaacaagttcagctggttcagagcggagccgaagtgaagaaacctggggcctctgtgaaggtgtcctgcaaggcttccggctataccttcaccagcttttggctgaactgggtccgacaggcccctggacaaggactggaatggatgggcaacatctaccccagcaccagctacaccgtgtacaaccagaaattcaaggaccgcgtgaccatgaccagggacaccagcacaagcacagtgtacatggaactgagcagcctgcggagcgaggataccgccgtgtattattgcgccagaacctggcggggcaacagcttcgattattggggccagggaaccaccgtgaccgtgtcatctacgcgtatccagaaccctgatcctgccgtgtaccagctgcgggatagcaagagcagcgacaagagcgtgtgtctgttcaccgacttcgacagccagaccaacgtgtcccagagcaaggactccgacgtgtacatcaccgataagaccgtgctggacatgcggagcatggacttcaagagcaactccgccgtggcctggtccaacaagtccgatttcgcctgcgccaacgccttcaacaacagcattatccccgaggacacattcttcccaagccccgagagcagctgcgacgtgaagctggtggaaaagagcttcgagacagacaccaacctgaacttccagatcctgtacgagatcctgctgggcaaggccaccctgtacgccgtgctggtgtctgccctggtgctgatggctatggtcaagcggaaggacagccgggga

SEQ ID NO: 37574 - DNA, 2184 bp, synthetic construct
  source 1..2184: mol_type = other DNA
atggccttaccagtgaccgccttgctcctgccgctggccttgctgctccacgccgccaggccggacatcgtgatgacacagagccctgatagcctggccgtgtctctgggagagagagccaccatcaactgcaagagcagccagagcctgctgaacagcggcaaccagaagaactacctggcctggtatcagcagaagcccggccagcctcctaagctgctgatctactggggcagcaccagatccacaggcgtgcccgatagattttctggctctggcagcggcaccgacttcaccctgacaatttctagcctgcaagccgaggacgtggccgtgtactactgccagaacgactacacataccccttcaccttcggccagggcaccaagctggaaatcaaactcgaggacctgaagaacgtgttcccacctgaggtggccgtgttcgagcctagcgaggccgagatcagccacacccagaaagccaccctcgtgtgcctggctaccggcttctaccccgaccatgtggaactgtcttggtgggtcaacggcaaagaggtgcacagcggcgtgtctaccgacccccagccactgaaagaacagcccgccctgaacgacagccggtactgcctgagcagcagactgagagtgtccgccaccttctggcagaacccccggaaccacttcagatgccaggtgcagttctacggcctgagcgagaacgacgagtggacccaggacagagccaagcccgtgacccagatcgtgtctgccgaagcctggggcagagccgatgatgtgattaagatccactggcaggaaaagaagtccaacaccatcctgggcagccaggaaggcaacaccatgaagaccaacgacacctacatgaagttcagctggctgaccgtgcccgagaagtccctggacaaagaacacagatgcatcgtgcggcacgaaaacaacaagaacggcgtggaccaggaaatcatcttcccacccatcaagaccgatgtgattacaatggaccccaaggacaactgctccaaggacgccaacgataccctgctgctccagctgaccaacaccagcgcctactacatgtacttgttgctgctgctgaagtccgtggtgtacttcgccatcatcacatgctgcctgctgatggctatggtcaagcggaaggacagccggggaagggccaagcgatctggatctggagcaacaaacttctcactactcaaacaagcaggtgacgtggaggagaatcccgggcctactagtatggactggatttggcgcatccttttccttgtcggcgctgctaccggcgcgcattccttcgaacaagttcagctggttcagagcggagccgaagtgaagaaacctggggcctctgtgaaggtgtcctgcaaggcttccggctataccttcaccagcttttggctgaactgggtccgacaggcccctggacaaggactggaatggatgggcaacatctaccccagcaccagctacaccgtgtacaaccagaaattcaaggaccgcgtgaccatgaccagggacaccagcacaagcacagtgtacatggaactgagcagcctgcggagcgaggataccgccgtgtattattgcgccagaacctggcggggcaacagcttcgattattggggccagggaaccaccgtgaccgtgtcatctacgcgtatccagaaccctgatcctgccgtgtaccagctgcgggatagcaagagcagcgacaagagcgtgtgtctgttcaccgacttcgacagccagaccaacgtgtcccagagcaaggactccgacgtgtacatcaccgataagaccgtgctggacatgcggagcatggacttcaagagcaactccgccgtggcctggtccaacaagtccgatttcgcctgcgccaacgccttcaacaacagcattatccccgaggacacattcttcccaagccccgagagcagcgactccaccgaccacgtgaagcccaaagagacagagaacaccaagcagcccagcaagagctgccacaagcccaaggccatcgtgcacaccgagaaagtgaacatgatgagcctgaccgtgctgggcctgcggatgctgttcgccaaaaccgtggccgtgaacttcctgctgaccgccaagctgttcttcctcctcaccgcc

SEQ ID NO: 37575 - DNA, 2178 bp, synthetic construct
  source 1..2178: mol_type = other DNA
atggccttaccagtgaccgccttgctcctgccgctggccttgctgctccacgccgccaggccggacatcgtgatgacacagagccctgatagcctggccgtgtctctgggagagagagccaccatcaactgcaagagcagccagagcctgctgaacagcggcaaccagaagaactacctggcctggtatcagcagaagcccggccagcctcctaagctgctgatctactggggcagcaccagatccacaggcgtgcccgatagattttctggctctggcagcggcaccgacttcaccctgacaatttctagcctgcaagccgaggacgtggccgtgtactactgccagaacgactacacataccccttcaccttcggccagggcaccaagctggaaatcaaactcgaggacctgaagaacgtgttcccacctgaggtggccgtgttcgagcctagcgaggccgagatcagccacacccagaaagccaccctcgtgtgcctggctaccggcttctaccccgaccatgtggaactgtcttggtgggtcaacggcaaagaggtgcacagcggcgtgtctaccgacccccagccactgaaagaacagcccgccctgaacgacagccggtactgcctgagcagcagactgagagtgtccgccaccttctggcagaacccccggaaccacttcagatgccaggtgcagttctacggcctgagcgagaacgacgagtggacccaggacagagccaagcccgtgacccagatcgtgtctgccgaagcctggggcagagccgatgatgtgattaagatccactggcaggaaaagaagtccaacaccatcctgggcagccaggaaggcaacaccatgaagaccaacgacacctacatgaagttcagctggctgaccgtgcccgagaagtccctggacaaagaacacagatgcatcgtgcggcacgaaaacaacaagaacggcgtggaccaggaaatcatcttcccacccatcaagaccgatgtgattacaatggaccccaaggacaactgctccaaggacgccaacgataccctgctgctccagctgaccaacaccagcgcctactacatgtacttgttgctgctgctgaagtccgtggtgtacttcgccatcatcacatgctgcctgctgcggagaaccgccttctgctgcaacggcgagaagtctagggccaagcgatctggatctggagcaacaaacttctcactactcaaacaagcaggtgacgtggaggagaatcccgggcctactagtatggactggatttggcgcatccttttccttgtcggcgctgctaccggcgcgcattccttcgaacaagttcagctggttcagagcggagccgaagtgaagaaacctggggcctctgtgaaggtgtcctgcaaggcttccggctataccttcaccagcttttggctgaactgggtccgacaggcccctggacaaggactggaatggatgggcaacatctaccccagcaccagctacaccgtgtacaaccagaaattcaaggaccgcgtgaccatgaccagggacaccagcacaagcacagtgtacatggaactgagcagcctgcggagcgaggataccgccgtgtattattgcgccagaacctggcggggcaacagcttcgattattggggccagggaaccaccgtgaccgtgtcatctacgcgtatccagaaccctgatcctgccgtgtaccagctgcgggatagcaagagcagcgacaagagcgtgtgtctgttcaccgacttcgacagccagaccaacgtgtcccagagcaaggactccgacgtgtacatcaccgataagaccgtgctggacatgcggagcatggacttcaagagcaactccgccgtggcctggtccaacaagtccgatttcgcctgcgccaacgccttcaacaacagcattatccccgaggacacattcttcccaagccccgagagcagcgactccaccgaccacgtgaagcccaaagagacagagaacaccaagcagcccagcaagagctgccacaagcccaaggccatcgtgcacaccgagaaagtgaacatgatgagcctgaccgtgctgggcctgcggatgctgttcgccaaaaccgtggccgtgaacttcctgctgaccgccaagctgttcttcctc

SEQ ID NO: 37576 - DNA, 2610 bp, synthetic construct
  source 1..2610: mol_type = other DNA
atggccttaccagtgaccgccttgctcctgccgctggccttgctgctccacgccgccaggccgctcgaggaggacctgaagaacgtgttcccacctgaggtggccgtgttcgagcctagcgaggccgagatcagccacacccagaaagccaccctcgtgtgcctggctaccggcttctaccccgaccatgtggaactgtcttggtgggtcaacggcaaagaggtgcacagcggcgtgtgtaccgacccccagccactgaaagaacagcccgccctgaacgacagccggtactgcctgagcagcagactgagagtgtccgccaccttctggcagaacccccggaaccacttcagatgccaggtgcagttctacggcctgagcgagaacgacgagtggacccaggacagagccaagcccgtgacccagatcgtgtctgccgaagcctggggcagagccgattgcggctttaccagcgagagctaccagcagggcgtgctgagcgccaccaacctgagcgtgatcggcttcagaatcctgctgctgaaagtggccggctttaacctgctgatgaccctgcggctgtggtccagcagggccaagcgatctggatctggagcaacaaacttctcactactcaaacaagcaggtgacgtggaggagaatcccgggcctactagcatggccttaccagtgaccgccttgctcctgccgctggccttgctgctccacgccgccaggccggacatcgtgatgacacagagccctgatagcctggccgtgtctctgggagagagagccaccatcaactgcaagagcagccagagcctgctgaacagcggcaaccagaagaactacctggcctggtatcagcagaagcccggccagcctcctaagctgctgatctactggggcagcaccagatccacaggcgtgcccgatagattttctggctctggcagcggcaccgacttcaccctgacaatttctagcctgcaagccgaggacgtggccgtgtactactgccagaacgactacacataccccttcaccttcggccagggcaccaagctggaaatcaaaggcggaggcggaagtggaggcggaggatctggcggcggaggctctcaagttcagctggttcagagcggagccgaagtgaagaaacctggggcctctgtgaaggtgtcctgcaaggcttccggctataccttcaccagcttttggctgaactgggtccgacaggcccctggacaaggactggaatggatgggcaacatctaccccagcaccagctacaccgtgtacaaccagaaattcaaggaccgcgtgaccatgaccagggacaccagcacaagcacagtgtacatggaactgagcagcctgcggagcgaggataccgccgtgtattattgcgccagaacctggcggggcaacagcttcgattattggggccagggaaccaccgtgaccgtgtcatctacgcgtatccagaaccctgatcctgccgtgtaccagctgcgggatagcaagagcagcgacaagagcgtgtgtctgttcaccgacttcgacagccagaccaacgtgtcccagagcaaggactccgacgtgtacatcaccgataagtgcgtgctggacatgcggagcatggacttcaagagcaactccgccgtggcctggtccaacaagtccgatttcgcctgcgccaacgccttcaacaacagcattatccccgaggacacattcttcccaagccccgagagcagctgcgacgtgaagctggtggaaaagagcttcgagacagacaccaacctgaacttccagatcctgtacgaggtgatcggcttcagaatcctgctgctgaaagtggccggctttaacctgctgatgaccctgcggctgtggtccagccgcgccaagagaagcggatctggcgtgaagcagaccctgaatttcgacctgctgaagctggctggcgacgtggaatccaacccaggcccttctagaggccatatgaccgagtacaagcccacggtgcgcctcgccacccgcgacgacgtccccagggccgtacgcaccctcgccgccgcgttcgccgactaccccgccacgcgccacaccgtcgatccggaccgccacatcgagcgggtcaccgagctgcaagaactcttcctcacgcgcgtcgggctcgacatcggcaaggtgtgggtcgcggacgacggcgccgcggtggcggtctggaccacgccggagagcgtcgaagcgggggcggtgttcgccgagatcggcccgcgcatggccgagttgagcggttcccggctggccgcgcagcaacagatggaaggcctcctggcgccgcaccggcccaaggagcccgcgtggttcctggccaccgtcggcgtctcgcccgaccaccagggcaagggtctgggcagcgccgtcgtgctccccggagtggaggcggccgagcgcgccggggtgcccgccttcctggagacctccgcgccccgcaacctccccttctacgagcggctcggcttcaccgtcaccgccgacgtcgaggtgcccgaaggaccgcgcacctggtgcatgacccgcaagcccggtgcctga

SEQ ID NO: 37577 - DNA, 2610 bp, synthetic construct
  source 1..2610: mol_type = other DNA
atggccttaccagtgaccgccttgctcctgccgctggccttgctgctccacgccgccaggccgctcgagatccagaaccctgatcctgccgtgtaccagctgcgggatagcaagagcagcgacaagagcgtgtgtctgttcaccgacttcgacagccagaccaacgtgtcccagagcaaggactccgacgtgtacatcaccgataagtgcgtgctggacatgcggagcatggacttcaagagcaactccgccgtggcctggtccaacaagtccgatttcgcctgcgccaacgccttcaacaacagcattatccccgaggacacattcttcccaagccccgagagcagctgcgacgtgaagctggtggaaaagagcttcgagacagacaccaacctgaacttccagatcctgtacgaggtgatcggcttcagaatcctgctgctgaaagtggccggctttaacctgctgatgaccctgcggctgtggtccagcagggccaagcgatctggatctggagcaacaaacttctcactactcaaacaagcaggtgacgtggaggagaatcccgggcctactagcatggccttaccagtgaccgccttgctcctgccgctggccttgctgctccacgccgccaggccggacatcgtgatgacacagagccctgatagcctggccgtgtctctgggagagagagccaccatcaactgcaagagcagccagagcctgctgaacagcggcaaccagaagaactacctggcctggtatcagcagaagcccggccagcctcctaagctgctgatctactggggcagcaccagatccacaggcgtgcccgatagattttctggctctggcagcggcaccgacttcaccctgacaatttctagcctgcaagccgaggacgtggccgtgtactactgccagaacgactacacataccccttcaccttcggccagggcaccaagctggaaatcaaaggcggaggcggaagtggaggcggaggatctggcggcggaggctctcaagttcagctggttcagagcggagccgaagtgaagaaacctggggcctctgtgaaggtgtcctgcaaggcttccggctataccttcaccagcttttggctgaactgggtccgacaggcccctggacaaggactggaatggatgggcaacatctaccccagcaccagctacaccgtgtacaaccagaaattcaaggaccgcgtgaccatgaccagggacaccagcacaagcacagtgtacatggaactgagcagcctgcggagcgaggataccgccgtgtattattgcgccagaacctggcggggcaacagcttcgattattggggccagggaaccaccgtgaccgtgtcatctacgcgtgaggacctgaagaacgtgttcccacctgaggtggccgtgttcgagcctagcgaggccgagatcagccacacccagaaagccaccctcgtgtgcctggctaccggcttctaccccgaccatgtggaactgtcttggtgggtcaacggcaaagaggtgcacagcggcgtgtgtaccgacccccagccactgaaagaacagcccgccctgaacgacagccggtactgcctgagcagcagactgagagtgtccgccaccttctggcagaacccccggaaccacttcagatgccaggtgcagttctacggcctgagcgagaacgacgagtggacccaggacagagccaagcccgtgacccagatcgtgtctgccgaagcctggggcagagccgattgcggctttaccagcgagagctaccagcagggcgtgctgagcgccaccaacctgagcgtgatcggcttcagaatcctgctgctgaaagtggccggctttaacctgctgatgaccctgcggctgtggtccagccgcgccaagagaagcggatctggcgtgaagcagaccctgaatttcgacctgctgaagctggctggcgacgtggaatccaacccaggcccttctagaggccatatgaccgagtacaagcccacggtgcgcctcgccacccgcgacgacgtccccagggccgtacgcaccctcgccgccgcgttcgccgactaccccgccacgcgccacaccgtcgatccggaccgccacatcgagcgggtcaccgagctgcaagaactcttcctcacgcgcgtcgggctcgacatcggcaaggtgtgggtcgcggacgacggcgccgcggtggcggtctggaccacgccggagagcgtcgaagcgggggcggtgttcgccgagatcggcccgcgcatggccgagttgagcggttcccggctggccgcgcagcaacagatggaaggcctcctggcgccgcaccggcccaaggagcccgcgtggttcctggccaccgtcggcgtctcgcccgaccaccagggcaagggtctgggcagcgccgtcgtgctccccggagtggaggcggccgagcgcgccggggtgcccgccttcctggagacctccgcgccccgcaacctccccttctacgagcggctcggcttcaccgtcaccgccgacgtcgaggtgcccgaaggaccgcgcacctggtgcatgacccgcaagcccggtgcctga

SEQ ID NO: 37578 - DNA, 2610 bp, synthetic construct; identical to SEQ ID NO: 37576
  source 1..2610: mol_type = other DNA

SEQ ID NO: 37579 - DNA, 2934 bp, synthetic construct
  source 1..2934: mol_type = other DNA
atggccttaccagtgaccgccttgctcctgccgctggccttgctgctccacgccgccaggccgctcgaggaggacctgaagaacgtgttcccacctgaggtggccgtgttcgagcctagcgaggccgagatcagccacacccagaaagccaccctcgtgtgcctggctaccggcttctaccccgaccatgtggaactgtcttggtgggtcaacggcaaagaggtgcacagcggcgtgtctaccgacccccagccactgaaagaacagcccgccctgaacgacagccggtactgcctgagcagcagactgagagtgtccgccaccttctggcagaacccccggaaccacttcagatgccaggtgcagttctacggcctgagcgagaacgacgagtggacccaggacagagccaagcccgtgacccagatcgtgtctgccgaagcctggggcagagccgatgatgtgattaagatccactggcaggaaaagaagtccaacaccatcctgggcagccaggaaggcaacaccatgaagaccaacgacacctacatgaagttcagctggctgaccgtgcccgagaagtccctggacaaagaacacagatgcatcgtgcggcacgaaaacaacaagaacggcgtggaccaggaaatcatcttcccacccatcaagaccgatgtgattacaatggaccccaaggacaactgctccaaggacgccaacgataccctgctgctccagctgaccaacaccagcgcctactacatgtacttgttgctgctgctgaagtccgtggtgtacttcgccatcatcacatgctgcctgctgatggctatggtcaagcggaaggacagccggggaagggccaagcgatctggatctggagcaacaaacttctcactactcaaacaagcaggtgacgtggaggagaatcccgggcctactagcatggccttaccagtgaccgccttgctcctgccgctggccttgctgctccacgccgccaggccggacatcgtgatgacacagagccctgatagcctggccgtgtctctgggagagagagccaccatcaactgcaagagcagccagagcctgctgaacagcggcaaccagaagaactacctggcctggtatcagcagaagcccggccagcctcctaagctgctgatctactggggcagcaccagatccacaggcgtgcccgatagattttctggctctggcagcggcaccgacttcaccctgacaatttctagcctgcaagccgaggacgtggccgtgtactactgccagaacgactacacataccccttcaccttcggccagggcaccaagctggaaatcaaaggcggaggcggaagtggaggcggaggatctggcggcggaggctctcaagttcagctggttcagagcggagccgaagtgaagaaacctggggcctctgtgaaggtgtcctgcaaggcttccggctataccttcaccagcttttggctgaactgggtccgacaggcccctggacaaggactggaatggatgggcaacatctaccccagcaccagctacaccgtgtacaaccagaaattcaaggaccgcgtgaccatgaccagggacaccagcacaagcacagtgtacatggaactgagcagcctgcggagcgaggataccgccgtgtattattgcgccagaacctggcggggcaacagcttcgattattggggccagggaaccaccgtgaccgtgtcatctacgcgtatccagaaccctgatcctgccgtgtaccagctgcgggatagcaagagcagcgacaagagcgtgtgtctgttcaccgacttcgacagccagaccaacgtgtcccagagcaaggactccgacgtgtacatcaccgataagaccgtgctggacatgcggagcatggacttcaagagcaactccgccgtggcctggtccaacaagtccgatttcgcctgcgccaacgccttcaacaacagcattatccccgaggacacattcttcccaagccccgagagcagcgactccaccgaccacgtgaagcccaaagagacagagaacaccaagcagcccagcaagagctgccacaagcccaaggccatcgtgcacaccgagaaagtgaacatgatgagcctgaccgtgctgggcctgcggatgctgttcgccaaaaccgtggccgtgaacttcctgctgaccgccaagctgttcttcctcctcaccgcccgcgccaagagaagcggatctggcgtgaagcagaccctgaatttcgacctgctgaagctggctggcgacgtggaatccaacccaggcccttctagaggccatatgaccgagtacaagcccacggtgcgcctcgccacccgcgacgacgtccccagggccgtacgcaccctcgccgccgcgttcgccgactaccccgccacgcgccacaccgtcgatccggaccgccacatcgagcgggtcaccgagctgcaagaactcttcctcacgcgcgtcgggctcgacatcggcaaggtgtgggtcgcggacgacggcgccgcggtggcggtctggaccacgccggagagcgtcgaagcgggggcggtgttcgccgagatcggcccgcgcatggccgagttgagcggttcccggctggccgcgcagcaacagatggaaggcctcctggcgccgcaccggcccaaggagcccgcgtggttcctggccaccgtcggcgtctcgcccgaccaccagggcaagggtctgggcagcgccgtcgtgctccccggagtggaggcggccgagcgcgccggggtgcccgccttcctggagacctccgcgccccgcaacctccccttctacgagcggctcggcttcaccgtcaccgccgacgtcgaggtgcccgaaggaccgcgcacctggtgcatgacccgcaagcccggtgcctga

SEQ ID NO: 37580 - DNA, 2934 bp, synthetic construct
  source 1..2934: mol_type = other DNA
atggccttaccagtgaccgccttgctcctgccgctggccttgctgctccacgccgccaggccgctcgagatccagaaccctgatcctgccgtgtaccagctgcgggatagcaagagcagcgacaagagcgtgtgtctgttcaccgacttcgacagccagaccaacgtgtcccagagcaaggactccgacgtgtacatcaccgataagaccgtgctggacatgcggagcatggacttcaagagcaactccgccgtggcctggtccaacaagtccgatttcgcctgcgccaacgccttcaacaacagcattatccccgaggacacattcttcccaagccccgagagcagcgactccaccgaccacgtgaagcccaaagagacagagaacaccaagcagcccagcaagagctgccacaagcccaaggccatcgtgcacaccgagaaagtgaacatgatgagcctgaccgtgctgggcctgcggatgctgttcgccaaaaccgtggccgtgaacttcctgctgaccgccaagctgttcttcctcctcaccgccagggccaagcgatctggatctggagcaacaaacttctcactactcaaacaagcaggtgacgtggaggagaatcccgggcctactagcatggccttaccagtgaccgccttgctcctgccgctggccttgctgctccacgccgccaggccggacatcgtgatgacacagagccctgatagcctggccgtgtctctgggagagagagccaccatcaactgcaagagcagccagagcctgctgaacagcggcaaccagaagaactacctggcctggtatcagcagaagcccggccagcctcctaagctgctgatctactggggcagcaccagatccacaggcgtgcccgatagattttctggctctggcagcggcaccgacttcaccctgacaatttctagcctgcaagccgaggacgtggccgtgtactactgccagaacgactacacataccccttcaccttcggccagggcaccaagctggaaatcaaaggcggaggcggaagtggaggcggaggatctggcggcggaggctctcaagttcagctggttcagagcggagccgaagtgaagaaacctggggcctctgtgaaggtgtcctgcaaggcttccggctataccttcaccagcttttggctgaactgggtccgacaggcccctggacaaggactggaatggatgggcaacatctaccccagcaccagctacaccgtgtacaaccagaaattcaaggaccgcgtgaccatgaccagggacaccagcacaagcacagtgtacatggaactgagcagcctgcggagcgaggataccgccgtgtattattgcgccagaacctggcggggcaacagcttcgattattggggccagggaaccaccgtgaccgtgtcatctacgcgtgaggacctgaagaacgtgttcccacctgaggtggccgtgttcgagcctagcgaggccgagatcagccacacccagaaagccaccctcgtgtgcctggctaccggcttctaccccgaccatgtggaactgtcttggtgggtcaacggcaaagaggtgcacagcggcgtgtctaccgacccccagccactgaaagaacagcccgccctgaacgacagccggtactgcctgagcagcagactgagagtgtccgccaccttctggcagaacccccggaaccacttcagatgccaggtgcagttctacggcctgagcgagaacgacgagtggacccaggacagagccaagcccgtgacccagatcgtgtctgccgaagcctggggcagagccgatgatgtgattaagatccactggcaggaaaagaagtccaacaccatcctgggcagccaggaaggcaacaccatgaagaccaacgacacctacatgaagttcagctggctgaccgtgcccgagaagtccctggacaaagaacacagatgcatcgtgcggcacgaaaacaacaagaacggcgtggaccaggaaatcatcttcccacccatcaagaccgatgtgattacaatggaccccaaggacaactgctccaaggacgccaacgataccctgctgctccagctgaccaacaccagcgcctactacatgtacttgttgctgctgctgaagtccgtggtgtacttcgccatcatcacatgctgcctgctgatggctatggtcaagcggaaggacagccggggacgcgccaagagaagcggatctggcgtgaagcagaccctgaatttcgacctgctgaagctggctggcgacgtggaatccaacccaggcccttctagaggccatatgaccgagtacaagcccacggtgcgcctcgccacccgcgacgacgtccccagggccgtacgcaccctcgccgccgcgttcgccgactaccccgccacgcgccacaccgtcgatccggaccgccacatcgagcgggtcaccgagctgcaagaactcttcctcacgcgcgtcgggctcgacatcggcaaggtgtgggtcgcggacgacggcgccgcggtggcggtctggaccacgccggagagcgtcgaagcgggggcggtgttcgccgagatcggcccgcgcatggccgagttgagcggttcccggctggccgcgcagcaacagatggaaggcctcctggcgccgcaccggcccaaggagcccgcgtggttcctggccaccgtcggcgtctcgcccgaccaccagggcaagggtctgggcagcgccgtcgtgctccccggagtggaggcggccgagcgcgccggggtgcccgccttcctggagacctccgcgccccgcaacctccccttctacgagcggctcggcttcaccgtcaccgccgacgtcgaggtgcccgaaggaccgcgcacctggtgcatgacccgcaagcccggtgcctga

SEQ ID NO: 37581 - DNA, 2928 bp, synthetic construct
  source 1..2928: mol_type = other DNA
atggccttaccagtgaccgccttgctcctgccgctggccttgctgctccacgccgccaggccgctcgaggaggacctgaagaacgtgttcccacctgaggtggccgtgttcgagcctagcgaggccgagatcagccacacccagaaagccaccctcgtgtgcctggctaccggcttctaccccgaccatgtggaactgtcttggtgggtcaacggcaaagaggtgcacagcggcgtgtgtaccgacccccagccactgaaagaacagcccgccctgaacgacagccggtactgcctgagcagcagactgagagtgtccgccaccttctggcagaacccccggaaccacttcagatgccaggtgcagttctacggcctgagcgagaacgacgagtggacccaggacagagccaagcccgtgacccagatcgtgtctgccgaagcctggggcagagccgatgatgtgattaagatccactggcaggaaaagaagtccaacaccatcctgggcagccaggaaggcaacaccatgaagaccaacgacacctacatgaagttcagctggctgaccgtgcccgagaagtccctggacaaagaacacagatgcatcgtgcggcacgaaaacaacaagaacggcgtggaccaggaaatcatcttcccacccatcaagaccgatgtgattacaatggaccccaaggacaactgctccaaggacgccaacgataccctgctgctccagctgaccaacaccagcgcctactacatgtacttgttgctgctgctgaagtccgtggtgtacttcgccatcatcacatgctgcctgctgcggagaaccgccttctgctgcaacggcgagaagtctagggccaagcgatctggatctggagcaacaaacttctcactactcaaacaagcaggtgacgtggaggagaatcccgggcctactagcatggccttaccagtgaccgccttgctcctgccgctggccttgctgctccacgccgccaggccggacatcgtgatgacacagagccctgatagcctggccgtgtctctgggagagagagccaccatcaactgcaagagcagccagagcctgctgaacagcggcaaccagaagaactacctggcctggtatcagcagaagcccggccagcctcctaagctgctgatctactggggcagcaccagatccacaggcgtgcccgatagattttctggctctggcagcggcaccgacttcaccctgacaatttctagcctgcaagccgaggacgtggccgtgtactactgccagaacgactacacataccccttcaccttcggccagggcaccaagctggaaatcaaaggcggaggcggaagtggaggcggaggatctggcggcggaggctctcaagttcagctggttcagagcggagccgaagtgaagaaacctggggcctctgtgaaggtgtcctgcaaggcttccggctataccttcaccagcttttggctgaactgggtccgacaggcccctggacaaggactggaatggatgggcaacatctaccccagcaccagctacaccgtgtacaaccagaaattcaaggaccgcgtgaccatgaccagggacaccagcacaagcacagtgtacatggaactgagcagcctgcggagcgaggataccgccgtgtattattgcgccagaacctggcggggcaacagcttcgattattggggccagggaaccaccgtgaccgtgtcatctacgcgtatccagaaccctgatcctgccgtgtaccagctgcgggatagcaagagcagcgacaagagcgtgtgtctgttcaccgacttcgacagccagaccaacgtgtcccagagcaaggactccgacgtgtacatcaccgataagtgcgtgctggacatgcggagcatggacttcaagagcaactccgccgtggcctggtccaacaagtccgatttcgcctgcgccaacgccttcaacaacagcattatccccgaggacacattcttcccaagccccgagagcagcgactccaccgaccacgtgaagcccaaagagacagagaacaccaagcagcccagcaagagctgccacaagcccaaggccatcgtgcacaccgagaaagtgaacatgatgagcctgaccgtgctgggcctgcggatgctgttcgccaaaaccgtggccgtgaacttcctgctgaccgccaagctgttcttcctccgcgccaagagaagcggatctggcgtgaagcagaccctgaatttcgacctgctgaagctggctggcgacgtggaatccaacccaggcccttctagaggccatatgaccgagtacaagcccacggtgcgcctcgccacccgcgacgacgtccccagggccgtacgcaccctcgccgccgcgttcgccgactaccccgccacgcgccacaccgtcgatccggaccgccacatcgagcgggtcaccgagctgcaagaactcttcctcacgcgcgtcgggctcgacatcggcaaggtgtgggtcgcggacgacggcgccgcggtggcggtctggaccacgccggagagcgtcgaagcgggggcggtgttcgccgagatcggcccgcgcatggccgagttgagcggttcccggctggccgcgcagcaacagatggaaggcctcctggcgccgcaccggcccaaggagcccgcgtggttcctggccaccgtcggcgtctcgcccgaccaccagggcaagggtctgggcagcgccgtcgtgctccccggagtggaggcggccgagcgcgccggggtgcccgccttcctggagacctccgcgccccgcaacctccccttctacgagcggctcggcttcaccgtcaccgccgacgtcgaggtgcccgaaggaccgcgcacctggtgcatgacccgcaagcccggtgcctga

SEQ ID NO: 37582 - DNA, 2928 bp, synthetic construct
  source 1..2928: mol_type = other DNA
atggccttaccagtgaccgccttgctcctgccgctggccttgctgctccacgccgccaggccgctcgagatccagaaccctgatcctgccgtgtaccagctgcgggatagcaagagcagcgacaagagcgtgtgtctgttcaccgacttcgacagccagaccaacgtgtcccagagcaaggactccgacgtgtacatcaccgataagtgcgtgctggacatgcggagcatggacttcaagagcaactccgccgtggcctggtccaacaagtccgatttcgcctgcgccaacgccttcaacaacagcattatccccgaggacacattcttcccaagccccgagagcagcgactccaccgaccacgtgaagcccaaagagacagagaacaccaagcagcccagcaagagctgccacaagcccaaggccatcgtgcacaccgagaaagtgaacatgatgagcctgaccgtgctgggcctgcggatgctgttcgccaaaaccgtggccgtgaacttcctgctgaccgccaagctgttcttcctcagggccaagcgatctggatctggagcaacaaacttctcactactcaaacaagcaggtgacgtggaggagaatcccgggcctactagcatggccttaccagtgaccgccttgctcctgccgctggccttgctgctccacgccgccaggccggacatcgtgatgacacagagccctgatagcctggccgtgtctctgggagagagagccaccatcaactgcaagagcagccagagcctgctgaacagcggcaaccagaagaactacctggcctggtatcagcagaagcccggccagcctcctaagctgctgatctactggggcagcaccagatccacaggcgtgcccgatagattttctggctctggcagcggcaccgacttcaccctgacaatttctagcctgcaagccgaggacgtggccgtgtactactgccagaacgactacacataccccttcaccttcggccagggcaccaagctggaaatcaaaggcggaggcggaagtggaggcggaggatctggcggcggaggctctcaagttcagctggttcagagcggagccgaagtgaagaaacctggggcctctgtgaaggtgtcctgcaaggcttccggctataccttcaccagcttttggctgaactgggtccgacaggcccctggacaaggactggaatggatgggcaacatctaccccagcaccagctacaccgtgtacaaccagaaattcaaggaccgcgtgaccatgaccagggacaccagcacaagcacagtgtacatggaactgagcagcctgcggagcgaggataccgccgtgtattattgcgccagaacctggcggggcaacagcttcgattattggggccagggaaccaccgtgaccgtgtcatctacgcgtgaggacctgaagaacgtgttcccacctgaggtggccgtgttcgagcctagcgaggccgagatcagccacacccagaaagccaccctcgtgtgcctggctaccggcttctaccccgaccatgtggaactgtcttggtgggtcaacggcaaagaggtgcacagcggcgtgtgtaccgacccccagccactgaaagaacagcccgccctgaacgacagccggtactgcctgagcagcagactgagagtgtccgccaccttctggcagaacccccggaaccacttcagatgccaggtgcagttctacggcctgagcgagaacgacgagtggacccaggacagagccaagcccgtgacccagatcgtgtctgccgaagcctggggcagagccgatgatgtgattaagatccactggcaggaaaagaagtccaacaccatcctgggcagccaggaaggcaacaccatgaagaccaacgacacctacatgaagttcagctggctgaccgtgcccgagaagtccctggacaaagaacacagatgcatcgtgcggcacgaaaacaacaagaacggcgtggaccaggaaatcatcttcccacccatcaagaccgatgtgattacaatggaccccaaggacaactgctccaaggacgccaacgataccctgctgctccagctgaccaacaccagcgcctactacatgtacttgttgctgctgctgaagtccgtggtgtacttcgccatcatcacatgctgcctgctgcggagaaccgccttctgctgcaacggcgagaagtctcgcgccaagagaagcggatctggcgtgaagcagaccctgaatttcgacctgctgaagctggctggcgacgtggaatccaacccaggcccttctagaggccatatgaccgagtacaagcccacggtgcgcctcgccacccgcgacgacgtccccagggccgtacgcaccctcgccgccgcgttcgccgactaccccgccacgcgccacaccgtcgatccggaccgccacatcgagcgggtcaccgagctgcaagaactcttcctcacgcgcgtcgggctcgacatcggcaaggtgtgggtcgcggacgacggcgccgcggtggcggtctggaccacgccggagagcgtcgaagcgggggcggtgttcgccgagatcggcccgcgcatggccgagttgagcggttcccggctggccgcgcagcaacagatggaaggcctcctggcgccgcaccggcccaaggagcccgcgtggttcctggccaccgtcggcgtctcgcccgaccaccagggcaagggtctgggcagcgccgtcgtgctccccggagtggaggcggccgagcgcgccggggtgcccgccttcctggagacctccgcgccccgcaacctccccttctacgagcggctcggcttcaccgtcaccgccgacgtcgaggtgcccgaaggaccgcgcacctggtgcatgacccgcaagcccggtgcctga

SEQ ID NO: 37583 - DNA, 2928 bp, synthetic construct
  source 1..2928: mol_type = other DNA
atggccttaccagtgaccgccttgctcctgccgctggccttgctgctccacgccgccaggccgctcgaggaggacctgaagaacgtgttcccacctgaggtggccgtgttcgagcctagcgaggccgagatcagccacacccagaaagccaccctcgtgtgcctggctaccggcttctaccccgaccatgtggaactgtcttggtgggtcaacggcaaagaggtgcacagcggcgtgtctaccgacccccagccactgaaagaacagcccgccctgaacgacagccggtactgcctgagcagcagactgagagtgtccgccaccttctggcagaacccccggaaccacttcagatgccaggtgcagttctacggcctgagcgagaacgacgagtggacccaggacagagccaagcccgtgacccagatcgtgtctgccgaagcctggggcagagccgatgatgtgattaagatccactggcaggaaaagaagtccaacaccatcctgggcagccaggaaggcaacaccatgaagaccaacgacacctacatgaagttcagctggctgaccgtgcccgagaagtccctggacaaagaacacagatgcatcgtgcggcacgaaaacaacaagaacggcgtggaccaggaaatcatcttcccacccatcaagaccgatgtgattacaatggaccccaaggacaactgctccaaggacgccaacgataccctgctgctccagctgaccaacaccagcgcctactacatgtacttgttgctgctgctgaagtccgtggtgtacttcgccatcatcacatgctgcctgctgcggagaaccgccttctgctgcaacggcgagaagtctagggccaagcgatctggatctggagcaacaaacttctcactactcaaacaagcaggtgacgtggaggagaatcccgggcctactagcatggccttaccagtgaccgccttgctcctgccgctggccttgctgctccacgccgccaggccggacatcgtgatgacacagagccctgatagcctggccgtgtctctgggagagagagccaccatcaactgcaagagcagccagagcctgctgaacagcggcaaccagaagaactacctggcctggtatcagcagaagcccggccagcctcctaagctgctgatctactggggcagcaccagatccacaggcgtgcccgatagattttctggctctggcagcggcaccgacttcaccctgacaatttctagcctgcaagccgaggacgtggccgtgtactactgccagaacgactacacataccccttcaccttcggccagggcaccaagctggaaatcaaaggcggaggcggaagtggaggcggaggatctggcggcggaggctctcaagttcagctggttcagagcggagccgaagtgaagaaacctggggcctctgtgaaggtgtcctgcaaggcttccggctataccttcaccagcttttggctgaactgggtccgacaggcccctggacaaggactggaatggatgggcaacatctaccccagcaccagctacaccgtgtacaaccagaaattcaaggaccgcgtgaccatgaccagggacaccagcacaagcacagtgtacatggaactgagcagcctgcggagcgaggataccgccgtgtattattgcgccagaacctggcggggcaacagcttcgattattggggccagggaaccaccgtgaccgtgtcatctacgcgtatccagaaccctgatcctgccgtgtaccagctgcgggatagcaagagcagcgacaagagcgtgtgtctgttcaccgacttcgacagccagaccaacgtgtcccagagcaaggactccgacgtgtacatcaccgataagaccgtgctggacatgcggagcatggacttcaagagcaactccgccgtggcctggtccaacaagtccgatttcgcctgcgccaacgccttcaacaacagcattatccccgaggacacattcttcccaagccccgagagcagcgactccaccgaccacgtgaagcccaaagagacagagaacaccaagcagcccagcaagagctgccacaagcccaaggccatcgtgcacaccgagaaagtgaacatgatgagcctgaccgtgctgggcctgcggatgctgttcgccaaaaccgtggccgtgaacttcctgctgaccgccaagctgttcttcctccgcgccaagagaagcggatctggcgtgaagcagaccctgaatttcgacctgctgaagctggctggcgacgtggaatccaacccaggcccttctagaggccatatgaccgagtacaagcccacggtgcgcctcgccacccgcgacgacgtccccagggccgtacgcaccctcgccgccgcgttcgccgactaccccgccacgcgccacaccgtcgatccggaccgccacatcgagcgggtcaccgagctgcaagaactcttcctcacgcgcgtcgggctcgacatcggcaaggtgtgggtcgcggacgacggcgccgcggtggcggtctggaccacgccggagagcgtcgaagcgggggcggtgttcgccgagatcggcccgcgcatggccgagttgagcggttcccggctggccgcgcagcaacagatggaaggcctcctggcgccgcaccggcccaaggagcccgcgtggttcctggccaccgtcggcgtctcgcccgaccaccagggcaagggtctgggcagcgccgtcgtgctccccggagtggaggcggccgagcgcgccggggtgcccgccttcctggagacctccgcgccccgcaacctccccttctacgagcggctcggcttcaccgtcaccgccgacgtcgaggtgcccgaaggaccgcgcacctggtgcatgacccgcaagcccggtgcctga

SEQ ID NO: 37584 - DNA, 2928 bp, synthetic construct
  source 1..2928: mol_type = other DNA
atggccttaccagtgaccgccttgctcctgccgctggccttgctgctccacgccgccaggccgctcgagatccagaaccctgatcctgccgtgtaccagctgcgggatagcaagagcagcgacaagagcgtgtgtctgttcaccgacttcgacagccagaccaacgtgtcccagagcaaggactccgacgtgtacatcaccgataagaccgtgctggacatgcggagcatggacttcaagagcaactccgccgtggcctggtccaacaagtccgatttcgcctgcgccaacgccttcaacaacagcattatccccgaggacacattcttcccaagccccgagagcagcgactccaccgaccacgtgaagcccaaagagacagagaacaccaagcagcccagcaagagctgccacaagcccaaggccatcgtgcacaccgagaaagtgaacatgatgagcctgaccgtgctgggcctgcggatgctgttcgccaaaaccgtggccgtgaacttcctgctgaccgccaagctgttcttcctcagggccaagcgatctggatctggagcaacaaacttctcactactcaaacaagcaggtgacgtggaggagaatcccgggcctactagcatggccttaccagtgaccgccttgctcctgccgctggccttgctgctccacgccgccaggccggacatcgtgatgacacagagccctgatagcctggccgtgtctctgggagagagagccaccatcaactgcaagagcagccagagcctgctgaacagcggcaaccagaagaactacctggcctggtatcagcagaagcccggccagcctcctaagctgctgatctactggggcagcaccagatccacaggcgtgcccgatagattttctggctctggcagcggcaccgacttcaccctgacaatttctagcctgcaagccgaggacgtggccgtgtactactgccagaacgactacacataccccttcaccttcggccagggcaccaagctggaaatcaaaggcggaggcggaagtggaggcggaggatctggcggcggaggctctcaagttcagctggttcagagcggagccgaagtgaagaaacctggggcctctgtgaaggtgtcctgcaaggcttccggctataccttcaccagcttttggctgaactgggtccgacaggcccctggacaaggactggaatggatgggcaacatctaccccagcaccagctacaccgtgtacaaccagaaattcaaggaccgcgtgaccatgaccagggacaccagcacaagcacagtgtacatggaactgagcagcctgcggagcgaggataccgccgtgtattattgcgccagaacctggcggggcaacagcttcgattattggggccagggaaccaccgtgaccgtgtcatctacgcgtgaggacctgaagaacgtgttcccacctgaggtggccgtgttcgagcctagcgaggccgagatcagccacacccagaaagccaccctcgtgtgcctggctaccggcttctaccccgaccatgtggaactgtcttggtgggtcaacggcaaagaggtgcacagcggcgtgtctaccgacccccagccactgaaagaacagcccgccctgaacgacagccggtactgcctgagcagcagactgagagtgtccgccaccttctggcagaacccccggaaccacttcagatgccaggtgcagttctacggcctgagcgagaacgacgagtggacccaggacagagccaagcccgtgacccagatcgtgtctgccgaagcctggggcagagccgatgatgtgattaagatccactggcaggaaaagaagtccaacaccatcctgggcagccaggaaggcaacaccatgaagaccaacgacacctacatgaagttcagctggctgaccgtgcccgagaagtccctggacaaagaacacagatgcatcgtgcggcacgaaaacaacaagaacggcgtggaccaggaaatcatcttcccacccatcaagaccgatgtgattacaatggaccccaaggacaactgctccaaggacgccaacgataccctgctgctccagctgaccaacaccagcgcctactacatgtacttgttgctgctgctgaagtccgtggtgtacttcgccatcatcacatgctgcctgctgcggagaaccgccttctgctgcaacggcgagaagtctcgcgccaagagaagcggatctggcgtgaagcagaccctgaatttcgacctgctgaagctggctggcgacgtggaatccaacccaggcccttctagaggccatatgaccgagtacaagcccacggtgcgcctcgccacccgcgacgacgtccccagggccgtacgcaccctcgccgccgcgttcgccgactaccccgccacgcgccacaccgtcgatccggaccgccacatcgagcgggtcaccgagctgcaagaactcttcctcacgcgcgtcgggctcgacatcggcaaggtgtgggtcgcggacgacggcgccgcggtggcggtctggaccacgccggagagcgtcgaagcgggggcggtgttcgccgagatcggcccgcgcatggccgagttgagcggttcccggctggccgcgcagcaacagatggaaggcctcctggcgccgcaccggcccaaggagcccgcgtggttcctggccaccgtcggcgtctcgcccgaccaccagggcaagggtctgggcagcgccgtcgtgctccccggagtggaggcggccgagcgcgccggggtgcccgccttcctggagacctccgcgccccgcaacctccccttctacgagcggctcggcttcaccgtcaccgccgacgtcgaggtgcccgaaggaccgcgcacctggtgcatgacccgcaagcccggtgcctga

SEQ ID NO: 37585 - DNA, 2622 bp, synthetic construct
  source 1..2622: mol_type = other DNA
atggccttaccagtgaccgccttgctcctgccgctggccttgctgctccacgccgccaggccgctcgaggaggacctgaagaacgtgttcccacctgaggtggccgtgttcgagcctagcaaggccgagatcgcccacacccagaaagccaccctcgtgtgcctggctaccggcttctaccccgaccatgtggaactgtcttggtgggtcaacggcaaagaggtgcacagcggcgtgtgtaccgacccccagccactgaaagaacagcccgccctgaacgacagccggtactgcctgagcagcagactgagagtgtccgccaccttctggcagaacccccggaaccacttcagatgccaggtgcagttctacggcctgagcgagaacgacgagtggacccaggacagagccaagcccgtgacccagatcgtgtctgccgaagcctggggcagagccgattgcggcatcaccagcgccagctaccaccagggcgtgctgagcgccaccatcctgtacgagatcctgctgggcaaggccaccctgtacgccgtgctggtgtctgccctggtgctgatggctatggtcaagcggaaggacagccggggaagggccaagcgatctggatctggagcaacaaacttctcactactcaaacaagcaggtgacgtggaggagaatcccgggcctactagcatggccttaccagtgaccgccttgctcctgccgctggccttgctgctccacgccgccaggccggacatcgtgatgacacagagccctgatagcctggccgtgtctctgggagagagagccaccatcaactgcaagagcagccagagcctgctgaacagcggcaaccagaagaactacctggcctggtatcagcagaagcccggccagcctcctaagctgctgatctactggggcagcaccagatccacaggcgtgcccgatagattttctggctctggcagcggcaccgacttcaccctgacaatttctagcctgcaagccgaggacgtggccgtgtactactgccagaacgactacacataccccttcaccttcggccagggcaccaagctggaaatcaaaggcggaggcggaagtggaggcggaggatctggcggcggaggctctcaagttcagctggttcagagcggagccgaagtgaagaaacctggggcctctgtgaaggtgtcctgcaaggcttccggctataccttcaccagcttttggctgaactgggtccgacaggcccctggacaaggactggaatggatgggcaacatctaccccagcaccagctacaccgtgtacaaccagaaattcaaggaccgcgtgaccatgaccagggacaccagcacaagcacagtgtacatggaactgagcagcctgcggagcgaggataccgccgtgtattattgcgccagaacctggcggggcaacagcttcgattattggggccagggaaccaccgtgaccgtgtcatctacgcgtatccagaaccctgatcctgccgtgtaccagctgcgggatagcaagagcagcgacaagagcgtgtgtctgttcaccgacttcgacagccagaccaacgtgtcccagagcaaggactccgacgtgtacatcaccgataagtgcgtgctggacatgcggagcatggacttcaagagcaactccgccgtggcctggtccaacaagtccgatttcgcctgcgccaacgccttcaacaacagcattatccccgaggacacattcttcccaagcagcgacgtgccctgcgacgtgaagctggtggaaaagagcttcgagacagacaccaacctgaacttccagaacctgagcgtgatcggcttcagaatcctgctgctgaaagtggccggctttaacctgctgatgaccctgcggctgtggtccagccgcgccaagagaagcggatctggcgtgaagcagaccctgaatttcgacctgctgaagctggctggcgacgtggaatccaacccaggcccttctagaggccatatgaccgagtacaagcccacggtgcgcctcgccacccgcgacgacgtccccagggccgtacgcaccctcgccgccgcgttcgccgactaccccgccacgcgccacaccgtcgatccggaccgccacatcgagcgggtcaccgagctgcaagaactcttcctcacgcgcgtcgggctcgacatcggcaaggtgtgggtcgcggacgacggcgccgcggtggcggtctggaccacgccggagagcgtcgaagcgggggcggtgttcgccgagatcggcccgcgcatggccgagttgagcggttcccggctggccgcgcagcaacagatggaaggcctcctggcgccgcaccggcccaaggagcccgcgtggttcctggccaccgtcggcgtctcgcccgaccaccagggcaagggtctgggcagcgccgtcgtgctccccggagtggaggcggccgagcgcgccggggtgcccgccttcctggagacctccgcgccccgcaacctccccttctacgagcggctcggcttcaccgtcaccgccgacgtcgaggtgcccgaaggaccgcgcacctggtgcatgacccgcaagcccggtgcctga

SEQ ID NO: 37586 - DNA, 2622 bp, synthetic construct
  source 1..2622: mol_type = other DNA
atggccttaccagtgaccgccttgctcctgccgctggccttgctgctccacgccgccaggccgctcgagatccagaaccctgatcctgccgtgtaccagctgcgggatagcaagagcagcgacaagagcgtgtgtctgttcaccgacttcgacagccagaccaacgtgtcccagagcaaggactccgacgtgtacatcaccgataagtgcgtgctggacatgcggagcatggacttcaagagcaactccgccgtggcctggtccaacaagtccgatttcgcctgcgccaacgccttcaacaacagcattatccccgaggacacattcttcccaagcagcgacgtgccctgcgacgtgaagctggtggaaaagagcttcgagacagacaccaacctgaacttccagaacctgagcgtgatcggcttcagaatcctgctgctgaaagtggccggctttaacctgctgatgaccctgcggctgtggtccagcagggccaagcgatctggatctggagcaacaaacttctcactactcaaacaagcaggtgacgtggaggagaatcccgggcctactagcatggccttaccagtgaccgccttgctcctgccgctggccttgctgctccacgccgccaggccggacatcgtgatgacacagagccctgatagcctggccgtgtctctgggagagagagccaccatcaactgcaagagcagccagagcctgctgaacagcggcaaccagaagaactacctggcctggtatcagcagaagcccggccagcctcctaagctgctgatctactggggcagcaccagatccacaggcgtgcccgatagattttctggctctggcagcggcaccgacttcaccctgacaatttctagcctgcaagccgaggacgtggccgtgtactactgccagaacgactacacataccccttcaccttcggccagggcaccaagctggaaatcaaaggcggaggcggaagtggaggcggaggatctggcggcggaggctctcaagttcagctggttcagagcggagccgaagtgaagaaacctggggcctctgtgaaggtgtcctgcaaggcttccggctataccttcaccagcttttggctgaactgggtccgacaggcccctggacaaggactggaatggatgggcaacatctaccccagcaccagctacaccgtgtacaaccagaaattcaaggaccgcgtgaccatgaccagggacaccagcacaagcacagtgtacatggaactgagcagcctgcggagcgaggataccgccgtgtattattgcgccagaacctggcggggcaacagcttcgattattggggccagggaaccaccgtgaccgtgtcatctacgcgtgaggacctgaagaacgtgttcccacctgaggtggccgtgttcgagcctagcaaggccgagatcgcccacacccagaaagccaccctcgtgtgcctggctaccggcttctaccccgaccatgtggaactgtcttggtgggtcaacggcaaagaggtgcacagcggcgtgtgtaccgacccccagccactgaaagaacagcccgccctgaacgacagccggtactgcctgagcagcagactgagagtgtccgccaccttctggcagaacccccggaaccacttcagatgccaggtgcagttctacggcctgagcgagaacgacgagtggacccaggacagagccaagcccgtgacccagatcgtgtctgccgaagcctggggcagagccgattgcggcatcaccagcgccagctaccaccagggcgtgctgagcgccaccatcctgtacgagatcctgctgggcaaggccaccctgtacgccgtgctggtgtctgccctggtgctgatggctatggtcaagcggaaggacagccggggacgcgccaagagaagcggatctggcgtgaagcagaccctgaatttcgacctgctgaagctggctggcgacgtggaatccaacccaggcccttctagaggccatatgaccgagtacaagcccacggtgcgcctcgccacccgcgacgacgtccccagggccgtacgcaccctcgccgccgcgttcgccgactaccccgccacgcgccacaccgtcgatccggaccgccacatcgagcgggtcaccgagctgcaagaactcttcctcacgcgcgtcgggctcgacatcggcaaggtgtgggtcgcggacgacggcgccgcggtggcggtctggaccacgccggagagcgtcgaagcgggggcggtgttcgccgagatcggcccgcgcatggccgagttgagcggttcccggctggccgcgcagcaacagatggaaggcctcctggcgccgcaccggcccaaggagcccgcgtggttcctggccaccgtcggcgtctcgcccgaccaccagggcaagggtctgggcagcgccgtcgtgctccccggagtggaggcggccgagcgcgccggggtgcccgccttcctggagacctccgcgccccgcaacctccccttctacgagcggctcggcttcaccgtcaccgccgacgtcgaggtgcccgaaggaccgcgcacctggtgcatgacccgcaagcccggtgcctga

SEQ ID NO: 37587 - DNA, 2301 bp, synthetic construct
  source 1..2301: mol_type = other DNA
atggccttaccagtgaccgccttgctcctgccgctggccttgctgctccacgccgccaggccgctcgagcagagttttgggttgttggaccctaaattgtgctatctgttggacggaatcctgttcatttacggagtgatcctgaccgcattgttcctgcgggttaagttttccagatccgcagacgcacccgcttaccaacaagggcagaaccaactctacaatgaacttaatttggggcggagggaagagtacgacgttctggacaaaaggaggggacgagatcccgagatgggcggaaagcctcagcgaaggaagaatccgcaagaggggctttataacgaactccagaaagataaaatggcagaagcctatagtgagattgggatgaagggagaaaggaggaggggtaaaggtcacgatgggttgtaccaaggattgagcacagccactaaagatacctatgatgcgctccacatgcaggccctgccgccaagaagggccaagcgatctggatctggagcaacaaacttctcactactcaaacaagcaggtgacgtggaggagaatcccgggcctactagcatggccttaccagtgaccgccttgctcctgccgctggccttgctgctccacgccgccaggccggacatcgtgatgacacagagccctgatagcctggccgtgtctctgggagagagagccaccatcaactgcaagagcagccagagcctgctgaacagcggcaaccagaagaactacctggcctggtatcagcagaagcccggccagcctcctaagctgctgatctactggggcagcaccagatccacaggcgtgcccgatagattttctggctctggcagcggcaccgacttcaccctgacaatttctagcctgcaagccgaggacgtggccgtgtactactgccagaacgactacacataccccttcaccttcggccagggcaccaagctggaaatcaaaggcggaggcggaagtggaggcggaggatctggcggcggaggctctcaagttcagctggttcagagcggagccgaagtgaagaaacctggggcctctgtgaaggtgtcctgcaaggcttccggctataccttcaccagcttttggctgaactgggtccgacaggcccctggacaaggactggaatggatgggcaacatctaccccagcaccagctacaccgtgtacaaccagaaattcaaggaccgcgtgaccatgaccagggacaccagcacaagcacagtgtacatggaactgagcagcctgcggagcgaggataccgccgtgtattattgcgccagaacctggcggggcaacagcttcgattattggggccagggaaccaccgtgaccgtgtcatctacgcgtgagctgggagagcctcagctgtgctatatcctggacgccatcctgtttctgtacggcatcgtgctgaccctgctgtactgccggctgaagatccaagtgcggaaggccgccatcaccagctacgagaaatccgacggcgtgtacaccggcctgagcaccagaaatcaagagacatacgagacactgaagcacgaaaagcctccacaacgcgccaagagaagcggatctggcgtgaagcagaccctgaatttcgacctgctgaagctggctggcgacgtggaatccaacccaggcccttctagaggccatatgaccgagtacaagcccacggtgcgcctcgccacccgcgacgacgtccccagggccgtacgcaccctcgccgccgcgttcgccgactaccccgccacgcgccacaccgtcgatccggaccgccacatcgagcgggtcaccgagctgcaagaactcttcctcacgcgcgtcgggctcgacatcggcaaggtgtgggtcgcggacgacggcgccgcggtggcggtctggaccacgccggagagcgtcgaagcgggggcggtgttcgccgagatcggcccgcgcatggccgagttgagcggttcccggctggccgcgcagcaacagatggaaggcctcctggcgccgcaccggcccaaggagcccgcgtggttcctggccaccgtcggcgtctcgcccgaccaccagggcaagggtctgggcagcgccgtcgtgctccccggagtggaggcggccgagcgcgccggggtgcccgccttcctggagacctccgcgccccgcaacctccccttctacgagcggctcggcttcaccgtcaccgccgacgtcgaggtgcccgaaggaccgcgcacctggtgcatgacccgcaagcccggtgcctga

SEQ ID NO: 37588 - DNA, 2934 bp, synthetic construct; identical to SEQ ID NO: 37579
  source 1..2934: mol_type = other DNA

SEQ ID NO: 37589 - DNA, 2934 bp, synthetic construct; identical to SEQ ID NO: 37580
  source 1..2934: mol_type = other DNA

SEQ ID NO: 37590 - DNA, 2931 bp, synthetic construct
  source 1..2931: mol_type = other DNA
atggccttaccagtgaccgccttgctcctgccgctggccttgctgctccacgccgccaggccgctcgaggaggaggacctgaagaacgtgttcccacctgaggtggccgtgttcgagcctagcgaggccgagatcagccacacccagaaagccaccctcgtgtgcctggctaccggcttctaccccgaccatgtggaactgtcttggtgggtcaacggcaaagaggtgcacagcggcgtgtgtaccgacccccagccactgaaagaacagcccgccctgaacgacagccggtactgcctgagcagcagactgagagtgtccgccaccttctggcagaacccccggaaccacttcagatgccaggtgcagttctacggcctgagcgagaacgacgagtggacccaggacagagccaagcccgtgacccagatcgtgtctgccgaagcctggggcagagccgatgatgtgattaagatccactggcaggaaaagaagtccaacaccatcctgggcagccaggaaggcaacaccatgaagaccaacgacacctacatgaagttcagctggctgaccgtgcccgagaagtccctggacaaagaacacagatgcatcgtgcggcacgaaaacaacaagaacggcgtggaccaggaaatcatcttcccacccatcaagaccgatgtgattacaatggaccccaaggacaactgctccaaggacgccaacgataccctgctgctccagctgaccaacaccagcgcctactacatgtacttgttgctgctgctgaagtccgtggtgtacttcgccatcatcacatgctgcctgctgcggagaaccgccttctgctgcaacggcgagaagtctagggccaagcgatctggatctggagcaacaaacttctcactactcaaacaagcaggtgacgtggaggagaatcccgggcctactagcatggccttaccagtgaccgccttgctcctgccgctggccttgctgctccacgccgccaggccggacatcgtgatgacacagagccctgatagcctggccgtgtctctgggagagagagccaccatcaactgcaagagcagccagagcctgctgaacagcggcaaccagaagaactacctggcctggtatcagcagaagcccggccagcctcctaagctgctgatctactggggcagcaccagatccacaggcgtgcccgatagattttctggctctggcagcggcaccgacttcaccctgacaatttctagcctgcaagccgaggacgtggccgtgtactactgccagaacgactacacataccccttcaccttcggccagggcaccaagctggaaatcaaaggcggaggcggaagtggaggcggaggatctggcggcggaggctctcaagttcagctggttcagagcggagccgaagtgaagaaacctggggcctctgtgaaggtgtcctgcaaggcttccggctataccttcaccagcttttggctgaactgggtccgacaggcccctggacaaggactggaatggatgggcaacatctaccccagcaccagctacaccgtgtacaaccagaaattcaaggaccgcgtgaccatgaccagggacaccagcacaagcacagtgtacatggaactgagcagcctgcggagcgaggataccgccgtgtattattgcgccagaacctggcggggcaacagcttcgattattggggccagggaaccaccgtgaccgtgtcatctacgcgtatccagaaccctgatcctgccgtgtaccagctgcgggatagcaagagcagcgacaagagcgtgtgtctgttcaccgacttcgacagccagaccaacgtgtcccagagcaaggactccgacgtgtacatcaccgataagtgcgtgctggacatgcggagcatggacttcaagagcaactccgccgtggcctggtccaacaagtccgatttcgcctgcgccaacgccttcaacaacagcattatccccgaggacacattcttcccaagccccgagagcagcgactccaccgaccacgtgaagcccaaagagacagagaacaccaagcagcccagcaagagctgccacaagcccaaggccatcgtgcacaccgagaaagtgaacatgatgagcctgaccgtgctgggcctgcggatgctgttcgccaaaaccgtggccgtgaacttcctgctgaccgccaagctgttcttcctccgcgccaagagaagcggatctggcgtgaagcagaccctgaatttcgacctgctgaagctggctggcgacgtggaatccaacccaggcccttctagaggccatatgaccgagtacaagcccacggtgcgcctcgccacccgcgacgacgtccccagggccgtacgcaccctcgccgccgcgttcgccgactaccccgccacgcgccacaccgtcgatccggaccgccacatcgagcgggtcaccgagctgcaagaactcttcctcacgcgcgtcgggctcgacatcggcaaggtgtgggtcgcggacgacggcgccgcggtggcggtctggaccacgccggagagcgtcgaagcgggggcggtgttcgccgagatcggcccgcgcatggccgagttgagcggttcccggctggccgcgcagcaacagatggaaggcctcctggcgccgcaccggcccaaggagcccgcgtggttcctggccaccgtcggcgtctcgcccgaccaccagggcaagggtctgggcagcgccgtcgtgctccccggagtggaggcggccgagcgcgccggggtgcccgccttcctggagacctccgcgccccgcaacctccccttctacgagcggctcggcttcaccgtcaccgccgacgtcgaggtgcccgaaggaccgcgcacctggtgcatgacccgcaagcccggtgcctga

SEQ ID NO: 37591 - DNA, 2931 bp, synthetic construct
  source 1..2931: mol_type = other DNA
atggccttaccagtgaccgccttgctcctgccgctggccttgctgctccacgccgccaggccgctcgagatccagaaccctgatcctgccgtgtaccagctgcgggatagcaagagcagcgacaagagcgtgtgtctgttcaccgacttcgacagccagaccaacgtgtcccagagcaaggactccgacgtgtacatcaccgataagtgcgtgctggacatgcggagcatggacttcaagagcaactccgccgtggcctggtccaacaagtccgatttcgcctgcgccaacgccttcaacaacagcattatccccgaggacacattcttcccaagccccgagagcagcgactccaccgaccacgtgaagcccaaagagacagagaacaccaagcagcccagcaagagctgccacaagcccaaggccatcgtgcacaccgagaaagtgaacatgatgagcctgaccgtgctgggcctgcggatgctgttcgccaaaaccgtggccgtgaacttcctgctgaccgccaagctgttcttcctcagggccaagcgatctggatctggagcaacaaacttctcactactcaaacaagcaggtgacgtggaggagaatcccgggcctactagcatggccttaccagtgaccgccttgctcctgccgctggccttgctgctccacgccgccaggccggacatcgtgatgacacagagccctgatagcctggccgtgtctctgggagagagagccaccatcaactgcaagagcagccagagcctgctgaacagcggcaaccagaagaactacctggcctggtatcagcagaagcccggccagcctcctaagctgctgatctactggggcagcaccagatccacaggcgtgcccgatagattttctggctctggcagcggcaccgacttcaccctgacaatttctagcctgcaagccgaggacgtggccgtgtactactgccagaacgactacacataccccttcaccttcggccagggcaccaagctggaaatcaaaggcggaggcggaagtggaggcggaggatctggcggcggaggctctcaagttcagctggttcagagcggagccgaagtgaagaaacctggggcctctgtgaaggtgtcctgcaaggcttccggctataccttcaccagcttttggctgaactgggtccgacaggcccctggacaaggactggaatggatgggcaacatctaccccagcaccagctacaccgtgtacaaccagaaattcaaggaccgcgtgaccatgaccagggacaccagcacaagcacagtgtacatggaactgagcagcctgcggagcgaggataccgccgtgtattattgcgccagaacctggcggggcaacagcttcgattattggggccagggaaccaccgtgaccgtgtcatctacgcgtgaggaggacctgaagaacgtgttcccacctgaggtggccgtgttcgagcctagcgaggccgagatcagccacacccagaaagccaccctcgtgtgcctggctaccggcttctaccccgaccatgtggaactgtcttggtgggtcaacggcaaagaggtgcacagcggcgtgtgtaccgacccccagccactgaaagaacagcccgccctgaacgacagccggtactgcctgagcagcagactgagagtgtccgccaccttctggcagaacccccggaaccacttcagatgccaggtgcagttctacggcctgagcgagaacgacgagtggacccaggacagagccaagcccgtgacccagatcgtgtctgccgaagcctggggcagagccgatgatgtgattaagatccactggcaggaaaagaagtccaacaccatcctgggcagccaggaaggcaacaccatgaagaccaacgacacctacatgaagttcagctggctgaccgtgcccgagaagtccctggacaaagaacacagatgcatcgtgcggcacgaaaacaacaagaacggcgtggaccaggaaatcatcttcccacccatcaagaccgatgtgattacaatggaccccaaggacaactgctccaaggacgccaacgataccctgctgctccagctgaccaacaccagcgcctactacatgtacttgttgctgctgctgaagtccgtggtgtacttcgccatcatcacatgctgcctgctgcggagaaccgccttctgctgcaacggcgagaagtctcgcgccaagagaagcggatctggcgtgaagcagaccctgaatttcgacctgctgaagctggctggcgacgtggaatccaacccaggcccttctagaggccatatgaccgagtacaagcccacggtgcgcctcgccacccgcgacgacgtccccagggccgtacgcaccctcgccgccgcgttcgccgactaccccgccacgcgccacaccgtcgatccggaccgccacatcgagcgggtcaccgagctgcaagaactcttcctcacgcgcgtcgggctcgacatcggcaaggtgtgggtcgcggacgacggcgccgcggtggcggtctggaccacgccggagagcgtcgaagcgggggcggtgttcgccgagatcggcccgcgcatggccgagttgagcggttcccggctggccgcgcagcaacagatggaaggcctcctggcgccgcaccggcccaaggagcccgcgtggttcctggccaccgtcggcgtctcgcccgaccaccagggcaagggtctgggcagcgccgtcgtgctccccggagtggaggcggccgagcgcgccggggtgcccgccttcctggagacctccgcgccccgcaacctccccttctacgagcggctcggcttcaccgtcaccgccgacgtcgaggtgcccgaaggaccgcgcacctggtgcatgacccgcaagcccggtgcctga

SEQ ID NO: 37592 - DNA, 2622 bp, synthetic construct
  source 1..2622: mol_type = other DNA
atggccttaccagtgaccgccttgctcctgccgctggccttgctgctccacgccgccaggccgctcgaggaggacctgaagaacgtgttcccacctgaggtggccgtgttcgagcctagcgaggccgagatcagccacacccagaaagccaccctcgtgtgcctggctaccggcttctaccccgaccatgtggaactgtcttggtgggtcaacggcaaagaggtgcacagcggcgtgtctaccgacccccagccactgaaagaacagcccgccctgaacgacagccggtactgcctgagcagcagactgagagtgtccgccaccttctggcagaacccccggaaccacttcagatgccaggtgcagttctacggcctgagcgagaacgacgagtggacccaggacagagccaagcccgtgacccagatcgtgtctgccgaagcctggggcagagccgattgcggctttaccagcgagagctaccagcagggcgtgctgagcgccaccaacctgagcgtgatcggcttcagaatcctgctgctgaaagtggccggctttaacctgctgatgaccctgcggctgtggtccagcagggccaagcgatctggatctggagcaacaaacttctcactactcaaacaagcaggtgacgtggaggagaatcccgggcctactagcatggccttaccagtgaccgccttgctcctgccgctggccttgctgctccacgccgccaggccggacatcgtgatgacacagagccctgatagcctggccgtgtctctgggagagagagccaccatcaactgcaagagcagccagagcctgctgaacagcggcaaccagaagaactacctggcctggtatcagcagaagcccggccagcctcctaagctgctgatctactggggcagcaccagatccacaggcgtgcccgatagattttctggctctggcagcggcaccgacttcaccctgacaatttctagcctgcaagccgaggacgtggccgtgtactactgccagaacgactacacataccccttcaccttcggccagggcaccaagctggaaatcaaaggcggaggcggaagtggaggcggaggatctggcggcggaggctctcaagttcagctggttcagagcggagccgaagtgaagaaacctggggcctctgtgaaggtgtcctgcaaggcttccggctataccttcaccagcttttggctgaactgggtccgacaggcccctggacaaggactggaatggatgggcaacatctaccccagcaccagctacaccgtgtacaaccagaaattcaaggaccgcgtgaccatgaccagggacaccagcacaagcacagtgtacatggaactgagcagcctgcggagcgaggataccgccgtgtattattgcgccagaacctggcggggcaacagcttcgattattggggccagggaaccaccgtgaccgtgtcatctacgcgtatccagaaccctgatcctgccgtgtaccagctgcgggatagcaagagcagcgacaagagcgtgtgtctgttcaccgacttcgacagccagaccaacgtgtcccagagcaaggactccgacgtgtacatcaccgataagaccgtgctggacatgcggagcatggacttcaagagcaactccgccgtggcctggtccaacaagtccgatttcgcctgcgccaacgccttcaacaacagcattatccccgaggacacattcttcccaagccccgagagcagctgcgacgtgaagctggtggaaaagagcttcgagacagacaccaacctgaacttccagatcctgtacgagatcctgctgggcaaggccaccctgtacgccgtgctggtgtctgccctggtgctgatggctatggtcaagcggaaggacagccggggacgcgccaagagaagcggatctggcgtgaagcagaccctgaatttcgacctgctgaagctggctggcgacgtggaatccaacccaggcccttctagaggccatatgaccgagtacaagcccacggtgcgcctcgccacccgcgacgacgtccccagggccgtacgcaccctcgccgccgcgttcgccgactaccccgccacgcgccacaccgtcgatccggaccgccacatcgagcgggtcaccgagctgcaagaactcttcctcacgcgcgtcgggctcgacatcggcaaggtgtgggtcgcggacgacggcgccgcggtggcggtctggaccacgccggagagcgtcgaagcgggggcggtgttcgccgagatcggcccgcgcatggccgagttgagcggttcccggctggccgcgcagcaacagatggaaggcctcctggcgccgcaccggcccaaggagcccgcgtggttcctggccaccgtcggcgtctcgcccgaccaccagggcaagggtctgggcagcgccgtcgtgctccccggagtggaggcggccgagcgcgccggggtgcccgccttcctggagacctccgcgccccgcaacctccccttctacgagcggctcggcttcaccgtcaccgccgacgtcgaggtgcccgaaggaccgcgcacctggtgcatgacccgcaagcccggtgcctga

SEQ ID NO: 37593 - DNA, 2622 bp, synthetic construct
  source 1..2622: mol_type = other DNA
atggccttaccagtgaccgccttgctcctgccgctggccttgctgctccacgccgccaggccgctcgagatccagaaccctgatcctgccgtgtaccagctgcgggatagcaagagcagcgacaagagcgtgtgtctgttcaccgacttcgacagccagaccaacgtgtcccagagcaaggactccgacgtgtacatcaccgataagaccgtgctggacatgcggagcatggacttcaagagcaactccgccgtggcctggtccaacaagtccgatttcgcctgcgccaacgccttcaacaacagcattatccccgaggacacattcttcccaagccccgagagcagctgcgacgtgaagctggtggaaaagagcttcgagacagacaccaacctgaacttccagatcctgtacgagatcctgctgggcaaggccaccctgtacgccgtgctggtgtctgccctggtgctgatggctatggtcaagcggaaggacagccggggaagggccaagcgatctggatctggagcaacaaacttctcactactcaaacaagcaggtgacgtggaggagaatcccgggcctactagcatggccttaccagtgaccgccttgctcctgccgctggccttgctgctccacgccgccaggccggacatcgtgatgacacagagccctgatagcctggccgtgtctctgggagagagagccaccatcaactgcaagagcagccagagcctgctgaacagcggcaaccagaagaactacctggcctggtatcagcagaagcccggccagcctcctaagctgctgatctactggggcagcaccagatccacaggcgtgcccgatagattttctggctctggcagcggcaccgacttcaccctgacaatttctagcctgcaagccgaggacgtggccgtgtactactgccagaacgactacacataccccttcaccttcggccagggcaccaagctggaaatcaaaggcggaggcggaagtggaggcggaggatctggcggcggaggctctcaagttcagctggttcagagcggagccgaagtgaagaaacctggggcctctgtgaaggtgtcctgcaaggcttccggctataccttcaccagcttttggctgaactgggtccgacaggcccctggacaaggactggaatggatgggcaacatctaccccagcaccagctacaccgtgtacaaccagaaattcaaggaccgcgtgaccatgaccagggacaccagcacaagcacagtgtacatggaactgagcagcctgcggagcgaggataccgccgtgtattattgcgccagaacctggcggggcaacagcttcgattattggggccagggaaccaccgtgaccgtgtcatctacgcgtgaggacctgaagaacgtgttcccacctgaggtggccgtgttcgagcctagcgaggccgagatcagccacacccagaaagccaccctcgtgtgcctggctaccggcttctaccccgaccatgtggaactgtcttggtgggtcaacggcaaagaggtgcacagcggcgtgtctaccgacccccagccactgaaagaacagcccgccctgaacgacagccggtactgcctgagcagcagactgagagtgtccgccaccttctggcagaacccccggaaccacttcagatgccaggtgcagttctacggcctgagcgagaacgacgagtggacccaggacagagccaagcccgtgacccagatcgtgtctgccgaagcctggggcagagccgattgcggctttaccagcgagagctaccagcagggcgtgctgagcgccaccaacctgagcgtgatcggcttcagaatcctgctgctgaaagtggccggctttaacctgctgatgaccctgcggctgtggtccagccgcgccaagagaagcggatctggcgtgaagcagaccctgaatttcgacctgctgaagctggctggcgacgtggaatccaacccaggcccttctagaggccatatgaccgagtacaagcccacggtgcgcctcgccacccgcgacgacgtccccagggccgtacgcaccctcgccgccgcgttcgccgactaccccgccacgcgccacaccgtcgatccggaccgccacatcgagcgggtcaccgagctgcaagaactcttcctcacgcgcgtcgggctcgacatcggcaaggtgtgggtcgcggacgacggcgccgcggtggcggtctggaccacgccggagagcgtcgaagcgggggcggtgttcgccgagatcggcccgcgcatggccgagttgagcggttcccggctggccgcgcagcaacagatggaaggcctcctggcgccgcaccggcccaaggagcccgcgtggttcctggccaccgtcggcgtctcgcccgaccaccagggcaagggtctgggcagcgccgtcgtgctccccggagtggaggcggccgagcgcgccggggtgcccgccttcctggagacctccgcgccccgcaacctccccttctacgagcggctcggcttcaccgtcaccgccgacgtcgaggtgcccgaaggaccgcgcacctggtgcatgacccgcaagcccggtgcctga

SEQ ID NO: 37594 - DNA, 2622 bp, synthetic construct
  source 1..2622: mol_type = other DNA
atggccttaccagtgaccgccttgctcctgccgctggccttgctgctccacgccgccaggccgctcgaggaggacctgaagaacgtgttcccacctgaggtggccgtgttcgagcctagcgaggccgagatcagccacacccagaaagccaccctcgtgtgcctggctaccggcttctaccccgaccatgtggaactgtcttggtgggtcaacggcaaagaggtgcacagcggcgtgtgtaccgacccccagccactgaaagaacagcccgccctgaacgacagccggtactgcctgagcagcagactgagagtgtccgccaccttctggcagaacccccggaaccacttcagatgccaggtgcagttctacggcctgagcgagaacgacgagtggacccaggacagagccaagcccgtgacccagatcgtgtctgccgaagcctggggcagagccgattgcgacgtgaagctggtggaaaagagcttcgagacagacaccaacctgaacttccagaacctgagcgtgatcggcttcagaatcctgctgctgaaagtggccggctttaacctgctgatgaccctgcggctgtggtccagcagggccaagcgatctggatctggagcaacaaacttctcactactcaaacaagcaggtgacgtggaggagaatcccgggcctactagcatggccttaccagtgaccgccttgctcctgccgctggccttgctgctccacgccgccaggccggacatcgtgatgacacagagccctgatagcctggccgtgtctctgggagagagagccaccatcaactgcaagagcagccagagcctgctgaacagcggcaaccagaagaactacctggcctggtatcagcagaagcccggccagcctcctaagctgctgatctactggggcagcaccagatccacaggcgtgcccgatagattttctggctctggcagcggcaccgacttcaccctgacaatttctagcctgcaagccgaggacgtggccgtgtactactgccagaacgactacacataccccttcaccttcggccagggcaccaagctggaaatcaaaggcggaggcggaagtggaggcggaggatctggcggcggaggctctcaagttcagctggttcagagcggagccgaagtgaagaaacctggggcctctgtgaaggtgtcctgcaaggcttccggctataccttcaccagcttttggctgaactgggtccgacaggcccctggacaaggactggaatggatgggcaacatctaccccagcaccagctacaccgtgtacaaccagaaattcaaggaccgcgtgaccatgaccagggacaccagcacaagcacagtgtacatggaactgagcagcctgcggagcgaggataccgccgtgtattattgcgccagaacctggcggggcaacagcttcgattattggggccagggaaccaccgtgaccgtgtcatctacgcgtatccagaaccctgatcctgccgtgtaccagctgcgggatagcaagagcagcgacaagagcgtgtgtctgttcaccgacttcgacagccagaccaacgtgtcccagagcaaggactccgacgtgtacatcaccgataagtgcgtgctggacatgcggagcatggacttcaagagcaactccgccgtggcctggtccaacaagtccgatttcgcctgcgccaacgccttcaacaacagcattatccccgaggacacattcttcccaagccccgagagcagctgcggctttaccagcgagagctaccagcagggcgtgctgagcgccaccatcctgtacgagatcctgctgggcaaggccaccctgtacgccgtgctggtgtctgccctggtgctgatggctatggtcaagcggaaggacagccggggacgcgccaagagaagcggatctggcgtgaagcagaccctgaatttcgacctgctgaagctggctggcgacgtggaatccaacccaggcccttctagaggccatatgaccgagtacaagcccacggtgcgcctcgccacccgcgacgacgtccccagggccgtacgcaccctcgccgccgcgttcgccgactaccccgccacgcgccacaccgtcgatccggaccgccacatcgagcgggtcaccgagctgcaagaactcttcctcacgcgcgtcgggctcgacatcggcaaggtgtgggtcgcggacgacggcgccgcggtggcggtctggaccacgccggagagcgtcgaagcgggggcggtgttcgccgagatcggcccgcgcatggccgagttgagcggttcccggctggccgcgcagcaacagatggaaggcctcctggcgccgcaccggcccaaggagcccgcgtggttcctggccaccgtcggcgtctcgcccgaccaccagggcaagggtctgggcagcgccgtcgtgctccccggagtggaggcggccgagcgcgccggggtgcccgccttcctggagacctccgcgccccgcaacctccccttctacgagcggctcggcttcaccgtcaccgccgacgtcgaggtgcccgaaggaccgcgcacctggtgcatgacccgcaagcccggtgcctga

SEQ ID NO: 37595 - DNA, 2622 bp, synthetic construct
  source 1..2622: mol_type = other DNA
atggccttaccagtgaccgccttgctcctgccgctggccttgctgctccacgccgccaggccgctcgaggaggacctgaagaacgtgttcccacctgaggtggccgtgttcgagcctagcgaggccgagatcagccacacccagaaagccaccctcgtgtgcctggctaccggcttctaccccgaccatgtggaactgtcttggtgggtcaacggcaaagaggtgcacagcggcgtgtctaccgacccccagccactgaaagaacagcccgccctgaacgacagccggtactgcctgagcagcagactgagagtgtccgccaccttctggcagaacccccggaaccacttcagatgccaggtgcagttctacggcctgagcgagaacgacgagtggacccaggacagagccaagcccgtgacccagatcgtgtctgccgaagcctggggcagagccgattgcgacgtgaagctggtggaaaagagcttcgagacagacaccaacctgaacttccagaacctgagcgtgatcggcttcagaatcctgctgctgaaagtggccggctttaacctgctgatgaccctgcggctgtggtccagcagggccaagcgatctggatctggagcaacaaacttctcactactcaaacaagcaggtgacgtggaggagaatcccgggcctactagcatggccttaccagtgaccgccttgctcctgccgctggccttgctgctccacgccgccaggccggacatcgtgatgacacagagccctgatagcctggccgtgtctctgggagagagagccaccatcaactgcaagagcagccagagcctgctgaacagcggcaaccagaagaactacctggcctggtatcagcagaagcccggccagcctcctaagctgctgatctactggggcagcaccagatccacaggcgtgcccgatagattttctggctctggcagcggcaccgacttcaccctgacaatttctagcctgcaagccgaggacgtggccgtgtactactgccagaacgactacacataccccttcaccttcggccagggcaccaagctggaaatcaaaggcggaggcggaagtggaggcggaggatctggcggcggaggctctcaagttcagctggttcagagcggagccgaagtgaagaaacctggggcctctgtgaaggtgtcctgcaaggcttccggctataccttcaccagcttttggctgaactgggtccgacaggcccctggacaaggactggaatggatgggcaacatctaccccagcaccagctacaccgtgtacaaccagaaattcaaggaccgcgtgaccatgaccagggacaccagcacaagcacagtgtacatggaactgagcagcctgcggagcgaggataccgccgtgtattattgcgccagaacctggcggggcaacagcttcgattattggggccagggaaccaccgtgaccgtgtcatctacgcgtatccagaaccctgatcctgccgtgtaccagctgcgggatagcaagagcagcgacaagagcgtgtgtctgttcaccgacttcgacagccagaccaacgtgtcccagagcaaggactccgacgtgtacatcaccgataagaccgtgctggacatgcggagcatggacttcaagagcaactccgccgtggcctggtccaacaagtccgatttcgcctgcgccaacgccttcaacaacagcattatccccgaggacacattcttcccaagccccgagagcagctgcggctttaccagcgagagctaccagcagggcgtgctgagcgccaccatcctgtacgagatcctgctgggcaaggccaccctgtacgccgtgctggtgtctgccctggtgctgatggctatggtcaagcggaaggacagccggggacgcgccaagagaagcggatctggcgtgaagcagaccctgaatttcgacctgctgaagctggctggcgacgtggaatccaacccaggcccttctagaggccatatgaccgagtacaagcccacggtgcgcctcgccacccgcgacgacgtccccagggccgtacgcaccctcgccgccgcgttcgccgactaccccgccacgcgccacaccgtcgatccggaccgccacatcgagcgggtcaccgagctgcaagaactcttcctcacgcgcgtcgggctcgacatcggcaaggtgtgggtcgcggacgacggcgccgcggtggcggtctggaccacgccggagagcgtcgaagcgggggcggtgttcgccgagatcggcccgcgcatggccgagttgagcggttcccggctggccgcgcagcaacagatggaaggcctcctggcgccgcaccggcccaaggagcccgcgtggttcctggccaccgtcggcgtctcgcccgaccaccagggcaagggtctgggcagcgccgtcgtgctccccggagtggaggcggccgagcgcgccggggtgcccgccttcctggagacctccgcgccccgcaacctccccttctacgagcggctcggcttcaccgtcaccgccgacgtcgaggtgcccgaaggaccgcgcacctggtgcatgacccgcaagcccggtgcctga

SEQ ID NO: 37596 - DNA, 2931 bp, synthetic construct
  source 1..2931: mol_type = other DNA
atggccttaccagtgaccgccttgctcctgccgctggccttgctgctccacgccgccaggccgctcgaggaggaggacctgaagaacgtgttcccacctgaggtggccgtgttcgagcctagcgaggccgagatcagccacacccagaaagccaccctcgtgtgcctggctaccggcttctaccccgaccatgtggaactgtcttggtgggtcaacggcaaagaggtgcacagcggcgtgtctaccgacccccagccactgaaagaacagcccgccctgaacgacagccggtactgcctgagcagcagactgagagtgtccgccaccttctggcagaacccccggaaccacttcagatgccaggtgcagttctacggcctgagcgagaacgacgagtggacccaggacagagccaagcccgtgacccagatcgtgtctgccgaagcctggggcagagccgatgatgtgattaagatccactggcaggaaaagaagtccaacaccatcctgggcagccaggaaggcaacaccatgaagaccaacgacacctacatgaagttcagctggctgaccgtgcccgagaagtccctggacaaagaacacagatgcatcgtgcggcacgaaaacaacaagaacggcgtggaccaggaaatcatcttcccacccatcaagaccgatgtgattacaatggaccccaaggacaactgctccaaggacgccaacgataccctgctgctccagctgaccaacaccagcgcctactacatgtacttgttgctgctgctgaagtccgtggtgtacttcgccatcatcacatgctgcctgctgcggagaaccgccttctgctgcaacggcgagaagtctagggccaagcgatctggatctggagcaacaaacttctcactactcaaacaagcaggtgacgtggaggagaatcccgggcctactagcatggccttaccagtgaccgccttgctcctgccgctggccttgctgctccacgccgccaggccggacatcgtgatgacacagagccctgatagcctggccgtgtctctgggagagagagccaccatcaactgcaagagcagccagagcctgctgaacagcggcaaccagaagaactacctggcctggtatcagcagaagcccggccagcctcctaagctgctgatctactggggcagcaccagatccacaggcgtgcccgatagattttctggctctggcagcggcaccgacttcaccctgacaatttctagcctgcaagccgaggacgtggccgtgtactactgccagaacgactacacataccccttcaccttcggccagggcaccaagctggaaatcaaaggcggaggcggaagtggaggcggaggatctggcggcggaggctctcaagttcagctggttcagagcggagccgaagtgaagaaacctggggcctctgtgaaggtgtcctgcaaggcttccggctataccttcaccagcttttggctgaactgggtccgacaggcccctggacaaggactggaatggatgggcaacatctaccccagcaccagctacaccgtgtacaaccagaaattcaaggaccgcgtgaccatgaccagggacaccagcacaagcacagtgtacatggaactgagcagcctgcggagcgaggataccgccgtgtattattgcgccagaacctggcggggcaacagcttcgattattggggccagggaaccaccgtgaccgtgtcatctacgcgtatccagaaccctgatcctgccgtgtaccagctgcgggatagcaagagcagcgacaagagcgtgtgtctgttcaccgacttcgacagccagaccaacgtgtcccagagcaaggactccgacgtgtacatcaccgataagaccgtgctggacatgcggagcatggacttcaagagcaactccgccgtggcctggtccaacaagtccgatttcgcctgcgccaacgccttcaacaacagcattatccccgaggacacattcttcccaagccccgagagcagcgactccaccgaccacgtgaagcccaaagagacagagaacaccaagcagcccagcaagagctgccacaagcccaaggccatcgtgcacaccgagaaagtgaacatgatgagcctgaccgtgctgggcctgcggatgctgttcgccaaaaccgtggccgtgaacttcctgctgaccgccaagctgttcttcctccgcgccaagagaagcggatctggcgtgaagcagaccctgaatttcgacctgctgaagctggctggcgacgtggaatccaacccaggcccttctagaggccatatgaccgagtacaagcccacggtgcgcctcgccacccgcgacgacgtccccagggccgtacgcaccctcgccgccgcgttcgccgactaccccgccacgcgccacaccgtcgatccggaccgccacatcgagcgggtcaccgagctgcaagaactcttcctcacgcgcgtcgggctcgacatcggcaaggtgtgggtcgcggacgacggcgccgcggtggcggtctggaccacgccggagagcgtcgaagcgggggcggtgttcgccgagatcggcccgcgcatggccgagttgagcggttcccggctggccgcgcagcaacagatggaaggcctcctggcgccgcaccggcccaaggagcccgcgtggttcctggccaccgtcggcgtctcgcccgaccaccagggcaagggtctgggcagcgccgtcgtgctccccggagtggaggcggccgagcgcgccggggtgcccgccttcctggagacctccgcgccccgcaacctccccttctacgagcggctcggcttcaccgtcaccgccgacgtcgaggtgcccgaaggaccgcgcacctggtgcatgacccgcaagcccggtgcctga

SEQ ID NO: 37597 - DNA, 2622 bp, synthetic construct
  source 1..2622: mol_type = other DNA
atggccttaccagtgaccgccttgctcctgccgctggccttgctgctccacgccgccaggccgctcgaggaggacctgaagaacgtgttcccacctgaggtggccgtgttcgagcctagcgaggccgagatcagccacacccagaaagccaccctcgtgtgcctggctaccggcttctaccccgaccatgtggaactgtcttggtgggtcaacggcaaagaggtgcacagcggcgtgtgtaccgacccccagccactgaaagaacagcccgccctgaacgacagccggtactgcctgagcagcagactgagagtgtccgccaccttctggcagaacccccggaaccacttcagatgccaggtgcagttctacggcctgagcgagaacgacgagtggacccaggacagagccaagcccgtgacccagatcgtgtctgccgaagcctggggcagagccgattgcggctttaccagcgagagctaccagcagggcgtgctgagcgccaccaacctgagcgtgatcggcttcagaatcctgctgctgaaagtggccggctttaacctgctgatgaccctgcggctgtggtccagcagggccaagcgatctggatctggagcaacaaacttctcactactcaaacaagcaggtgacgtggaggagaatcccgggcctactagcatggccttaccagtgaccgccttgctcctgccgctggccttgctgctccacgccgccaggccggacatcgtgatgacacagagccctgatagcctggccgtgtctctgggagagagagccaccatcaactgcaagagcagccagagcctgctgaacagcggcaaccagaagaactacctggcctggtatcagcagaagcccggccagcctcctaagctgctgatctactggggcagcaccagatccacaggcgtgcccgatagattttctggctctggcagcggcaccgacttcaccctgacaatttctagcctgcaagccgaggacgtggccgtgtactactgccagaacgactacacataccccttcaccttcggccagggcaccaagctggaaatcaaaggcggaggcggaagtggaggcggaggatctggcggcggaggctctcaagttcagctggttcagagcggagccgaagtgaagaaacctggggcctctgtgaaggtgtcctgcaaggcttccggctataccttcaccagcttttggctgaactgggtccgacaggcccctggacaaggactggaatggatgggcaacatctaccccagcaccagctacaccgtgtacaaccagaaattcaaggaccgcgtgaccatgaccagggacaccagcacaagcacagtgtacatggaactgagcagcctgcggagcgaggataccgccgtgtattattgcgccagaacctggcggggcaacagcttcgattattggggccagggaaccaccgtgaccgtgtcatctacgcgtatccagaaccctgatcctgccgtgtaccagctgcgggatagcaagagcagcgacaagagcgtgtgtctgttcaccgacttcgacagccagaccaacgtgtcccagagcaaggactccgacgtgtacatcaccgataagtgcgtgctggacatgcggagcatggacttcaagagcaactccgccgtggcctggtccaacaagtccgatttcgcctgcgccaacgccttcaacaacagcattatccccgaggacacattcttcccaagccccgagagcagctgcgacgtgaagctggtggaaaagagcttcgagacagacaccaacctgaacttccagatcctgtacgagatcctgctgggcaaggccaccctgtacgccgtgctggtgtctgccctggtgctgatggctatggtcaagcggaaggacagccggggacgcgccaagagaagcggatctggcgtgaagcagaccctgaatttcgacctgctgaagctggctggcgacgtggaatccaacccaggcccttctagaggccatatgaccgagtacaagcccacggtgcgcctcgccacccgcgacgacgtccccagggccgtacgcaccctcgccgccgcgttcgccgactaccccgccacgcgccacaccgtcgatccggaccgccacatcgagcgggtcaccgagctgcaagaactcttcctcacgcgcgtcgggctcgacatcggcaaggtgtgggtcgcggacgacggcgccgcggtggcggtctggaccacgccggagagcgtcgaagcgggggcggtgttcgccgagatcggcccgcgcatggccgagttgagcggttcccggctggccgcgcagcaacagatggaaggcctcctggcgccgcaccggcccaaggagcccgcgtggttcctggccaccgtcggcgtctcgcccgaccaccagggcaagggtctgggcagcgccgtcgtgctccccggagtggaggcggccgagcgcgccggggtgcccgccttcctggagacctccgcgccccgcaacctccccttctacgagcggctcggcttcaccgtcaccgccgacgtcgaggtgcccgaaggaccgcgcacctggtgcatgacccgcaagcccggtgcctga

SEQ ID NO: 37598 - DNA, 2709 bp, synthetic construct
  source 1..2709: mol_type = other DNA
atggccttaccagtgaccgccttgctcctgccgctggccttgctgctccacgccgccaggccgctcgaggaggaggacctgaagaacgtgttcccacctgaggtggccgtgttcgagcctagcgaggccgagatcagccacacccagaaagccaccctcgtgtgcctggctaccggcttctaccccgaccatgtggaactgtcttggtgggtcaacggcaaagaggtgcacagcggcgtgtgtaccgacccccagccactgaaagaacagcccgccctgaacgacagccggtactgcctgagcagcagactgagagtgtccgccaccttctggcagaacccccggaaccacttcagatgccaggtgcagttctacggcctgagcgagaacgacgagtggacccaggacagagccaagcccgtgacccagatcgtgtctgccgaagcctggggcagagccgattgcggctttaccagcgagagctaccagcagggcgtgctgagcgccaccaacctgagcgtgatcggcttcagaatcctgctgctgaaagtggccggctttaacctgctgatgaccctgcggctgtggtccagcagggccaagcgatctggatctggagcaacaaacttctcactactcaaacaagcaggtgacgtggaggagaatcccgggcctactagcatggccttaccagtgaccgccttgctcctgccgctggccttgctgctccacgccgccaggccggacatcgtgatgacacagagccctgatagcctggccgtgtctctgggagagagagccaccatcaactgcaagagcagccagagcctgctgaacagcggcaaccagaagaactacctggcctggtatcagcagaagcccggccagcctcctaagctgctgatctactggggcagcaccagatccacaggcgtgcccgatagattttctggctctggcagcggcaccgacttcaccctgacaatttctagcctgcaagccgaggacgtggccgtgtactactgccagaacgactacacataccccttcaccttcggccagggcaccaagctggaaatcaaaggcggaggcggaagtggaggcggaggatctggcggcggaggctctcaagttcagctggttcagagcggagccgaagtgaagaaacctggggcctctgtgaaggtgtcctgcaaggcttccggctataccttcaccagcttttggctgaactgggtccgacaggcccctggacaaggactggaatggatgggcaacatctaccccagcaccagctacaccgtgtacaaccagaaattcaaggaccgcgtgaccatgaccagggacaccagcacaagcacagtgtacatggaactgagcagcctgcggagcgaggataccgccgtgtattattgcgccagaacctggcggggcaacagcttcgattattggggccagggaaccaccgtgaccgtgtcatctacgcgtggacagcctaaggccaatcctaccgtgacactgttccctccaagcagcgaagaactccaggccaacaaggccacacttgtgtgcctgatctccgacttctaccctggggctgtgacagtggcttggaaggccgatggatctcctgtgaaagccggcgtggaaaccaccaagccatccaagcagagcaacaacaaatacgccgccagctcctacctgagcctgacacctgagcagtggaagtcccacagatcctacagctgccaagtgacccacgaaggcagcaccgtggaaaagacagtggcccctacagagtgcagccccatcaagaccgatgtgattacaatggaccccaaggacaactgctccaaggacgccaacgataccctgctgctccagctgaccaacaccagcgcctactacatgtacttgttgctgctgctgaagtccgtggtgtacttcgccatcatcacatgctgcctgctgcggagaaccgccttctgctgcaacggcgagaagtctcgcgccaagagaagcggatctggcgtgaagcagaccctgaatttcgacctgctgaagctggctggcgacgtggaatccaacccaggcccttctagaggccatatgaccgagtacaagcccacggtgcgcctcgccacccgcgacgacgtccccagggccgtacgcaccctcgccgccgcgttcgccgactaccccgccacgcgccacaccgtcgatccggaccgccacatcgagcgggtcaccgagctgcaagaactcttcctcacgcgcgtcgggctcgacatcggcaaggtgtgggtcgcggacgacggcgccgcggtggcggtctggaccacgccggagagcgtcgaagcgggggcggtgttcgccgagatcggcccgcgcatggccgagttgagcggttcccggctggccgcgcagcaacagatggaaggcctcctggcgccgcaccggcccaaggagcccgcgtggttcctggccaccgtcggcgtctcgcccgaccaccagggcaagggtctgggcagcgccgtcgtgctccccggagtggaggcggccgagcgcgccggggtgcccgccttcctggagacctccgcgccccgcaacctccccttctacgagcggctcggcttcaccgtcaccgccgacgtcgaggtgcccgaaggaccgcgcacctggtgcatgacccgcaagcccggtgcctga

SEQ ID NO: 37599 - DNA, 2709 bp, synthetic construct
  source 1..2709: mol_type = other DNA
atggccttaccagtgaccgccttgctcctgccgctggccttgctgctccacgccgccaggccgctcgagggacagcctaaggccaatcctaccgtgacactgttccctccaagcagcgaagaactccaggccaacaaggccacacttgtgtgcctgatctccgacttctaccctggggctgtgacagtggcttggaaggccgatggatctcctgtgaaagccggcgtggaaaccaccaagccatccaagcagagcaacaacaaatacgccgccagctcctacctgagcctgacacctgagcagtggaagtcccacagatcctacagctgccaagtgacccacgaaggcagcaccgtggaaaagacagtggcccctacagagtgcagccccatcaagaccgatgtgattacaatggaccccaaggacaactgctccaaggacgccaacgataccctgctgctccagctgaccaacaccagcgcctactacatgtacttgttgctgctgctgaagtccgtggtgtacttcgccatcatcacatgctgcctgctgcggagaaccgccttctgctgcaacggcgagaagtctagggccaagcgatctggatctggagcaacaaacttctcactactcaaacaagcaggtgacgtggaggagaatcccgggcctactagcatggccttaccagtgaccgccttgctcctgccgctggccttgctgctccacgccgccaggccggacatcgtgatgacacagagccctgatagcctggccgtgtctctgggagagagagccaccatcaactgcaagagcagccagagcctgctgaacagcggcaaccagaagaactacctggcctggtatcagcagaagcccggccagcctcctaagctgctgatctactggggcagcaccagatccacaggcgtgcccgatagattttctggctctggcagcggcaccgacttcaccctgacaatttctagcctgcaagccgaggacgtggccgtgtactactgccagaacgactacacataccccttcaccttcggccagggcaccaagctggaaatcaaaggcggaggcggaagtggaggcggaggatctggcggcggaggctctcaagttcagctggttcagagcggagccgaagtgaagaaacctggggcctctgtgaaggtgtcctgcaaggcttccggctataccttcaccagcttttggctgaactgggtccgacaggcccctggacaaggactggaatggatgggcaacatctaccccagcaccagctacaccgtgtacaaccagaaattcaaggaccgcgtgaccatgaccagggacaccagcacaagcacagtgtacatggaactgagcagcctgcggagcgaggataccgccgtgtattattgcgccagaacctggcggggcaacagcttcgattattggggccagggaaccaccgtgaccgtgtcatctacgcgtgaggaggacctgaagaacgtgttcccacctgaggtggccgtgttcgagcctagcgaggccgagatcagccacacccagaaagccaccctcgtgtgcctggctaccggcttctaccccgaccatgtggaactgtcttggtgggtcaacggcaaagaggtgcacagcggcgtgtgtaccgacccccagccactgaaagaacagcccgccctgaacgacagccggtactgcctgagcagcagactgagagtgtccgccaccttctggcagaacccccggaaccacttcagatgccaggtgcagttctacggcctgagcgagaacgacgagtggacccaggacagagccaagcccgtgacccagatcgtgtctgccgaagcctggggcagagccgattgcggctttaccagcgagagctaccagcagggcgtgctgagcgccaccaacctgagcgtgatcggcttcagaatcctgctgctgaaagtggccggctttaacctgctgatgaccctgcggctgtggtccagccgcgccaagagaagcggatctggcgtgaagcagaccctgaatttcgacctgctgaagctggctggcgacgtggaatccaacccaggcccttctagaggccatatgaccgagtacaagcccacggtgcgcctcgccacccgcgacgacgtccccagggccgtacgcaccctcgccgccgcgttcgccgactaccccgccacgcgccacaccgtcgatccggaccgccacatcgagcgggtcaccgagctgcaagaactcttcctcacgcgcgtcgggctcgacatcggcaaggtgtgggtcgcggacgacggcgccgcggtggcggtctggaccacgccggagagcgtcgaagcgggggcggtgttcgccgagatcggcccgcgcatggccgagttgagcggttcccggctggccgcgcagcaacagatggaaggcctcctggcgccgcaccggcccaaggagcccgcgtggttcctggccaccgtcggcgtctcgcccgaccaccagggcaagggtctgggcagcgccgtcgtgctccccggagtggaggcggccgagcgcgccggggtgcccgccttcctggagacctccgcgccccgcaacctccccttctacgagcggctcggcttcaccgtcaccgccgacgtcgaggtgcccgaaggaccgcgcacctggtgcatgacccgcaagcccggtgcctga

SEQ ID NO: 37600 - DNA, 2700 bp, synthetic construct
  source 1..2700: mol_type = other DNA
atggccttaccagtgaccgccttgctcctgccgctggccttgctgctccacgccgccaggccgctcgaggaggcctctacaaagggaccctccgtgtttcctctggctcccagcagcaagtctacaagcggaggaacagccgctctgggctgcctggtcaaggattactttcccgagcctgtgaccgtgtcctggaatagcggagcactgacaagcggcgtgcacacctttccagccgtgctgcaaagcagcggcctgtactctctgagcagcgtggtcacagtgcctagctctagcctgggcacccagacctacatctgcaatgtgaaccacaagcctagcaacaccaaggtggacaagagagtggaacccaagagctgtcccatcaagaccgatgtgattacaatggaccccaaggacaactgctccaaggacgccaacgataccctgctgctccagctgaccaacaccagcgcctactacatgtacttgttgctgctgctgaagtccgtggtgtacttcgccatcatcacatgctgcctgctgcggagaaccgccttctgctgcaacggcgagaagtctagggccaagcgatctggatctggagcaacaaacttctcactactcaaacaagcaggtgacgtggaggagaatcccgggcctactagcatggccttaccagtgaccgccttgctcctgccgctggccttgctgctccacgccgccaggccggacatcgtgatgacacagagccctgatagcctggccgtgtctctgggagagagagccaccatcaactgcaagagcagccagagcctgctgaacagcggcaaccagaagaactacctggcctggtatcagcagaagcccggccagcctcctaagctgctgatctactggggcagcaccagatccacaggcgtgcccgatagattttctggctctggcagcggcaccgacttcaccctgacaatttctagcctgcaagccgaggacgtggccgtgtactactgccagaacgactacacataccccttcaccttcggccagggcaccaagctggaaatcaaaggcggaggcggaagtggaggcggaggatctggcggcggaggctctcaagttcagctggttcagagcggagccgaagtgaagaaacctggggcctctgtgaaggtgtcctgcaaggcttccggctataccttcaccagcttttggctgaactgggtccgacaggcccctggacaaggactggaatggatgggcaacatctaccccagcaccagctacaccgtgtacaaccagaaattcaaggaccgcgtgaccatgaccagggacaccagcacaagcacagtgtacatggaactgagcagcctgcggagcgaggataccgccgtgtattattgcgccagaacctggcggggcaacagcttcgattattggggccagggaaccaccgtgaccgtgtcatctacgcgtggacagcctaaggccaatcctaccgtgacactgttccctccaagcagcgaagaactccaggccaacaaggccacacttgtgtgcctgatctccgacttctaccctggggctgtgacagtggcttggaaggccgatggatctcctgtgaaagccggcgtggaaaccaccaagccatccaagcagagcaacaacaaatacgccgccagctcctacctgagcctgacacctgagcagtggaagtcccacagatcctacagctgccaagtgacccacgaaggcagcaccgtggaaaagacagtggcccctacagagtgcagcgaagtgaaaaccgactccaccgaccacgtgaagcccaaagagacagagaacaccaagcagcccagcaagagctgccacaagcccaaggccatcgtgcacaccgagaaagtgaacatgatgagcctgaccgtgctgggcctgcggatgctgttcgccaaaaccgtggccgtgaacttcctgctgaccgccaagctgttcttcctccgcgccaagagaagcggatctggcgtgaagcagaccctgaatttcgacctgctgaagctggctggcgacgtggaatccaacccaggcccttctagaggccatatgaccgagtacaagcccacggtgcgcctcgccacccgcgacgacgtccccagggccgtacgcaccctcgccgccgcgttcgccgactaccccgccacgcgccacaccgtcgatccggaccgccacatcgagcgggtcaccgagctgcaagaactcttcctcacgcgcgtcgggctcgacatcggcaaggtgtgggtcgcggacgacggcgccgcggtggcggtctggaccacgccggagagcgtcgaagcgggggcggtgttcgccgagatcggcccgcgcatggccgagttgagcggttcccggctggccgcgcagcaacagatggaaggcctcctggcgccgcaccggcccaaggagcccgcgtggttcctggccaccgtcggcgtctcgcccgaccaccagggcaagggtctgggcagcgccgtcgtgctccccggagtggaggcggccgagcgcgccggggtgcccgccttcctggagacctccgcgccccgcaacctccccttctacgagcggctcggcttcaccgtcaccgccgacgtcgaggtgcccgaaggaccgcgcacctggtgcatgacccgcaagcccggtgcctga

SEQ ID NO: 37601 - DNA, 2634 bp, synthetic construct
  source 1..2634: mol_type = other DNA
atggccttaccagtgaccgccttgctcctgccgctggccttgctgctccacgccgccaggccgctcgaggaggcctctacaaagggaccctccgtgtttcctctggctcccagcagcaagtctacaagcggaggaacagccgctctgggctgcctggtcaaggattactttcccgagcctgtgaccgtgtcctggaatagcggagcactgacaagcggcgtgcacacctttccagccgtgctgcaaagcagcggcctgtactctctgagcagcgtggtcacagtgcctagctctagcctgggcacccagacctacatctgcaatgtgaaccacaagcctagcaacaccaaggtggacaagagagtggaacccaagagctgtggcagagccgattgcggctttaccagcgagagctaccagcagggcgtgctgagcgccaccatcctgtacgagatcctgctgggcaaggccaccctgtacgccgtgctggtgtctgccctggtgctgatggctatggtcaagcggaaggacagccggggaagggccaagcgatctggatctggagcaacaaacttctcactactcaaacaagcaggtgacgtggaggagaatcccgggcctactagcatggccttaccagtgaccgccttgctcctgccgctggccttgctgctccacgccgccaggccggacatcgtgatgacacagagccctgatagcctggccgtgtctctgggagagagagccaccatcaactgcaagagcagccagagcctgctgaacagcggcaaccagaagaactacctggcctggtatcagcagaagcccggccagcctcctaagctgctgatctactggggcagcaccagatccacaggcgtgcccgatagattttctggctctggcagcggcaccgacttcaccctgacaatttctagcctgcaagccgaggacgtggccgtgtactactgccagaacgactacacataccccttcaccttcggccagggcaccaagctggaaatcaaaggcggaggcggaagtggaggcggaggatctggcggcggaggctctcaagttcagctggttcagagcggagccgaagtgaagaaacctggggcctctgtgaaggtgtcctgcaaggcttccggctataccttcaccagcttttggctgaactgggtccgacaggcccctggacaaggactggaatggatgggcaacatctaccccagcaccagctacaccgtgtacaaccagaaattcaaggaccgcgtgaccatgaccagggacaccagcacaagcacagtgtacatggaactgagcagcctgcggagcgaggataccgccgtgtattattgcgccagaacctggcggggcaacagcttcgattattggggccagggaaccaccgtgaccgtgtcatctacgcgtggacagcctaaggccaatcctaccgtgacactgttccctccaagcagcgaagaactccaggccaacaaggccacacttgtgtgcctgatctccgacttctaccctggggctgtgacagtggcttggaaggccgatggatctcctgtgaaagccggcgtggaaaccaccaagccatccaagcagagcaacaacaaatacgccgccagctcctacctgagcctgacacctgagcagtggaagtcccacagatcctacagctgccaagtgacccacgaaggcagcaccgtggaaaagacagtggcccctacagagtgcagcatccccgaggacacattcttcccaagccccgagagcagctgcgacgtgaagctggtggaaaagagcttcgagacagacaccaacctgaacttccagaacctgagcgtgatcggcttcagaatcctgctgctgaaagtggccggctttaacctgctgatgaccctgcggctgtggtccagccgcgccaagagaagcggatctggcgtgaagcagaccctgaatttcgacctgctgaagctggctggcgacgtggaatccaacccaggcccttctagaggccatatgaccgagtacaagcccacggtgcgcctcgccacccgcgacgacgtccccagggccgtacgcaccctcgccgccgcgttcgccgactaccccgccacgcgccacaccgtcgatccggaccgccacatcgagcgggtcaccgagctgcaagaactcttcctcacgcgcgtcgggctcgacatcggcaaggtgtgggtcgcggacgacggcgccgcggtggcggtctggaccacgccggagagcgtcgaagcgggggcggtgttcgccgagatcggcccgcgcatggccgagttgagcggttcccggctggccgcgcagcaacagatggaaggcctcctggcgccgcaccggcccaaggagcccgcgtggttcctggccaccgtcggcgtctcgcccgaccaccagggcaagggtctgggcagcgccgtcgtgctccccggagtggaggcggccgagcgcgccggggtgcccgccttcctggagacctccgcgccccgcaacctccccttctacgagcggctcggcttcaccgtcaccgccgacgtcgaggtgcccgaaggaccgcgcacctggtgcatgacccgcaagcccggtgcctga

SEQ ID NO: 37602 - DNA, 2634 bp, synthetic construct
  source 1..2634: mol_type = other DNA
atggccttaccagtgaccgccttgctcctgccgctggccttgctgctccacgccgccaggccgctcgaggaggcctctacaaagggaccctccgtgtttcctctggctcccagcagcaagtctacaagcggaggaacagccgctctgggctgcctggtcaaggattactttcccgagcctgtgaccgtgtcctggaatagcggagcactgacaagcggcgtgcacacctttccagccgtgctgcaaagcagcggcctgtactctctgagcagcgtggtcacagtgcctagctctagcctgggcacccagacctacatctgcaatgtgaaccacaagcctagcaacaccaaggtggacaagagagtggaacccaagagctgtatccccgaggacacattcttcccaagccccgagagcagctgcgacgtgaagctggtggaaaagagcttcgagacagacaccaacctgaacttccagaacctgagcgtgatcggcttcagaatcctgctgctgaaagtggccggctttaacctgctgatgaccctgcggctgtggtccagcagggccaagcgatctggatctggagcaacaaacttctcactactcaaacaagcaggtgacgtggaggagaatcccgggcctactagcatggccttaccagtgaccgccttgctcctgccgctggccttgctgctccacgccgccaggccggacatcgtgatgacacagagccctgatagcctggccgtgtctctgggagagagagccaccatcaactgcaagagcagccagagcctgctgaacagcggcaaccagaagaactacctggcctggtatcagcagaagcccggccagcctcctaagctgctgatctactggggcagcaccagatccacaggcgtgcccgatagattttctggctctggcagcggcaccgacttcaccctgacaatttctagcctgcaagccgaggacgtggccgtgtactactgccagaacgactacacataccccttcaccttcggccagggcaccaagctggaaatcaaaggcggaggcggaagtggaggcggaggatctggcggcggaggctctcaagttcagctggttcagagcggagccgaagtgaagaaacctggggcctctgtgaaggtgtcctgcaaggcttccggctataccttcaccagcttttggctgaactgggtccgacaggcccctggacaaggactggaatggatgggcaacatctaccccagcaccagctacaccgtgtacaaccagaaattcaaggaccgcgtgaccatgaccagggacaccagcacaagcacagtgtacatggaactgagcagcctgcggagcgaggataccgccgtgtattattgcgccagaacctggcggggcaacagcttcgattattggggccagggaaccaccgtgaccgtgtcatctacgcgtggacagcctaaggccaatcctaccgtgacactgttccctccaagcagcgaagaactccaggccaacaaggccacacttgtgtgcctgatctccgacttctaccctggggctgtgacagtggcttggaaggccgatggatctcctgtgaaagccggcgtggaaaccaccaagccatccaagcagagcaacaacaaatacgccgccagctcctacctgagcctgacacctgagcagtggaagtcccacagatcctacagctgccaagtgacccacgaaggcagcaccgtggaaaagacagtggcccctacagagtgcagcggcagagccgattgcggctttaccagcgagagctaccagcagggcgtgctgagcgccaccatcctgtacgagatcctgctgggcaaggccaccctgtacgccgtgctggtgtctgccctggtgctgatggctatggtcaagcggaaggacagccggggacgcgccaagagaagcggatctggcgtgaagcagaccctgaatttcgacctgctgaagctggctggcgacgtggaatccaacccaggcccttctagaggccatatgaccgagtacaagcccacggtgcgcctcgccacccgcgacgacgtccccagggccgtacgcaccctcgccgccgcgttcgccgactaccccgccacgcgccacaccgtcgatccggaccgccacatcgagcgggtcaccgagctgcaagaactcttcctcacgcgcgtcgggctcgacatcggcaaggtgtgggtcgcggacgacggcgccgcggtggcggtctggaccacgccggagagcgtcgaagcgggggcggtgttcgccgagatcggcccgcgcatggccgagttgagcggttcccggctggccgcgcagcaacagatggaaggcctcctggcgccgcaccggcccaaggagcccgcgtggttcctggccaccgtcggcgtctcgcccgaccaccagggcaagggtctgggcagcgccgtcgtgctccccggagtggaggcggccgagcgcgccggggtgcccgccttcctggagacctccgcgccccgcaacctccccttctacgagcggctcggcttcaccgtcaccgccgacgtcgaggtgcccgaaggaccgcgcacctggtgcatgacccgcaagcccggtgcctga

SEQ ID NO: 37603 - DNA, 1872 bp, synthetic construct
  source 1..1872: mol_type = other DNA
atggccttaccagtgaccgccttgctcctgccgctggccttgctgctccacgccgccaggccggacatcgtgatgacacagagccctgatagcctggccgtgtctctgggagagagagccaccatcaactgcaagagcagccagagcctgctgaacagcggcaaccagaagaactacctggcctggtatcagcagaagcccggccagcctcctaagctgctgatctactggggcagcaccagatccacaggcgtgcccgatagattttctggctctggcagcggcaccgacttcaccctgacaatttctagcctgcaagccgaggacgtggccgtgtactactgccagaacgactacacataccccttcaccttcggccagggcaccaagctggaaatcaaactcgaggacctgaagaacgtgttcccacctgaggtggccgtgttcgagcctagcgaggccgagatcagccacacccagaaagccaccctcgtgtgcctggctaccggcttctaccccgaccatgtggaactgtcttggtgggtcaacggcaaagaggtgcacagcggcgtgtgtaccgacccccagccactgaaagaacagcccgccctgaacgacagccggtactgcctgagcagcagactgagagtgtccgccaccttctggcagaacccccggaaccacttcagatgccaggtgcagttctacggcctgagcgagaacgacgagtggacccaggacagagccaagcccgtgacccagatcgtgtctgccgaagcctggggcagagccgatagcggctttaccagcgagagctaccagcagggcgtgctgagcgccaccatcctgtacgagatcctgctgggcaaggccaccctgtacgccgtgctggtgtctgccctggtgctgatggctatggtcaagcggaaggacagccggggaagggccaagcgatctggatctggagcaacaaacttctcactactcaaacaagcaggtgacgtggaggagaatcccgggcctactagtatggactggatttggcgcatccttttccttgtcggcgctgctaccggcgcgcattccttcgaacaagttcagctggttcagagcggagccgaagtgaagaaacctggggcctctgtgaaggtgtcctgcaaggcttccggctataccttcaccagcttttggctgaactgggtccgacaggcccctggacaaggactggaatggatgggcaacatctaccccagcaccagctacaccgtgtacaaccagaaattcaaggaccgcgtgaccatgaccagggacaccagcacaagcacagtgtacatggaactgagcagcctgcggagcgaggataccgccgtgtattattgcgccagaacctggcggggcaacagcttcgattattggggccagggaaccaccgtgaccgtgtcatctacgcgtatccagaaccctgatcctgccgtgtaccagctgcgggatagcaagagcagcgacaagagcgtgtgtctgttcaccgacttcgacagccagaccaacgtgtcccagagcaaggactccgacgtgtacatcaccgataagtgcgtgctggacatgcggagcatggacttcaagagcaactccgccgtggcctggtccaacaagtccgatttcgcctgcgccaacgccttcaacaacagcattatccccgaggacacattcttcccaagccccgagagcagcagcgacgtgaagctggtggaaaagagcttcgagacagacaccaacctgaacttccagaacctgagcgtgatcggcttcagaatcctgctgctgaaagtggccggctttaacctgctgatgaccctgcggctgtggtccagc

SEQ ID NO: 37604 - DNA, 2712 bp, synthetic construct
  source 1..2712: mol_type = other DNA
atggccttaccagtgaccgccttgctcctgccgctggccttgctgctccacgccgccaggccggaggttcagctgcttgagtctggcggaggactggttcaacctggcggaagcctgagactgtcttgtgccgcctctggcagaaccttcagcatgggctggtatagacaggcccctggcaagggcctcgaatttgtgtctgccatcacatacagcggcggcagcccttactacgccgattctgtgaagggcagattcaccatcagccgggacaacagcaagaacaccgtgtacctccagatgaacagcctgagagccgaggacaccgccgtgtactactgtgccgccaatccaacctacggcagcgactggaatgccgagaattggggccagggcacactggtcacagtgtctagtggtaccggcggaggcggatctggcggcggaggtagcggtggcggaggatctgaattcgacatcgtgatgacacagagccctgatagcctggccgtgtctctgggagagagagccaccatcaactgcaagagcagccagagcctgctgaacagcggcaaccagaagaactacctggcctggtatcagcagaagcccggccagcctcctaagctgctgatctactggggcagcaccagatccacaggcgtgcccgatagattttctggctctggcagcggcaccgacttcaccctgacaatttctagcctgcaagccgaggacgtggccgtgtactactgccagaacgactacacataccccttcaccttcggccagggcaccaagctggaaatcaaactcgagatccagaaccctgatcctgccgtgtaccagctgcgggatagcaagagcagcgacaagagcgtgtgtctgttcaccgacttcgacagccagaccaacgtgtcccagagcaaggactccgacgtgtacatcaccgataagtgcgtgctggacatgcggagcatggacttcaagagcaactccgccgtggcctggtccaacaagtccgatttcgcctgcgccaacgccttcaacaacagcattatccccgaggacacattcttcccaagcagcgacgtgccctgcgacgtgaagctggtggaaaagagcttcgagacagacaccaacctgaacttccagaacctgagcgtgatcggcttcagaatcctgctgctgaaagtggccggctttaacctgctgatgaccctgcggctgtggtccagccgcgccaagagaagcggatctggcgtgaagcagaccctgaatttcgacctgctgaagctggctggcgacgtggaatccaacccaggccctactagtaccatggactggatttggcgcatccttttccttgtcggcgctgctaccggcacccattccgggcccgaagtgcaactggttgaatccggtggcggcctggtgcaacccggcggatctctcagacttagctgtgccgcctccggcagaaccttcacaatgggatggtacaggcaggctccagggaaagagagagagttcgtcgccgccatctctctgtctcccacactggcctactacgccgactctgtgaaaggccggttcaccatctccagagataatagcaagaacaccgtggtgctgcaaatgaactctctgagagccgaggatacagccctgtactattgtgccgctgaccggaagtccgtgatgagcatcagacccgattactggggacagggcacactggtcacagtgtctagtggatccggcggcggaggatctggcggaggcggatctgggggcggaggctctttcgaacaagttcagctggttcagagcggagccgaagtgaagaaacctggggcctctgtgaaggtgtcctgcaaggcttccggctataccttcaccagcttttggctgaactgggtccgacaggcccctggacaaggactggaatggatgggcaacatctaccccagcaccagctacaccgtgtacaaccagaaattcaaggaccgcgtgaccatgaccagggacaccagcacaagcacagtgtacatggaactgagcagcctgcggagcgaggataccgccgtgtattattgcgccagaacctggcggggcaacagcttcgattattggggccagggaaccaccgtgaccgtgtcatctacgcgtgaggacctgaagaacgtgttcccacctgaggtggccgtgttcgagcctagcaaggccgagatcgcccacacccagaaagccaccctcgtgtgcctggctaccggcttctaccccgaccatgtggaactgtcttggtgggtcaacggcaaagaggtgcacagcggcgtgtgtaccgacccccagccactgaaagaacagcccgccctgaacgacagccggtactgcctgagcagcagactgagagtgtccgccaccttctggcagaacccccggaaccacttcagatgccaggtgcagttctacggcctgagcgagaacgacgagtggacccaggacagagccaagcccgtgacccagatcgtgtctgccgaagcctggggcagagccgattgcggcatcaccagcgccagctaccaccagggcgtgctgagcgccaccatcctgtacgagatcctgctgggcaaggccaccctgtacgccgtgctggtgtctgccctggtgctgatggctatggtcaagcggaaggacagccggggataa

SEQ ID NO: 37605 - DNA, 2712 bp, synthetic construct
  source 1..2712: mol_type = other DNA
atggccttaccagtgaccgccttgctcctgccgctggccttgctgctccacgccgccaggccggaagtgcagctggttgaatctggcggaggactggttcaggctggcggatctctgagactgtcttgtgccgccagcggcagaacctttagcatgggctggtttagacaggcccctggcaaagagagagagttcgtcgccgccatcacatactctggcggcagcccttactacgccgactctgtgaagggcagattcaccatcagccgggacaacgccaagaacaccgtgtacctccagatgaacagcctgaagcctgaggacaccgccgtgtactactgcgccgccaatccaacatacggcagcgactggaacgccgagaattggggccagggaacccaagtgacagtgtctagcggtaccggcggaggcggatctggcggcggaggtagcggtggcggaggatctgaattcgacatcgtgatgacacagagccctgatagcctggccgtgtctctgggagagagagccaccatcaactgcaagagcagccagagcctgctgaacagcggcaaccagaagaactacctggcctggtatcagcagaagcccggccagcctcctaagctgctgatctactggggcagcaccagatccacaggcgtgcccgatagattttctggctctggcagcggcaccgacttcaccctgacaatttctagcctgcaagccgaggacgtggccgtgtactactgccagaacgactacacataccccttcaccttcggccagggcaccaagctggaaatcaaactcgagatccagaaccctgatcctgccgtgtaccagctgcgggatagcaagagcagcgacaagagcgtgtgtctgttcaccgacttcgacagccagaccaacgtgtcccagagcaaggactccgacgtgtacatcaccgataagtgcgtgctggacatgcggagcatggacttcaagagcaactccgccgtggcctggtccaacaagtccgatttcgcctgcgccaacgccttcaacaacagcattatccccgaggacacattcttcccaagcagcgacgtgccctgcgacgtgaagctggtggaaaagagcttcgagacagacaccaacctgaacttccagaacctgagcgtgatcggcttcagaatcctgctgctgaaagtggccggctttaacctgctgatgaccctgcggctgtggtccagccgcgccaagagaagcggatctggcgtgaagcagaccctgaatttcgacctgctgaagctggctggcgacgtggaatccaacccaggccctactagtaccatggactggatttggcgcatccttttccttgtcggcgctgctaccggcgcccattccgggcccgaagtgcaactggttgaatccggtggcggcctggtgcaacccggcggatctctcagacttagctgtgccgcctccggcagaaccttcacaatgggatggtacaggcaggctccagggaaagagagagagttcgtcgccgccatctctctgtctcccacactggcctactacgccgactctgtgaaaggccggttcaccatctccagagataatagcaagaacaccgtggtgctgcaaatgaactctctgagagccgaggatacagccctgtactattgtgccgctgaccggaagtccgtgatgagcatcagacccgattactggggacagggcacactggtcacagtgtctagtggatccggcggcggaggatctggcggaggcggatctgggggcggaggctctttcgaacaagttcagctggttcagagcggagccgaagtgaagaaacctggggcctctgtgaaggtgtcctgcaaggcttccggctataccttcaccagcttttggctgaactgggtccgacaggcccctggacaaggactggaatggatgggcaacatctaccccagcaccagctacaccgtgtacaaccagaaattcaaggaccgcgtgaccatgaccagggacaccagcacaagcacagtgtacatggaactgagcagcctgcggagcgaggataccgccgtgtattattgcgccagaacctggcggggcaacagcttcgattattggggccagggaaccaccgtgaccgtgtcatctacgcgtgaggacctgaagaacgtgttcccacctgaggtggccgtgttcgagcctagcaaggccgagatcgcccacacccagaaagccaccctcgtgtgcctggctaccggcttctaccccgaccatgtggaactgtcttggtgggtcaacggcaaagaggtgcacagcggcgtgtgtaccgacccccagccactgaaagaacagcccgccctgaacgacagccggtactgcctgagcagcagactgagagtgtccgccaccttctggcagaacccccggaaccacttcagatgccaggtgcagttctacggcctgagcgagaacgacgagtggacccaggacagagccaagcccgtgacccagatcgtgtctgccgaagcctggggcagagccgattgcggcatcaccagcgccagctaccaccagggcgtgctgagcgccaccatcctgtacgagatcctgctgggcaaggccaccctgtacgccgtgctggtgtctgccctggtgctgatggctatggtcaagcggaaggacagccggggataa

SEQ ID NO: 37606 - DNA, 2703 bp, synthetic construct
  source 1..2703: mol_type = other DNA
atggccttaccagtgaccgccttgctcctgccgctggccttgctgctccacgccgccaggccggaagtgcagctggttgaatctggcggaggactggttcaggctggcggatctctgagactgtcttgtgccgccagcggcagaacctttagcatgggctggtttagacaggcccctggcaaagagagagagttcgtcgccgccatcacatactctggcggcagcccttactacgccgactctgtgaagggcagattcaccatcagccgggacaacgccaagaacaccgtgtacctccagatgaacagcctgaagcctgaggacaccgccgtgtactactgcgccgccaatccaacatacggcagcgactggaacgccgagaattggggccagggaacccaagtgacagtgtctagcggtaccggcggaggcggatctggcggcggaggtagcggtggcggaggatctgaattcgacatcgtgatgacacagagccctgatagcctggccgtgtctctgggagagagagccaccatcaactgcaagagcagccagagcctgctgaacagcggcaaccagaagaactacctggcctggtatcagcagaagcccggccagcctcctaagctgctgatctactggggcagcaccagatccacaggcgtgcccgatagattttctggctctggcagcggcaccgacttcaccctgacaatttctagcctgcaagccgaggacgtggccgtgtactactgccagaacgactacacataccccttcaccttcggccagggcaccaagctggaaatcaaactcgaggacctgaagaacgtgttcccacctgaggtggccgtgttcgagcctagcgaggccgagatcagccacacccagaaagccaccctcgtgtgcctggctaccggcttctaccccgaccatgtggaactgtcttggtgggtcaacggcaaagaggtgcacagcggcgtgtgtaccgacccccagccactgaaagaacagcccgccctgaacgacagccggtactgcctgagcagcagactgagagtgtccgccaccttctggcagaacccccggaaccacttcagatgccaggtgcagttctacggcctgagcgagaacgacgagtggacccaggacagagccaagcccgtgacccagatcgtgtctgccgaagcctggggcagagccgattgcggctttaccagcgagagctaccagcagggcgtgctgagcgccaccatcctgtacgagatcctgctgggcaaggccaccctgtacgccgtgctggtgtctgccctggtgctgatggctatggtcaagcggaaggacagccggggaagggccaagcgatctggatctggagcaacaaacttctcactactcaaacaagcaggtgacgtggaggagaatcccgggcctactagtgccaccatggactggatttggcgcatccttttccttgtcggcgctgctaccggcgcccattccgggcccgaagtgcaactggttgaatccggtggcggcctggtgcaagcaggcggatctctcagacttagctgtgccgcctccggcagaaccttcacaatgggatggtttaggcaggctccagggaaagagagagagttcgtcgccgccatctctctgtctcccacactggcctactacgccgactctgtgaaaggccggttcaccatctccagagataatgccaagaacaccgtggtgctgcaaatgaactctctgaaacccgaggatacagccctgtactattgtgccgctgaccggaagtccgtgatgagcatcagacccgattactggggacagggcacacaagtcacagtgtcctctggatccggcggcggaggatctggcggaggcggatctgggggcggaggctctttcgaacaagttcagctggttcagagcggagccgaagtgaagaaacctggggcctctgtgaaggtgtcctgcaaggcttccggctataccttcaccagcttttggctgaactgggtccgacaggcccctggacaaggactggaatggatgggcaacatctaccccagcaccagctacaccgtgtacaaccagaaattcaaggaccgcgtgaccatgaccagggacaccagcacaagcacagtgtacatggaactgagcagcctgcggagcgaggataccgccgtgtattattgcgccagaacctggcggggcaacagcttcgattattggggccagggaaccaccgtgaccgtgtcatctacgcgtatccagaaccctgatcctgccgtgtaccagctgcgggatagcaagagcagcgacaagagcgtgtgtctgttcaccgacttcgacagccagaccaacgtgtcccagagcaaggactccgacgtgtacatcaccgataagtgcgtgctggacatgcggagcatggacttcaagagcaactccgccgtggcctggtccaacaagtccgatttcgcctgcgccaacgccttcaacaacagcattatccccgaggacacattcttcccaagccccgagagcagctgcgacgtgaagctggtggaaaagagcttcgagacagacaccaacctgaacttccagaacctgagcgtgatcggcttcagaatcctgctgctgaaagtggccggctttaacctgctgatgaccctgcggctgtggtccagctaa

SEQ ID NO: 37607 - DNA, 2316 bp, synthetic construct
  source 1..2316: mol_type = other DNA
atggccttaccagtgaccgccttgctcctgccgctggccttgctgctccacgccgccaggccggaagtgcagctggttgaatctggcggaggactggttcagcctggcggatctctgagactgagctgtgaagccagcggcttcgccagcgacgattacatcatcggctggttcagacaggcccctggcaaagagagagagggcgtcagctgcatcagctctaagtacgccaacaccgtgtacaccgacagcgtgaagggcagattcagactgagcagaggcaccgccaagaataccgtgtacctccagatgagcgccctgaagcctgaggataccgccgtgtactactgcgctatggacagccgcagagtgacatgccctgagatcagcaccatgcaccggaacttcgattcttggggccagggcacactggtcacagtgtcatctggtaccggcggaggcggatctggcggcggaggtagcggtggcggaggatctgaattcgacatcgtgatgacacagagccctgatagcctggccgtgtctctgggagagagagccaccatcaactgcaagagcagccagagcctgctgaacagcggcaaccagaagaactacctggcctggtatcagcagaagcccggccagcctcctaagctgctgatctactggggcagcaccagatccacaggcgtgcccgatagattttctggctctggcagcggcaccgacttcaccctgacaatttctagcctgcaagccgaggacgtggccgtgtactactgccagaacgactacacataccccttcaccttcggccagggcaccaagctggaaatcaaactcgaggacctgaagaacgtgttcccacctgaggtggccgtgttcgagcctagcaaggccgagatcgcccacacccagaaagccaccctcgtgtgcctggctaccggcttctaccccgaccatgtggaactgtcttggtgggtcaacggcaaagaggtgcacagcggcgtgtgtaccgacccccagccactgaaagaacagcccgccctgaacgacagccggtactgcctgagcagcagactgagagtgtccgccaccttctggcagaacccccggaaccacttcagatgccaggtgcagttctacggcctgagcgagaacgacgagtggacccaggacagagccaagcccgtgacccagatcgtgtctgccgaagcctggggcagagccgattgcggcatcaccagcgccagctaccaccagggcgtgctgagcgccaccatcctgtacgagatcctgctgggcaaggccaccctgtacgccgtgctggtgtctgccctggtgctgatggctatggtcaagcggaaggacagccggggaagggccaagcgatctggatctggagcaacaaacttctcactactcaaacaagcaggtgacgtggaggagaatcccgggcctactagtatggactggatttggcgcatccttttccttgtcggcgctgctaccggcgcgcattccttcgaacaagttcagctggttcagagcggagccgaagtgaagaaacctggggcctctgtgaaggtgtcctgcaaggcttccggctataccttcaccagcttttggctgaactgggtccgacaggcccctggacaaggactggaatggatgggcaacatctaccccagcaccagctacaccgtgtacaaccagaaattcaaggaccgcgtgaccatgaccagggacaccagcacaagcacagtgtacatggaactgagcagcctgcggagcgaggataccgccgtgtattattgcgccagaacctggcggggcaacagcttcgattattggggccagggaaccaccgtgaccgtgtcatctacgcgtatccagaaccctgatcctgccgtgtaccagctgcgggatagcaagagcagcgacaagagcgtgtgtctgttcaccgacttcgacagccagaccaacgtgtcccagagcaaggactccgacgtgtacatcaccgataagtgcgtgctggacatgcggagcatggacttcaagagcaactccgccgtggcctggtccaacaagtccgatttcgcctgcgccaacgccttcaacaacagcattatccccgaggacacattcttcccaagcagcgacgtgccctgcgacgtgaagctggtggaaaagagcttcgagacagacaccaacctgaacttccagaacctgagcgtgatcggcttcagaatcctgctgctgaaagtggccggctttaacctgctgatgaccctgcggctgtggtccagctaa

SEQ ID NO: 37608 - DNA, 2289 bp, synthetic construct
  source 1..2289: mol_type = other DNA
atggccttaccagtgaccgccttgctcctgccgctggccttgctgctccacgccgccaggccggacatcgtgatgacacagagccctgatagcctggccgtgtctctgggagagagagccaccatcaactgcaagagcagccagagcctgctgaacagcggcaaccagaagaactacctggcctggtatcagcagaagcccggccagcctcctaagctgctgatctactggggcagcaccagatccacaggcgtgcccgatagattttctggctctggcagcggcaccgacttcaccctgacaatttctagcctgcaagccgaggacgtggccgtgtactactgccagaacgactacacataccccttcaccttcggccagggcaccaagctggaaatcaaactcgaggacctgaagaacgtgttcccacctgaggtggccgtgttcgagcctagcgaggccgagatcagccacacccagaaagccaccctcgtgtgcctggctaccggcttctaccccgaccatgtggaactgtcttggtgggtcaacggcaaagaggtgcacagcggcgtgtgtaccgacccccagccactgaaagaacagcccgccctgaacgacagccggtactgcctgagcagcagactgagagtgtccgccaccttctggcagaacccccggaaccacttcagatgccaggtgcagttctacggcctgagcgagaacgacgagtggacccaggacagagccaagcccgtgacccagatcgtgtctgccgaagcctggggcagagccgattgcggctttaccagcgagagctaccagcagggcgtgctgagcgccaccatcctgtacgagatcctgctgggcaaggccaccctgtacgccgtgctggtgtctgccctggtgctgatggctatggtcaagcggaaggacagccggggaagggccaagcgatctggatctggagcaacaaacttctcactactcaaacaagcaggtgacgtggaggagaatcccgggcctactagtaccatggactggatttggcgcatccttttccttgtcggcgctgctaccggcgcccattccgggcccgaagtgcaactggttgaatccggtggcggcctggtgcaacccggcggatctctcagacttagctgtgccgcctccggcagaaccttcacaatgggatggtacaggcaggctccagggaaagagagagagttcgtcgccgccatctctctgtctcccacactggcctactacgccgactctgtgaaaggccggttcaccatctccagagataatagcaagaacaccgtggtgctgcaaatgaactctctgagagccgaggatacagccctgtactattgtgccgctgaccggaagtccgtgatgagcatcagacccgattactggggacagggcacactggtcacagtgtctagtggatccggcggcggaggatctggcggaggcggatctgggggcggaggctctttcgaacaagttcagctggttcagagcggagccgaagtgaagaaacctggggcctctgtgaaggtgtcctgcaaggcttccggctataccttcaccagcttttggctgaactgggtccgacaggcccctggacaaggactggaatggatgggcaacatctaccccagcaccagctacaccgtgtacaaccagaaattcaaggaccgcgtgaccatgaccagggacaccagcacaagcacagtgtacatggaactgagcagcctgcggagcgaggataccgccgtgtattattgcgccagaacctggcggggcaacagcttcgattattggggccagggaaccaccgtgaccgtgtcatctacgcgtatccagaaccctgatcctgccgtgtaccagctgcgggatagcaagagcagcgacaagagcgtgtgtctgttcaccgacttcgacagccagaccaacgtgtcccagagcaaggactccgacgtgtacatcaccgataagtgcgtgctggacatgcggagcatggacttcaagagcaactccgccgtggcctggtccaacaagtccgatttcgcctgcgccaacgccttcaacaacagcattatccccgaggacacattcttcccaagccccgagagcagctgcgacgtgaagctggtggaaaagagcttcgagacagacaccaacctgaacttccagaacctgagcgtgatcggcttcagaatcctgctgctgaaagtggccggctttaacctgctgatgaccctgcggctgtggtccagctaa

SEQ ID NO: 37609 - DNA, 2307 bp, synthetic construct
  source 1..2307: mol_type = other DNA
atggccttaccagtgaccgccttgctcctgccgctggccttgctgctccacgccgccaggccggacatcgtgatgacacagagccctgatagcctggccgtgtctctgggagagagagccaccatcaactgcaagagcagccagagcctgctgaacagcggcaaccagaagaactacctggcctggtatcagcagaagcccggccagcctcctaagctgctgatctactggggcagcaccagatccacaggcgtgcccgatagattttctggctctggcagcggcaccgacttcaccctgacaatttctagcctgcaagccgaggacgtggccgtgtactactgccagaacgactacacataccccttcaccttcggccagggcaccaagctggaaatcaaactcgaggacctgaagaacgtgttcccacctgaggtggccgtgttcgagcctagcgaggccgagatcagccacacccagaaagccaccctcgtgtgcctggctaccggcttctaccccgaccatgtggaactgtcttggtgggtcaacggcaaagaggtgcacagcggcgtgtgtaccgacccccagccactgaaagaacagcccgccctgaacgacagccggtactgcctgagcagcagactgagagtgtccgccaccttctggcagaacccccggaaccacttcagatgccaggtgcagttctacggcctgagcgagaacgacgagtggacccaggacagagccaagcccgtgacccagatcgtgtctgccgaagcctggggcagagccgattgcggctttaccagcgagagctaccagcagggcgtgctgagcgccaccatcctgtacgagatcctgctgggcaaggccaccctgtacgccgtgctggtgtctgccctggtgctgatggctatggtcaagcggaaggacagccggggaagggccaagcgatctggatctggagcaacaaacttctcactactcaaacaagcaggtgacgtggaggagaatcccgggcctactagtaccatggactggatttggcgcatccttttccttgtcggcgctgctaccggcgcccattccgggccccaggtgcagctggttgaatctggcggaggactggttcagcctggcggatctctgagactgtcttgtgccgccagcggcaacatcaacagcagaaactgcatgggctggttcagacaggcccctggcaagggaagagaaggcgtggcagctatcggccaagtgaccggcagaacctactacgtggacagcgtgaagggcagattcaccatcagcctggacaacagcaagaacaccctgtacctccagatgaacagcctgagagccgaggacaccgccgtgtactattgtgctgctgcccctggctgtctgctgtctgcacttagaagcgccgactacagaaactggggccagggcacactggtcaccgtttcttctggatccggcggcggaggatctggcggaggcggatctgggggcggaggctctttcgaacaagttcagctggttcagagcggagccgaagtgaagaaacctggggcctctgtgaaggtgtcctgcaaggcttccggctataccttcaccagcttttggctgaactgggtccgacaggcccctggacaaggactggaatggatgggcaacatctaccccagcaccagctacaccgtgtacaaccagaaattcaaggaccgcgtgaccatgaccagggacaccagcacaagcacagtgtacatggaactgagcagcctgcggagcgaggataccgccgtgtattattgcgccagaacctggcggggcaacagcttcgattattggggccagggaaccaccgtgaccgtgtcatctacgcgtatccagaaccctgatcctgccgtgtaccagctgcgggatagcaagagcagcgacaagagcgtgtgtctgttcaccgacttcgacagccagaccaacgtgtcccagagcaaggactccgacgtgtacatcaccgataagtgcgtgctggacatgcggagcatggacttcaagagcaactccgccgtggcctggtccaacaagtccgatttcgcctgcgccaacgccttcaacaacagcattatccccgaggacacattcttcccaagccccgagagcagctgcgacgtgaagctggtggaaaagagcttcgagacagacaccaacctgaacttccagaacctgagcgtgatcggcttcagaatcctgctgctgaaagtggccggctttaacctgctgatgaccctgcggctgtggtccagc

SEQ ID NO: 37610 - DNA, 2310 bp, synthetic construct
  source 1..2310: mol_type = other DNA
atggccttaccagtgaccgccttgctcctgccgctggccttgctgctccacgccgccaggccggacatcgtgatgacacagagccctgatagcctggccgtgtctctgggagagagagccaccatcaactgcaagagcagccagagcctgctgaacagcggcaaccagaagaactacctggcctggtatcagcagaagcccggccagcctcctaagctgctgatctactggggcagcaccagatccacaggcgtgcccgatagattttctggctctggcagcggcaccgacttcaccctgacaatttctagcctgcaagccgaggacgtggccgtgtactactgccagaacgactacacataccccttcaccttcggccagggcaccaagctggaaatcaaactcgaggacctgaagaacgtgttcccacctgaggtggccgtgttcgagcctagcgaggccgagatcagccacacccagaaagccaccctcgtgtgcctggctaccggcttctaccccgaccatgtggaactgtcttggtgggtcaacggcaaagaggtgcacagcggcgtgtgtaccgacccccagccactgaaagaacagcccgccctgaacgacagccggtactgcctgagcagcagactgagagtgtccgccaccttctggcagaacccccggaaccacttcagatgccaggtgcagttctacggcctgagcgagaacgacgagtggacccaggacagagccaagcccgtgacccagatcgtgtctgccgaagcctggggcagagccgattgcggctttaccagcgagagctaccagcagggcgtgctgagcgccaccatcctgtacgagatcctgctgggcaaggccaccctgtacgccgtgctggtgtctgccctggtgctgatggctatggtcaagcggaaggacagccggggaagggccaagcgatctggatctggagcaacaaacttctcactactcaaacaagcaggtgacgtggaggagaatcccgggcctactagtaccatggactggatttggcgcatccttttccttgtcggcgctgctaccggcgcccattccgggccccaggtgcagctggttgaatctggcggaggatctgttcaggctggcggctctctgagactgtcttgtggcgcttccggcaacatcagcagcagaaactgcatgggctggttcagacaggcccctggcaaagagagagaaggcgttgccgccatcggacaagtgaccggcagatcctactacgtggacagcgtgaagggcagattcaccatcagcctggacaacgccaagaacaccctgtacctccagatgaacacactgaagcccgaggacaccgccatgtactactgtgctgctgcccctggctgtctgctgtctgcacttagaagcgccgactacagaaactggggccagggaacccaagtgacagtgtctagtggatccggcggcggaggatctggcggaggcggatctgggggcggaggctctttcgaacaagttcagctggttcagagcggagccgaagtgaagaaacctggggcctctgtgaaggtgtcctgcaaggcttccggctataccttcaccagcttttggctgaactgggtccgacaggcccctggacaaggactggaatggatgggcaacatctaccccagcaccagctacaccgtgtacaaccagaaattcaaggaccgcgtgaccatgaccagggacaccagcacaagcacagtgtacatggaactgagcagcctgcggagcgaggataccgccgtgtattattgcgccagaacctggcggggcaacagcttcgattattggggccagggaaccaccgtgaccgtgtcatctacgcgtatccagaaccctgatcctgccgtgtaccagctgcgggatagcaagagcagcgacaagagcgtgtgtctgttcaccgacttcgacagccagaccaacgtgtcccagagcaaggactccgacgtgtacatcaccgataagtgcgtgctggacatgcggagcatggacttcaagagcaactccgccgtggcctggtccaacaagtccgatttcgcctgcgccaacgccttcaacaacagcattatccccgaggacacattcttcccaagccccgagagcagctgcgacgtgaagctggtggaaaagagcttcgagacagacaccaacctgaacttccagaacctgagcgtgatcggcttcagaatcctgctgctgaaagtggccggctttaacctgctgatgaccctgcggctgtggtccagctaa

SEQ ID NO: 37611 - DNA, 2733 bp, synthetic construct
  source 1..2733: mol_type = other DNA
atggccttaccagtgaccgccttgctcctgccgctggccttgctgctccacgccgccaggccggaagtgcagctggttgaatctggcggaggactggttcaggctggcggatctctgagactgtcttgtgccgccagcggcagaacctttagcatgggctggtttagacaggcccctggcaaagagagagagttcgtcgccgccatcacatactctggcggcagcccttactacgccgactctgtgaagggcagattcaccatcagccgggacaacgccaagaacaccgtgtacctccagatgaacagcctgaagcctgaggacaccgccgtgtactactgcgccgccaatccaacatacggcagcgactggaacgccgagaattggggccagggaacccaagtgacagtgtctagcggtaccggcggaggcggatctggcggcggaggtagcggtggcggaggatctgaattcgacatcgtgatgacacagagccctgatagcctggccgtgtctctgggagagagagccaccatcaactgcaagagcagccagagcctgctgaacagcggcaaccagaagaactacctggcctggtatcagcagaagcccggccagcctcctaagctgctgatctactggggcagcaccagatccacaggcgtgcccgatagattttctggctctggcagcggcaccgacttcaccctgacaatttctagcctgcaagccgaggacgtggccgtgtactactgccagaacgactacacataccccttcaccttcggccagggcaccaagctggaaatcaaactcgagatccagaaccctgatcctgccgtgtaccagctgcgggatagcaagagcagcgacaagagcgtgtgtctgttcaccgacttcgacagccagaccaacgtgtcccagagcaaggactccgacgtgtacatcaccgataagtgcgtgctggacatgcggagcatggacttcaagagcaactccgccgtggcctggtccaacaagtccgatttcgcctgcgccaacgccttcaacaacagcattatccccgaggacacattcttcccaagcagcgacgtgccctgcgacgtgaagctggtggaaaagagcttcgagacagacaccaacctgaacttccagaacctgagcgtgatcggcttcagaatcctgctgctgaaagtggccggctttaacctgctgatgaccctgcggctgtggtccagccgcgccaagagaagcggatctggcgtgaagcagaccctgaatttcgacctgctgaagctggctggcgacgtggaatccaacccaggccctactagtaccatggactggatttggcgcatccttttccttgtcggcgctgctaccggcgcccattccgggccccaggtgcagctggttgaatctggcggaggatctgttcaggctggcggctctctgagactgtcttgtggcgcttccggcaacatcagcagcagaaactgcatgggctggttcagacaggcccctggcaaagagagagaaggcgttgccgccatcggacaagtgaccggcagatcctactacgtggacagcgtgaagggcagattcaccatcagcctggacaacgccaagaacaccctgtacctccagatgaacacactgaagcccgaggacaccgccatgtactactgtgctgctgcccctggctgtctgctgtctgcacttagaagcgccgactacagaaactggggccagggaacccaagtgacagtgtctagtggatccggcggcggaggatctggcggaggcggatctgggggcggaggctctttcgaacaagttcagctggttcagagcggagccgaagtgaagaaacctggggcctctgtgaaggtgtcctgcaaggcttccggctataccttcaccagcttttggctgaactgggtccgacaggcccctggacaaggactggaatggatgggcaacatctaccccagcaccagctacaccgtgtacaaccagaaattcaaggaccgcgtgaccatgaccagggacaccagcacaagcacagtgtacatggaactgagcagcctgcggagcgaggataccgccgtgtattattgcgccagaacctggcggggcaacagcttcgattattggggccagggaaccaccgtgaccgtgtcatctacgcgtgaggacctgaagaacgtgttcccacctgaggtggccgtgttcgagcctagcaaggccgagatcgcccacacccagaaagccaccctcgtgtgcctggctaccggcttctaccccgaccatgtggaactgtcttggtgggtcaacggcaaagaggtgcacagcggcgtgtgtaccgacccccagccactgaaagaacagcccgccctgaacgacagccggtactgcctgagcagcagactgagagtgtccgccaccttctggcagaacccccggaaccacttcagatgccaggtgcagttctacggcctgagcgagaacgacgagtggacccaggacagagccaagcccgtgacccagatcgtgtctgccgaagcctggggcagagccgattgcggcatcaccagcgccagctaccaccagggcgtgctgagcgccaccatcctgtacgagatcctgctgggcaaggccaccctgtacgccgtgctggtgtctgccctggtgctgatggctatggtcaagcggaaggacagccggggataa

SEQ ID NO: 37612 - DNA, 2724 bp, synthetic construct
  source 1..2724: mol_type = other DNA
atggccttaccagtgaccgccttgctcctgccgctggccttgctgctccacgccgccaggccgcaggtgcagctggttgaatctggcggaggatctgttcaggctggcggctctctgagactgtcttgtggcgcttccggcaacatcagcagcagaaactgcatgggctggttcagacaggcccctggcaaagagagagaaggcgttgccgccatcggacaagtgaccggcagatcctactacgtggacagcgtgaagggcagattcaccatcagcctggacaacgccaagaacaccctgtacctccagatgaacacactgaagcccgaggacaccgccatgtactactgtgctgctgcccctggctgtctgctgtctgcacttagaagcgccgactacagaaactggggccagggaacccaagtgacagtgtctagtggtaccggcggaggcggatctggcggcggaggtagcggtggcggaggatctgaattcgacatcgtgatgacacagagccctgatagcctggccgtgtctctgggagagagagccaccatcaactgcaagagcagccagagcctgctgaacagcggcaaccagaagaactacctggcctggtatcagcagaagcccggccagcctcctaagctgctgatctactggggcagcaccagatccacaggcgtgcccgatagattttctggctctggcagcggcaccgacttcaccctgacaatttctagcctgcaagccgaggacgtggccgtgtactactgccagaacgactacacataccccttcaccttcggccagggcaccaagctggaaatcaaactcgaggacctgaagaacgtgttcccacctgaggtggccgtgttcgagcctagcgaggccgagatcagccacacccagaaagccaccctcgtgtgcctggctaccggcttctaccccgaccatgtggaactgtcttggtgggtcaacggcaaagaggtgcacagcggcgtgtgtaccgacccccagccactgaaagaacagcccgccctgaacgacagccggtactgcctgagcagcagactgagagtgtccgccaccttctggcagaacccccggaaccacttcagatgccaggtgcagttctacggcctgagcgagaacgacgagtggacccaggacagagccaagcccgtgacccagatcgtgtctgccgaagcctggggcagagccgattgcggctttaccagcgagagctaccagcagggcgtgctgagcgccaccatcctgtacgagatcctgctgggcaaggccaccctgtacgccgtgctggtgtctgccctggtgctgatggctatggtcaagcggaaggacagccggggaagggccaagcgatctggatctggagcaacaaacttctcactactcaaacaagcaggtgacgtggaggagaatcccgggcctactagtgccaccatggactggatttggcgcatccttttccttgtcggcgctgctaccggcgcccattccgggcccgaagtgcaactggttgaatccggtggcggcctggtgcaagcaggcggatctctcagacttagctgtgccgcctccggcagaaccttcacaatgggatggtttaggcaggctccagggaaagagagagagttcgtcgccgccatctctctgtctcccacactggcctactacgccgactctgtgaaaggccggttcaccatctccagagataatgccaagaacaccgtggtgctgcaaatgaactctctgaaacccgaggatacagccctgtactattgtgccgctgaccggaagtccgtgatgagcatcagacccgattactggggacagggcacacaagtcacagtgtcctctggatccggcggcggaggatctggcggaggcggatctgggggcggaggctctttcgaacaagttcagctggttcagagcggagccgaagtgaagaaacctggggcctctgtgaaggtgtcctgcaaggcttccggctataccttcaccagcttttggctgaactgggtccgacaggcccctggacaaggactggaatggatgggcaacatctaccccagcaccagctacaccgtgtacaaccagaaattcaaggaccgcgtgaccatgaccagggacaccagcacaagcacagtgtacatggaactgagcagcctgcggagcgaggataccgccgtgtattattgcgccagaacctggcggggcaacagcttcgattattggggccagggaaccaccgtgaccgtgtcatctacgcgtatccagaaccctgatcctgccgtgtaccagctgcgggatagcaagagcagcgacaagagcgtgtgtctgttcaccgacttcgacagccagaccaacgtgtcccagagcaaggactccgacgtgtacatcaccgataagtgcgtgctggacatgcggagcatggacttcaagagcaactccgccgtggcctggtccaacaagtccgatttcgcctgcgccaacgccttcaacaacagcattatccccgaggacacattcttcccaagccccgagagcagctgcgacgtgaagctggtggaaaagagcttcgagacagacaccaacctgaacttccagaacctgagcgtgatcggcttcagaatcctgctgctgaaagtggccggctttaacctgctgatgaccctgcggctgtggtccagctaa

SEQ ID NO: 37613 - DNA, 2313 bp, synthetic construct
  source 1..2313: mol_type = other DNA
atggccttaccagtgaccgccttgctcctgccgctggccttgctgctccacgccgccaggccgcaggtgcagctggttgaatctggcggaggatctgttcaggctggcggctctctgagactgtcttgtggcgcttccggcaacatcagcagcagaaactgcatgggctggttcagacaggcccctggcaaagagagagaaggcgttgccgccatcggacaagtgaccggcagatcctactacgtggacagcgtgaagggcagattcaccatcagcctggacaacgccaagaacaccctgtacctccagatgaacacactgaagcccgaggacaccgccatgtactactgtgctgctgcccctggctgtctgctgtctgcacttagaagcgccgactacagaaactggggccagggaacccaagtgacagtgtctagtggtaccggcggaggcggatctggcggcggaggtagcggtggcggaggatctgaattcgacatcgtgatgacacagagccctgatagcctggccgtgtctctgggagagagagccaccatcaactgcaagagcagccagagcctgctgaacagcggcaaccagaagaactacctggcctggtatcagcagaagcccggccagcctcctaagctgctgatctactggggcagcaccagatccacaggcgtgcccgatagattttctggctctggcagcggcaccgacttcaccctgacaatttctagcctgcaagccgaggacgtggccgtgtactactgccagaacgactacacataccccttcaccttcggccagggcaccaagctggaaatcaaactcgaggacctgaagaacgtgttcccacctgaggtggccgtgttcgagcctagcgaggccgagatcagccacacccagaaagccaccctcgtgtgcctggctaccggcttctaccccgaccatgtggaactgtcttggtgggtcaacggcaaagaggtgcacagcggcgtgtgtaccgacccccagccactgaaagaacagcccgccctgaacgacagccggtactgcctgagcagcagactgagagtgtccgccaccttctggcagaacccccggaaccacttcagatgccaggtgcagttctacggcctgagcgagaacgacgagtggacccaggacagagccaagcccgtgacccagatcgtgtctgccgaagcctggggcagagccgattgcggctttaccagcgagagctaccagcagggcgtgctgagcgccaccatcctgtacgagatcctgctgggcaaggccaccctgtacgccgtgctggtgtctgccctggtgctgatggctatggtcaagcggaaggacagccggggaagggccaagcgatctggatctggagcaacaaacttctcactactcaaacaagcaggtgacgtggaggagaatcccgggcctactagtgccaccatggactggatttggcgcatccttttccttgtcggcgctgctaccggcgcccattccttcgaacaagttcagctggttcagagcggagccgaagtgaagaaacctggggcctctgtgaaggtgtcctgcaaggcttccggctataccttcaccagcttttggctgaactgggtccgacaggcccctggacaaggactggaatggatgggcaacatctaccccagcaccagctacaccgtgtacaaccagaaattcaaggaccgcgtgaccatgaccagggacaccagcacaagcacagtgtacatggaactgagcagcctgcggagcgaggataccgccgtgtattattgcgccagaacctggcggggcaacagcttcgattattggggccagggaaccaccgtgaccgtgtcatctacgcgtatccagaaccctgatcctgccgtgtaccagctgcgggatagcaagagcagcgacaagagcgtgtgtctgttcaccgacttcgacagccagaccaacgtgtcccagagcaaggactccgacgtgtacatcaccgataagtgcgtgctggacatgcggagcatggacttcaagagcaactccgccgtggcctggtccaacaagtccgatttcgcctgcgccaacgccttcaacaacagcattatccccgaggacacattcttcccaagccccgagagcagctgcgacgtgaagctggtggaaaagagcttcgagacagacaccaacctgaacttccagaacctgagcgtgatcggcttcagaatcctgctgctgaaagtggccggctttaacctgctgatgaccctgcggctgtggtccagctaa

SEQ ID NO: 37614 - DNA, 2313 bp, synthetic construct
  source 1..2313: mol_type = other DNA
atggccttaccagtgaccgccttgctcctgccgctggccttgctgctccacgccgccaggccgcaagttcagctggtggaaagcggtggtggcgttgtgcaacctggtggaagtctgaggctgagctgtgccgcttctggcctgagctttagcacctacactgtggcctggttcaggcaggctcccggaaagggtcttgaaggcgtggccgccattccttacaccagccagcacatggtgtacacagacagcgtcagaggccggttcaccatcagcagagacaactccaagaatacgctctatctccagatgaactctctgcgcgccgaagatacagccgtgtattactgcgccaccgacagacggcctggcacctctatgctggctatcaacggctacaacagatggggacagggaaccaccgtgaccgtgtcatctggtaccggcggaggcggatctggcggcggaggtagcggtggcggaggatctgaattcgacatcgtgatgacacagagccctgatagcctggccgtgtctctgggagagagagccaccatcaactgcaagagcagccagagcctgctgaacagcggcaaccagaagaactacctggcctggtatcagcagaagcccggccagcctcctaagctgctgatctactggggcagcaccagatccacaggcgtgcccgatagattttctggctctggcagcggcaccgacttcaccctgacaatttctagcctgcaagccgaggacgtggccgtgtactactgccagaacgactacacataccccttcaccttcggccagggcaccaagctggaaatcaaactcgaggacctgaagaacgtgttcccacctgaggtggccgtgttcgagcctagcgaggccgagatcagccacacccagaaagccaccctcgtgtgcctggctaccggcttctaccccgaccatgtggaactgtcttggtgggtcaacggcaaagaggtgcacagcggcgtgtgtaccgacccccagccactgaaagaacagcccgccctgaacgacagccggtactgcctgagcagcagactgagagtgtccgccaccttctggcagaacccccggaaccacttcagatgccaggtgcagttctacggcctgagcgagaacgacgagtggacccaggacagagccaagcccgtgacccagatcgtgtctgccgaagcctggggcagagccgattgcggctttaccagcgagagctaccagcagggcgtgctgagcgccaccatcctgtacgagatcctgctgggcaaggccaccctgtacgccgtgctggtgtctgccctggtgctgatggctatggtcaagcggaaggacagccggggaagggccaagcgatctggatctggagcaacaaacttctcactactcaaacaagcaggtgacgtggaggagaatcccgggcctactagtgccaccatggactggatttggcgcatccttttccttgtcggcgctgctaccggcgcccattccttcgaacaagttcagctggttcagagcggagccgaagtgaagaaacctggggcctctgtgaaggtgtcctgcaaggcttccggctataccttcaccagcttttggctgaactgggtccgacaggcccctggacaaggactggaatggatgggcaacatctaccccagcaccagctacaccgtgtacaaccagaaattcaaggaccgcgtgaccatgaccagggacaccagcacaagcacagtgtacatggaactgagcagcctgcggagcgaggataccgccgtgtattattgcgccagaacctggcggggcaacagcttcgattattggggccagggaaccaccgtgaccgtgtcatctacgcgtatccagaaccctgatcctgccgtgtaccagctgcgggatagcaagagcagcgacaagagcgtgtgtctgttcaccgacttcgacagccagaccaacgtgtcccagagcaaggactccgacgtgtacatcaccgataagtgcgtgctggacatgcggagcatggacttcaagagcaactccgccgtggcctggtccaacaagtccgatttcgcctgcgccaacgccttcaacaacagcattatccccgaggacacattcttcccaagccccgagagcagctgcgacgtgaagctggtggaaaagagcttcgagacagacaccaacctgaacttccagaacctgagcgtgatcggcttcagaatcctgctgctgaaagtggccggctttaacctgctgatgaccctgcggctgtggtccagctaa

SEQ ID NO: 37615 - DNA, 2310 bp, synthetic construct
  source 1..2310: mol_type = other DNA
atggccttaccagtgaccgccttgctcctgccgctggccttgctgctccacgccgccaggccggacatcgtgatgacacagagccctgatagcctggccgtgtctctgggagagagagccaccatcaactgcaagagcagccagagcctgctgaacagcggcaaccagaagaactacctggcctggtatcagcagaagcccggccagcctcctaagctgctgatctactggggcagcaccagatccacaggcgtgcccgatagattttctggctctggcagcggcaccgacttcaccctgacaatttctagcctgcaagccgaggacgtggccgtgtactactgccagaacgactacacataccccttcaccttcggccagggcaccaagctggaaatcaaactcgaggacctgaagaacgtgttcccacctgaggtggccgtgttcgagcctagcgaggccgagatcagccacacccagaaagccaccctcgtgtgcctggctaccggcttctaccccgaccatgtggaactgtcttggtgggtcaacggcaaagaggtgcacagcggcgtgtgtaccgacccccagccactgaaagaacagcccgccctgaacgacagccggtactgcctgagcagcagactgagagtgtccgccaccttctggcagaacccccggaaccacttcagatgccaggtgcagttctacggcctgagcgagaacgacgagtggacccaggacagagccaagcccgtgacccagatcgtgtctgccgaagcctggggcagagccgattgcggctttaccagcgagagctaccagcagggcgtgctgagcgccaccatcctgtacgagatcctgctgggcaaggccaccctgtacgccgtgctggtgtctgccctggtgctgatggctatggtcaagcggaaggacagccggggaagggccaagcgatctggatctggagcaacaaacttctcactactcaaacaagcaggtgacgtggaggagaatcccgggcctactagtaccatggactggatttggcgcatccttttccttgtcggcgctgctaccggcgcccattccgggccccaagttcagctggtggaaagcggtggtggcgttgtgcaacctggtggaagtctgaggctgagctgtgccgcttctggcctgagctttagcacctacactgtggcctggttcaggcaggctcccggaaagggtcttgaaggcgtggccgccattccttacaccagccagcacatggtgtacacagacagcgtcagaggccggttcaccatcagcagagacaactccaagaatacgctctatctccagatgaactctctgcgcgccgaagatacagccgtgtattactgcgccaccgacagacggcctggcacctctatgctggctatcaacggctacaacagatggggacagggaaccaccgtgaccgtgtcatctggatccggcggcggaggatctggcggaggcggatctgggggcggaggctctttcgaacaagttcagctggttcagagcggagccgaagtgaagaaacctggggcctctgtgaaggtgtcctgcaaggcttccggctataccttcaccagcttttggctgaactgggtccgacaggcccctggacaaggactggaatggatgggcaacatctaccccagcaccagctacaccgtgtacaaccagaaattcaaggaccgcgtgaccatgaccagggacaccagcacaagcacagtgtacatggaactgagcagcctgcggagcgaggataccgccgtgtattattgcgccagaacctggcggggcaacagcttcgattattggggccagggaaccaccgtgaccgtgtcatctacgcgtatccagaaccctgatcctgccgtgtaccagctgcgggatagcaagagcagcgacaagagcgtgtgtctgttcaccgacttcgacagccagaccaacgtgtcccagagcaaggactccgacgtgtacatcaccgataagtgcgtgctggacatgcggagcatggacttcaagagcaactccgccgtggcctggtccaacaagtccgatttcgcctgcgccaacgccttcaacaacagcattatccccgaggacacattcttcccaagccccgagagcagctgcgacgtgaagctggtggaaaagagcttcgagacagacaccaacctgaacttccagaacctgagcgtgatcggcttcagaatcctgctgctgaaagtggccggctttaacctgctgatgaccctgcggctgtggtccagctaa

SEQ ID NO: 37616 - DNA, 2316 bp, synthetic construct
  source 1..2316: mol_type = other DNA
atggccttaccagtgaccgccttgctcctgccgctggccttgctgctccacgccgccaggccggacatcgtgatgacacagagccctgatagcctggccgtgtctctgggagagagagccaccatcaactgcaagagcagccagagcctgctgaacagcggcaaccagaagaactacctggcctggtatcagcagaagcccggccagcctcctaagctgctgatctactggggcagcaccagatccacaggcgtgcccgatagattttctggctctggcagcggcaccgacttcaccctgacaatttctagcctgcaagccgaggacgtggccgtgtactactgccagaacgactacacataccccttcaccttcggccagggcaccaagctggaaatcaaactcgaggacctgaagaacgtgttcccacctgaggtggccgtgttcgagcctagcgaggccgagatcagccacacccagaaagccaccctcgtgtgcctggctaccggcttctaccccgaccatgtggaactgtcttggtgggtcaacggcaaagaggtgcacagcggcgtgtgtaccgacccccagccactgaaagaacagcccgccctgaacgacagccggtactgcctgagcagcagactgagagtgtccgccaccttctggcagaacccccggaaccacttcagatgccaggtgcagttctacggcctgagcgagaacgacgagtggacccaggacagagccaagcccgtgacccagatcgtgtctgccgaagcctggggcagagccgattgcggctttaccagcgagagctaccagcagggcgtgctgagcgccaccatcctgtacgagatcctgctgggcaaggccaccctgtacgccgtgctggtgtctgccctggtgctgatggctatggtcaagcggaaggacagccggggaagggccaagcgatctggatctggagcaacaaacttctcactactcaaacaagcaggtgacgtggaggagaatcccgggcctactagtaccatggactggatttggcgcatccttttccttgtcggcgctgctaccggcgcccattccgggcccgaggtgcagctggttgaatctggcggaggatctgttcaggctggcggctctctgagactgtcttgtgccgccagcggctacacctacagcatcaactgcatgggctggttcagacaggcccctggcaaagagagagaaggcgttgccgccatctctaccggcggaggcagaaccgattaccgggattctgtgaagggcagattcaccatcagccaggacaacgccaagaacaccgtgtacctccagatgaacagcctgaagcctgaggacaccgccatgtactactgtgccggcaagaccacctatcctggctacggatgtggcctgggcagaagcgcctacaattattggggccagggcacccaagtgaccgtgtcatctggatccggcggcggaggatctggcggaggcggatctgggggcggaggctctttcgaacaagttcagctggttcagagcggagccgaagtgaagaaacctggggcctctgtgaaggtgtcctgcaaggcttccggctataccttcaccagcttttggctgaactgggtccgacaggcccctggacaaggactggaatggatgggcaacatctaccccagcaccagctacaccgtgtacaaccagaaattcaaggaccgcgtgaccatgaccagggacaccagcacaagcacagtgtacatggaactgagcagcctgcggagcgaggataccgccgtgtattattgcgccagaacctggcggggcaacagcttcgattattggggccagggaaccaccgtgaccgtgtcatctacgcgtatccagaaccctgatcctgccgtgtaccagctgcgggatagcaagagcagcgacaagagcgtgtgtctgttcaccgacttcgacagccagaccaacgtgtcccagagcaaggactccgacgtgtacatcaccgataagtgcgtgctggacatgcggagcatggacttcaagagcaactccgccgtggcctggtccaacaagtccgatttcgcctgcgccaacgccttcaacaacagcattatccccgaggacacattcttcccaagccccgagagcagctgcgacgtgaagctggtggaaaagagcttcgagacagacaccaacctgaacttccagaacctgagcgtgatcggcttcagaatcctgctgctgaaagtggccggctttaacctgctgatgaccctgcggctgtggtccagctaa

SEQ ID NO: 37617 - DNA, 1872 bp, synthetic construct
  source 1..1872: mol_type = other DNA
atggccttaccagtgaccgccttgctcctgccgctggccttgctgctccacgccgccaggccggacatcgtgatgacacagagccctgatagcctggccgtgtctctgggagagagagccaccatcaactgcaagagcagccagagcctgctgaacagcggcaaccagaagaactacctggcctggtatcagcagaagcccggccagcctcctaagctgctgatctactggggcagcaccagatccacaggcgtgcccgatagattttctggctctggcagcggcaccgacttcaccctgacaatttctagcctgcaagccgaggacgtggccgtgtactactgccagaacgactacacataccccttcaccttcggccagggcaccaagctggaaatcaaactcgaggacctgaagcacgtgttcccacctgaggtggccgtgttcgagcctagcgacgccgagatctggcacacccagaaagccaccctcgtgtgcctggctaccggcttctaccccgaccatgtggaactgtcttggtgggtcaacggcaaagaggtgcacagcggcgtgtctaccgacccccagccactgaaagaacagcccgccctgaacgacagccggtactgcctgagcagcagactgagagtgtccgccaccttctggcagaacccccggaaccacttcagatgccaggtgcagttctacggcctgagcgagaacgacgagtggacccaggacagagccaagcccgtgacccagatcgtgtctgccgaagcctggggcagagccgattgcggctttaccagcgagagctaccagcagggcgtgctgagcgccaccatcctgtacgagatcctgctgggcaaggccaccctgtacgccgtgctggtgtctgccctggtgctgatggctatggtcaagcggaaggacagccggggaagggccaagcgatctggatctggagcaacaaacttctcactactcaaacaagcaggtgacgtggaggagaatcccgggcctactagtatggactggatttggcgcatccttttccttgtcggcgctgctaccggcgcgcattccttcgaacaagttcagctggttcagagcggagccgaagtgaagaaacctggggcctctgtgaaggtgtcctgcaaggcttccggctataccttcaccagcttttggctgaactgggtccgacaggcccctggacaaggactggaatggatgggcaacatctaccccagcaccagctacaccgtgtacaaccagaaattcaaggaccgcgtgaccatgaccagggacaccagcacaagcacagtgtacatggaactgagcagcctgcggagcgaggataccgccgtgtattattgcgccagaacctggcggggcaacagcttcgattattggggccagggaaccaccgtgaccgtgtcatctacgcgtatccagaaccctgatcctgccgtgtaccagctgcgggatagcaagagcagcgacaagagcgtgtgtctgttcaccgacttcgacagccagaccaacgtgtcccagagcaaggactccgacgtgtacatcaccgataagaccgtgctggacatgcggagcatggacttcaagagcaactccgccgtggcctggtccagcaagtccgatttcgcctgcgccaacgccttcaacaacagcattatccccgaggacacattcttcccaagccccgagatggcctgcgacgtgaagctggtggaaaagagcttcgagacagacaccaacctgaacttccagaacctgctcgtgatctggctgagaatcctgctgctgaaagtggccggctttaacctgctgatgaccctgcggctgtggtccagc

SEQ ID NO: 37618 - DNA, 1872 bp, synthetic construct
  source 1..1872: mol_type = other DNA
atggccttaccagtgaccgccttgctcctgccgctggccttgctgctccacgccgccaggccggacatcgtgatgacacagagccctgatagcctggccgtgtctctgggagagagagccaccatcaactgcaagagcagccagagcctgctgaacagcggcaaccagaagaactacctggcctggtatcagcagaagcccggccagcctcctaagctgctgatctactggggcagcaccagatccacaggcgtgcccgatagattttctggctctggcagcggcaccgacttcaccctgacaatttctagcctgcaagccgaggacgtggccgtgtactactgccagaacgactacacataccccttcaccttcggccagggcaccaagctggaaatcaaactcgaggacctgaagcacgtgttcccacctgaggtggccgtgttcgagcctagcgacgccgagatctggcacacccagaaagccaccctcgtgtgcctggctaccggcttctaccccgaccatgtggaactgtcttggtgggtcaacggcaaagaggtgcacagcggcgtgtctaccgacccccagccactgaaagaacagcccgccctgaacgacagccggtactgcctgagcagcagactgagagtgtccgccaccttctggcagaacccccggaaccacttcagatgccaggtgcagttctacggcctgagcgagaacgacgagtggacccaggacagagccaagcccgtgacccagatcgtgtctgccgaagcctggggcagagccgattgcggctttaccagcgagagctaccagcagggcgtgctgagcgccaccatcctgtacgagatcctgctgggcaaggccaccctgtacgccgtgctggtgtctgccctggtgctgatggctatggtcaagcggaaggacagccggggaagggccaagcgatctggatctggagcaacaaacttctcactactcaaacaagcaggtgacgtggaggagaatcccgggcctactagtatggactggatttggcgcatccttttccttgtcggcgctgctaccggcgcgcattccttcgaacaagttcagctggttcagagcggagccgaagtgaagaaacctggggcctctgtgaaggtgtcctgcaaggcttccggctataccttcaccagcttttggctgaactgggtccgacaggcccctggacaaggactggaatggatgggcaacatctaccccagcaccagctacaccgtgtacaaccagaaattcaaggaccgcgtgaccatgaccagggacaccagcacaagcacagtgtacatggaactgagcagcctgcggagcgaggataccgccgtgtattattgcgccagaacctggcggggcaacagcttcgattattggggccagggaaccaccgtgaccgtgtcatctacgcgtatccagaaccctgatcctgccgtgtaccagctgcgggatagcaagagcagcgacaagagcgtgtgtctgttcaccgacttcgacagccagaccaacgtgtcccagagcaaggactccgacgtgtacatcaccgataagaccgtgctggacatgcggagcatggacttcaagagcaactccgccgtggcctggtccaccaagtccgatttcgcctgcgccaacgccttcaacaacagcattatccccgaggacacattcttcccaagccccgaggtggtgtgcgacgtgaagctggtggaaaagagcttcgagacagacaccaacctgaacttccagaacctggtggtgatcggcgccagaatcctgctgctgaaagtggccggctttaacctgctgatgaccctgcggctgtggtccagc

SEQ ID NO: 37619 - DNA, 1872 bp, synthetic construct
  source 1..1872: mol_type = other DNA
atggccttaccagtgaccgccttgctcctgccgctggccttgctgctccacgccgccaggccggacatcgtgatgacacagagccctgatagcctggccgtgtctctgggagagagagccaccatcaactgcaagagcagccagagcctgctgaacagcggcaaccagaagaactacctggcctggtatcagcagaagcccggccagcctcctaagctgctgatctactggggcagcaccagatccacaggcgtgcccgatagattttctggctctggcagcggcaccgacttcaccctgacaatttctagcctgcaagccgaggacgtggccgtgtactactgccagaacgactacacataccccttcaccttcggccagggcaccaagctggaaatcaaactcgaggacctgaagaacgtgttcccacctgaggtggccgtgttcgagcctagcaaggccgagatcagcagaacccagaaagccaccctcgtgtgcctggctaccggcttctaccctcctcatgtggaactgtcttggtgggtcaacggcaaagaggtgcacgacggcgtgtgtaccgacccccagccactgaaagaacagcccgccctgaacgacagccggtactgcctgagcagcagactgagagtgtccgccaccttctggcagaacccccggaaccacttcagatgccaggtgcagttctacggcctgagcgagaacgacgagtggacccaggacagagccaagcccgtgacccagatcgtgtctgccgaagcctggggcagagccgattgcggctttaccagcgagagctaccagcagggcgtgctgagcgccaccatcctgtacgagatcctgctgggcaaggccaccctgtacgccgtgctggtgtctgccctggtgctgatggctatggtcaagcggaaggacagccggggaagggccaagcgatctggatctggagcaacaaacttctcactactcaaacaagcaggtgacgtggaggagaatcccgggcctactagtatggactggatttggcgcatccttttccttgtcggcgctgctaccggcgcgcattccttcgaacaagttcagctggttcagagcggagccgaagtgaagaaacctggggcctctgtgaaggtgtcctgcaaggcttccggctataccttcaccagcttttggctgaactgggtccgacaggcccctggacaaggactggaatggatgggcaacatctaccccagcaccagctacaccgtgtacaaccagaaattcaaggaccgcgtgaccatgaccagggacaccagcacaagcacagtgtacatggaactgagcagcctgcggagcgaggataccgccgtgtattattgcgccagaacctggcggggcaacagcttcgattattggggccagggaaccaccgtgaccgtgtcatctacgcgtatccagaaccctgatcctgccgtgtaccagctgcgggatagcaagagcagcgacaagttcgtgtgtctgttcaccgacttcgacagccagatcaacgtgtcccagagcaaggactccgacgtgtacatcaccgataagtgcgtgctggacatgcggagcatggacttcaagagcaactccgccgtggcctggtccaacaagtccgatttcacctgcgccaacgccttcaacaacagcattatccccgaggacacattcttcccaagccccgagagcagctgcgacgtgaagctggtggaaaagagcttcgagacagacaccaacctgaacttccagaacctgagcgtgatcggcttcagaatcctgctgctgaaagtggccggctttaacctgctgatgaccctgcggctgtggtccagc

SEQ ID NO: 37620 - DNA, 2298 bp, synthetic construct
  source 1..2298: mol_type = other DNA
atggccttaccagtgaccgccttgctcctgccgctggccttgctgctccacgccgccaggccggacatcgtgatgacacagagccctgatagcctggccgtgtctctgggagagagagccaccatcaactgcaagagcagccagagcctgctgaacagcggcaaccagaagaactacctggcctggtatcagcagaagcccggccagcctcctaagctgctgatctactggggcagcaccagatccacaggcgtgcccgatagattttctggctctggcagcggcaccgacttcaccctgacaatttctagcctgcaagccgaggacgtggccgtgtactactgccagaacgactacacataccccttcaccttcggccagggcaccaagctggaaatcaaactcgaggacctgaagaacgtgttcccacctgaggtggccgtgttcgagcctagcgaggccgagatcagccacacccagaaagccaccctcgtgtgcctggctaccggcttctaccccgaccatgtggaactgtcttggtgggtcaacggcaaagaggtgcacagcggcgtgtgtaccgacccccagccactgaaagaacagcccgccctgaacgacagccggtactgcctgagcagcagactgagagtgtccgccaccttctggcagaacccccggaaccacttcagatgccaggtgcagttctacggcctgagcgagaacgacgagtggacccaggacagagccaagcccgtgacccagatcgtgtctgccgaagcctggggcagagccgattgcggctttaccagcgagagctaccagcagggcgtgctgagcgccaccatcctgtacgagatcctgctgggcaaggccaccctgtacgccgtgctggtgtctgccctggtgctgatggctatggtcaagcggaaggacagccggggaagggccaagcgatctggatctggagcaacaaacttctcactactcaaacaagcaggtgacgtggaggagaatcccgggcctactagtaccatggactggatttggcgcatccttttccttgtcggcgctgctaccggcgcccattccgggccccaggtgcagctccaagaaagcggacccggactggttaagccctctcagaccctgtctctgacctgcacagttagcggagccagcattaccacaggcgagtattattggaattggtttcggcagccaccaggcaaggggcttgagtggatgggtgctattgctgcctctggcagcaccacctactctcccagctttgagagcagaacctccatcagccgggacacctccaaaaaccagttctctctgaagctgtcctccgtgaccgctgctgacaccgccgtctattattgtggccggtctttcggcgtggcagctgtgaccacaggacagaacagaggccagggaacacttgtgaccgtgtcctctggatccggcggcggaggatctggcggaggcggatctgggggcggaggctctttcgaacaagttcagctggttcagagcggagccgaagtgaagaaacctggggcctctgtgaaggtgtcctgcaaggcttccggctataccttcaccagcttttggctgaactgggtccgacaggcccctggacaaggactggaatggatgggcaacatctaccccagcaccagctacaccgtgtacaaccagaaattcaaggaccgcgtgaccatgaccagggacaccagcacaagcacagtgtacatggaactgagcagcctgcggagcgaggataccgccgtgtattattgcgccagaacctggcggggcaacagcttcgattattggggccagggaaccaccgtgaccgtgtcatctacgcgtatccagaaccctgatcctgccgtgtaccagctgcgggatagcaagagcagcgacaagagcgtgtgtctgttcaccgacttcgacagccagaccaacgtgtcccagagcaaggactccgacgtgtacatcaccgataagtgcgtgctggacatgcggagcatggacttcaagagcaactccgccgtggcctggtccaacaagtccgatttcgcctgcgccaacgccttcaacaacagcattatccccgaggacacattcttcccaagccccgagagcagctgcgacgtgaagctggtggaaaagagcttcgagacagacaccaacctgaacttccagaacctgagcgtgatcggcttcagaatcctgctgctgaaagtggccggctttaacctgctgatgaccctgcggctgtggtccagc

SEQ ID NO: 37621 - DNA, 2721 bp, synthetic construct
  source 1..2721: mol_type = other DNA
atggccttaccagtgaccgccttgctcctgccgctggccttgctgctccacgccgccaggccgcaggttcagctgcaagagtctggccctggcctggtcaagcctagccaaacactgagcctgacctgtaccgtgtctggcggctctatcaccaccggcgagttctactggaactggttcagacagcctcctggcaaaggactggaatggatgggagccattgccgccagcggcagcacaacatacagccctagcttcgagagccggaccagcatcagcagagacaccagcaagaatcagttcagcctgaagctgagcagcgtgacagccgccgatacagccgtgtattactgcggcagatcctttggagtggccgccgtgacaaccggccagaatagaggacagggcaccctggtcacagtgtctagcggtaccggcggaggcggatctggcggcggaggtagcggtggcggaggatctgaattcgacatcgtgatgacacagagccctgatagcctggccgtgtctctgggagagagagccaccatcaactgcaagagcagccagagcctgctgaacagcggcaaccagaagaactacctggcctggtatcagcagaagcccggccagcctcctaagctgctgatctactggggcagcaccagatccacaggcgtgcccgatagattttctggctctggcagcggcaccgacttcaccctgacaatttctagcctgcaagccgaggacgtggccgtgtactactgccagaacgactacacataccccttcaccttcggccagggcaccaagctggaaatcaaactcgagatccagaaccctgatcctgccgtgtaccagctgcgggatagcaagagcagcgacaagagcgtgtgtctgttcaccgacttcgacagccagaccaacgtgtcccagagcaaggactccgacgtgtacatcaccgataagtgcgtgctggacatgcggagcatggacttcaagagcaactccgccgtggcctggtccaacaagtccgatttcgcctgcgccaacgccttcaacaacagcattatccccgaggacacattcttcccaagcagcgacgtgccctgcgacgtgaagctggtggaaaagagcttcgagacagacaccaacctgaacttccagaacctgagcgtgatcggcttcagaatcctgctgctgaaagtggccggctttaacctgctgatgaccctgcggctgtggtccagccgcgccaagagaagcggatctggcgtgaagcagaccctgaatttcgacctgctgaagctggctggcgacgtggaatccaacccaggccctactagtaccatggactggatttggcgcatccttttccttgtcggcgctgctaccggcgcccattccgggcccgaagtgcaactggttgaatccggtggcggcctggtgcaacccggcggatctctcagacttagctgtgccgcctccggcagaaccttcacaatgggatggtacaggcaggctccagggaaagagagagagttcgtcgccgccatctctctgtctcccacactggcctactacgccgactctgtgaaaggccggttcaccatctccagagataatagcaagaacaccgtggtgctgcaaatgaactctctgagagccgaggatacagccctgtactattgtgccgctgaccggaagtccgtgatgagcatcagacccgattactggggacagggcacactggtcacagtgtctagtggatccggcggcggaggatctggcggaggcggatctgggggcggaggctctttcgaacaagttcagctggttcagagcggagccgaagtgaagaaacctggggcctctgtgaaggtgtcctgcaaggcttccggctataccttcaccagcttttggctgaactgggtccgacaggcccctggacaaggactggaatggatgggcaacatctaccccagcaccagctacaccgtgtacaaccagaaattcaaggaccgcgtgaccatgaccagggacaccagcacaagcacagtgtacatggaactgagcagcctgcggagcgaggataccgccgtgtattattgcgccagaacctggcggggcaacagcttcgattattggggccagggaaccaccgtgaccgtgtcatctacgcgtgaggacctgaagaacgtgttcccacctgaggtggccgtgttcgagcctagcaaggccgagatcgcccacacccagaaagccaccctcgtgtgcctggctaccggcttctaccccgaccatgtggaactgtcttggtgggtcaacggcaaagaggtgcacagcggcgtgtgtaccgacccccagccactgaaagaacagcccgccctgaacgacagccggtactgcctgagcagcagactgagagtgtccgccaccttctggcagaacccccggaaccacttcagatgccaggtgcagttctacggcctgagcgagaacgacgagtggacccaggacagagccaagcccgtgacccagatcgtgtctgccgaagcctggggcagagccgattgcggcatcaccagcgccagctaccaccagggcgtgctgagcgccaccatcctgtacgagatcctgctgggcaaggccaccctgtacgccgtgctggtgtctgccctggtgctgatggctatggtcaagcggaaggacagccgggga

SEQ ID NO: 37622 - DNA, 2310 bp, synthetic construct
  source 1..2310: mol_type = other DNA
atggccttaccagtgaccgccttgctcctgccgctggccttgctgctccacgccgccaggccgcaggttcagctgcaagagtctggccctggcctggtcaagcctagccaaacactgagcctgacctgtaccgtgtctggcggctctatcaccaccggcgagttctactggaactggttcagacagcctcctggcaaaggactggaatggatgggagccattgccgccagcggcagcacaacatacagccctagcttcgagagccggaccagcatcagcagagacaccagcaagaatcagttcagcctgaagctgagcagcgtgacagccgccgatacagccgtgtattactgcggcagatcctttggagtggccgccgtgacaaccggccagaatagaggacagggcaccctggtcacagtgtctagcggtaccggcggaggcggatctggcggcggaggtagcggtggcggaggatctgaattcgacatcgtgatgacacagagccctgatagcctggccgtgtctctgggagagagagccaccatcaactgcaagagcagccagagcctgctgaacagcggcaaccagaagaactacctggcctggtatcagcagaagcccggccagcctcctaagctgctgatctactggggcagcaccagatccacaggcgtgcccgatagattttctggctctggcagcggcaccgacttcaccctgacaatttctagcctgcaagccgaggacgtggccgtgtactactgccagaacgactacacataccccttcaccttcggccagggcaccaagctggaaatcaaactcgagatccagaaccctgatcctgccgtgtaccagctgcgggatagcaagagcagcgacaagagcgtgtgtctgttcaccgacttcgacagccagaccaacgtgtcccagagcaaggactccgacgtgtacatcaccgataagtgcgtgctggacatgcggagcatggacttcaagagcaactccgccgtggcctggtccaacaagtccgatttcgcctgcgccaacgccttcaacaacagcattatccccgaggacacattcttcccaagcagcgacgtgccctgcgacgtgaagctggtggaaaagagcttcgagacagacaccaacctgaacttccagaacctgagcgtgatcggcttcagaatcctgctgctgaaagtggccggctttaacctgctgatgaccctgcggctgtggtccagccgcgccaagagaagcggatctggcgtgaagcagaccctgaatttcgacctgctgaagctggctggcgacgtggaatccaacccaggccctactagtaccatggactggatttggcgcatccttttccttgtcggcgctgctaccggcgcccattccttcgaacaagttcagctggttcagagcggagccgaagtgaagaaacctggggcctctgtgaaggtgtcctgcaaggcttccggctataccttcaccagcttttggctgaactgggtccgacaggcccctggacaaggactggaatggatgggcaacatctaccccagcaccagctacaccgtgtacaaccagaaattcaaggaccgcgtgaccatgaccagggacaccagcacaagcacagtgtacatggaactgagcagcctgcggagcgaggataccgccgtgtattattgcgccagaacctggcggggcaacagcttcgattattggggccagggaaccaccgtgaccgtgtcatctacgcgtgaggacctgaagaacgtgttcccacctgaggtggccgtgttcgagcctagcaaggccgagatcgcccacacccagaaagccaccctcgtgtgcctggctaccggcttctaccccgaccatgtggaactgtcttggtgggtcaacggcaaagaggtgcacagcggcgtgtgtaccgacccccagccactgaaagaacagcccgccctgaacgacagccggtactgcctgagcagcagactgagagtgtccgccaccttctggcagaacccccggaaccacttcagatgccaggtgcagttctacggcctgagcgagaacgacgagtggacccaggacagagccaagcccgtgacccagatcgtgtctgccgaagcctggggcagagccgattgcggcatcaccagcgccagctaccaccagggcgtgctgagcgccaccatcctgtacgagatcctgctgggcaaggccaccctgtacgccgtgctggtgtctgccctggtgctgatggctatggtcaagcggaaggacagccgggga

SEQ ID NO: 37623 - DNA, 2709 bp, synthetic construct
  source 1..2709: mol_type = other DNA
atggccttaccagtgaccgccttgctcctgccgctggccttgctgctccacgccgccaggccggaagtgcagctggttgaatctggcggaggactggttcaggctggcggatctctgagactgtcttgtgccgccagcggcagaacctttagcatgggctggtttagacaggcccctggcaaagagagagagttcgtcgccgccatcacatactctggcggcagcccttactacgccgactctgtgaagggcagattcaccatcagccgggacaacgccaagaacaccgtgtacctccagatgaacagcctgaagcctgaggacaccgccgtgtactactgcgccgccaatccaacatacggcagcgactggaacgccgagaattggggccagggaacccaagtgacagtgtctagcggtaccggcggaggcggatctggcggcggaggtagcggtggcggaggatctgaattcgacatcgtgatgacacagagccctgatagcctggccgtgtctctgggagagagagccaccatcaactgcaagagcagccagagcctgctgaacagcggcaaccagaagaactacctggcctggtatcagcagaagcccggccagcctcctaagctgctgatctactggggcagcaccagatccacaggcgtgcccgatagattttctggctctggcagcggcaccgacttcaccctgacaatttctagcctgcaagccgaggacgtggccgtgtactactgccagaacgactacacataccccttcaccttcggccagggcaccaagctggaaatcaaactcgaggacctgaagaacgtgttcccacctgaggtggccgtgttcgagcctagcgaggccgagatcagccacacccagaaagccaccctcgtgtgcctggctaccggcttctaccccgaccatgtggaactgtcttggtgggtcaacggcaaagaggtgcacagcggcgtgtgtaccgacccccagccactgaaagaacagcccgccctgaacgacagccggtactgcctgagcagcagactgagagtgtccgccaccttctggcagaacccccggaaccacttcagatgccaggtgcagttctacggcctgagcgagaacgacgagtggacccaggacagagccaagcccgtgacccagatcgtgtctgccgaagcctggggcagagccgattgcggctttaccagcgagagctaccagcagggcgtgctgagcgccaccatcctgtacgagatcctgctgggcaaggccaccctgtacgccgtgctggtgtctgccctggtgctgatggctatggtcaagcggaaggacagccggggaagggccaagcgatctggatctggagcaacaaacttctcactactcaaacaagcaggtgacgtggaggagaatcccgggcctactagtaccatggactggatttggcgcatccttttccttgtcggcgctgctaccggcgcccattccgggccccaggtgcagctccaagaaagcggacccggactggttaagccctctcagaccctgtctctgacctgcacagttagcggagccagcattaccacaggcgagtattattggaattggtttcggcagccaccaggcaaggggcttgagtggatgggtgctattgctgcctctggcagcaccacctactctcccagctttgagagcagaacctccatcagccgggacacctccaaaaaccagttctctctgaagctgtcctccgtgaccgctgctgacaccgccgtctattattgtggccggtctttcggcgtggcagctgtgaccacaggacagaacagaggccagggaacacttgtgaccgtgtcctctggatccggcggcggaggatctggcggaggcggatctgggggcggaggctctttcgaacaagttcagctggttcagagcggagccgaagtgaagaaacctggggcctctgtgaaggtgtcctgcaaggcttccggctataccttcaccagcttttggctgaactgggtccgacaggcccctggacaaggactggaatggatgggcaacatctaccccagcaccagctacaccgtgtacaaccagaaattcaaggaccgcgtgaccatgaccagggacaccagcacaagcacagtgtacatggaactgagcagcctgcggagcgaggataccgccgtgtattattgcgccagaacctggcggggcaacagcttcgattattggggccagggaaccaccgtgaccgtgtcatctacgcgtatccagaaccctgatcctgccgtgtaccagctgcgggatagcaagagcagcgacaagagcgtgtgtctgttcaccgacttcgacagccagaccaacgtgtcccagagcaaggactccgacgtgtacatcaccgataagtgcgtgctggacatgcggagcatggacttcaagagcaactccgccgtggcctggtccaacaagtccgatttcgcctgcgccaacgccttcaacaacagcattatccccgaggacacattcttcccaagccccgagagcagctgcgacgtgaagctggtggaaaagagcttcgagacagacaccaacctgaacttccagaacctgagcgtgatcggcttcagaatcctgctgctgaaagtggccggctttaacctgctgatgaccctgcggctgtggtccagc

SEQ ID NO: 37624 - DNA, 2730 bp, synthetic construct
  source 1..2730: mol_type = other DNA
atggccttaccagtgaccgccttgctcctgccgctggccttgctgctccacgccgccaggccggaagtgcagctggttgaatctggcggaggactggttcaggctggcggatctctgagactgtcttgtgccgccagcggcagaacctttagcatgggctggtttagacaggcccctggcaaagagagagagttcgtcgccgccatcacatactctggcggcagcccttactacgccgactctgtgaagggcagattcaccatcagccgggacaacgccaagaacaccgtgtacctccagatgaacagcctgaagcctgaggacaccgccgtgtactactgcgccgccaatccaacatacggcagcgactggaacgccgagaattggggccagggaacccaagtgacagtgtctagcggtaccggcggaggcggatctggcggcggaggtagcggtggcggaggatctgaattcgacatcgtgatgacacagagccctgatagcctggccgtgtctctgggagagagagccaccatcaactgcaagagcagccagagcctgctgaacagcggcaaccagaagaactacctggcctggtatcagcagaagcccggccagcctcctaagctgctgatctactggggcagcaccagatccacaggcgtgcccgatagattttctggctctggcagcggcaccgacttcaccctgacaatttctagcctgcaagccgaggacgtggccgtgtactactgccagaacgactacacataccccttcaccttcggccagggcaccaagctggaaatcaaactcgagatccagaaccctgatcctgccgtgtaccagctgcgggatagcaagagcagcgacaagagcgtgtgtctgttcaccgacttcgacagccagaccaacgtgtcccagagcaaggactccgacgtgtacatcaccgataagtgcgtgctggacatgcggagcatggacttcaagagcaactccgccgtggcctggtccaacaagtccgatttcgcctgcgccaacgccttcaacaacagcattatccccgaggacacattcttcccaagcagcgacgtgccctgcgacgtgaagctggtggaaaagagcttcgagacagacaccaacctgaacttccagaacctgagcgtgatcggcttcagaatcctgctgctgaaagtggccggctttaacctgctgatgaccctgcggctgtggtccagccgcgccaagagaagcggatctggcgtgaagcagaccctgaatttcgacctgctgaagctggctggcgacgtggaatccaacccaggccctactagtaccatggactggatttggcgcatccttttccttgtcggcgctgctaccggcgcccattccgggccccaggtgcagctggttgaatctggcggaggactggttcagcctggcggatctctgagactgtcttgtgccgccagcggcaacatcaacagcagaaactgcatgggctggttcagacaggcccctggcaagggaagagaaggcgtggcagctatcggccaagtgaccggcagaacctactacgtggacagcgtgaagggcagattcaccatcagcctggacaacagcaagaacaccctgtacctccagatgaacagcctgagagccgaggacaccgccgtgtactattgtgctgctgcccctggctgtctgctgtctgcacttagaagcgccgactacagaaactggggccagggcacactggtcaccgtttcttctggatccggcggcggaggatctggcggaggcggatctgggggcggaggctctttcgaacaagttcagctggttcagagcggagccgaagtgaagaaacctggggcctctgtgaaggtgtcctgcaaggcttccggctataccttcaccagcttttggctgaactgggtccgacaggcccctggacaaggactggaatggatgggcaacatctaccccagcaccagctacaccgtgtacaaccagaaattcaaggaccgcgtgaccatgaccagggacaccagcacaagcacagtgtacatggaactgagcagcctgcggagcgaggataccgccgtgtattattgcgccagaacctggcggggcaacagcttcgattattggggccagggaaccaccgtgaccgtgtcatctacgcgtgaggacctgaagaacgtgttcccacctgaggtggccgtgttcgagcctagcaaggccgagatcgcccacacccagaaagccaccctcgtgtgcctggctaccggcttctaccccgaccatgtggaactgtcttggtgggtcaacggcaaagaggtgcacagcggcgtgtgtaccgacccccagccactgaaagaacagcccgccctgaacgacagccggtactgcctgagcagcagactgagagtgtccgccaccttctggcagaacccccggaaccacttcagatgccaggtgcagttctacggcctgagcgagaacgacgagtggacccaggacagagccaagcccgtgacccagatcgtgtctgccgaagcctggggcagagccgattgcggcatcaccagcgccagctaccaccagggcgtgctgagcgccaccatcctgtacgagatcctgctgggcaaggccaccctgtacgccgtgctggtgtctgccctggtgctgatggctatggtcaagcggaaggacagccgggga

SEQ ID NO: 37625 - DNA, 2718 bp, synthetic construct
  source 1..2718: mol_type = other DNA
atggccttaccagtgaccgccttgctcctgccgctggccttgctgctccacgccgccaggccggaagtgcagctggttgaatctggcggaggactggttcaggctggcggatctctgagactgtcttgtgccgccagcggcagaacctttagcatgggctggtttagacaggcccctggcaaagagagagagttcgtcgccgccatcacatactctggcggcagcccttactacgccgactctgtgaagggcagattcaccatcagccgggacaacgccaagaacaccgtgtacctccagatgaacagcctgaagcctgaggacaccgccgtgtactactgcgccgccaatccaacatacggcagcgactggaacgccgagaattggggccagggaacccaagtgacagtgtctagcggtaccggcggaggcggatctggcggcggaggtagcggtggcggaggatctgaattcgacatcgtgatgacacagagccctgatagcctggccgtgtctctgggagagagagccaccatcaactgcaagagcagccagagcctgctgaacagcggcaaccagaagaactacctggcctggtatcagcagaagcccggccagcctcctaagctgctgatctactggggcagcaccagatccacaggcgtgcccgatagattttctggctctggcagcggcaccgacttcaccctgacaatttctagcctgcaagccgaggacgtggccgtgtactactgccagaacgactacacataccccttcaccttcggccagggcaccaagctggaaatcaaactcgaggacctgaagaacgtgttcccacctgaggtggccgtgttcgagcctagcgaggccgagatcagccacacccagaaagccaccctcgtgtgcctggctaccggcttctaccccgaccatgtggaactgtcttggtgggtcaacggcaaagaggtgcacagcggcgtgtgtaccgacccccagccactgaaagaacagcccgccctgaacgacagccggtactgcctgagcagcagactgagagtgtccgccaccttctggcagaacccccggaaccacttcagatgccaggtgcagttctacggcctgagcgagaacgacgagtggacccaggacagagccaagcccgtgacccagatcgtgtctgccgaagcctggggcagagccgattgcggctttaccagcgagagctaccagcagggcgtgctgagcgccaccatcctgtacgagatcctgctgggcaaggccaccctgtacgccgtgctggtgtctgccctggtgctgatggctatggtcaagcggaaggacagccggggaagggccaagcgatctggatctggagcaacaaacttctcactactcaaacaagcaggtgacgtggaggagaatcccgggcctactagtaccatggactggatttggcgcatccttttccttgtcggcgctgctaccggcgcccattccgggccccaggtgcagctggttgaatctggcggaggactggttcagcctggcggatctctgagactgtcttgtgccgccagcggcaacatcaacagcagaaactgcatgggctggttcagacaggcccctggcaagggaagagaaggcgtggcagctatcggccaagtgaccggcagaacctactacgtggacagcgtgaagggcagattcaccatcagcctggacaacagcaagaacaccctgtacctccagatgaacagcctgagagccgaggacaccgccgtgtactattgtgctgctgcccctggctgtctgctgtctgcacttagaagcgccgactacagaaactggggccagggcacactggtcaccgtttcttctggatccggcggcggaggatctggcggaggcggatctgggggcggaggctctttcgaacaagttcagctggttcagagcggagccgaagtgaagaaacctggggcctctgtgaaggtgtcctgcaaggcttccggctataccttcaccagcttttggctgaactgggtccgacaggcccctggacaaggactggaatggatgggcaacatctaccccagcaccagctacaccgtgtacaaccagaaattcaaggaccgcgtgaccatgaccagggacaccagcacaagcacagtgtacatggaactgagcagcctgcggagcgaggataccgccgtgtattattgcgccagaacctggcggggcaacagcttcgattattggggccagggaaccaccgtgaccgtgtcatctacgcgtatccagaaccctgatcctgccgtgtaccagctgcgggatagcaagagcagcgacaagagcgtgtgtctgttcaccgacttcgacagccagaccaacgtgtcccagagcaaggactccgacgtgtacatcaccgataagtgcgtgctggacatgcggagcatggacttcaagagcaactccgccgtggcctggtccaacaagtccgatttcgcctgcgccaacgccttcaacaacagcattatccccgaggacacattcttcccaagccccgagagcagctgcgacgtgaagctggtggaaaagagcttcgagacagacaccaacctgaacttccagaacctgagcgtgatcggcttcagaatcctgctgctgaaagtggccggctttaacctgctgatgaccctgcggctgtggtccagc

SEQ ID NO: 37626 - DNA, 2718 bp, synthetic construct
  source 1..2718: mol_type = other DNA
atggccttaccagtgaccgccttgctcctgccgctggccttgctgctccacgccgccaggccggaagtgcaactggttgaatccggtggcggcctggtgcaagcaggcggatctctcagacttagctgtgccgcctccggcagaaccttcacaatgggatggtttaggcaggctccagggaaagagagagagttcgtcgccgccatctctctgtctcccacactggcctactacgccgactctgtgaaaggccggttcaccatctccagagataatgccaagaacaccgtggtgctgcaaatgaactctctgaaacccgaggatacagccctgtactattgtgccgctgaccggaagtccgtgatgagcatcagacccgattactggggacagggcacacaagtcacagtgtcctctggtaccggcggaggcggatctggcggcggaggtagcggtggcggaggatctgaattcgacatcgtgatgacacagagccctgatagcctggccgtgtctctgggagagagagccaccatcaactgcaagagcagccagagcctgctgaacagcggcaaccagaagaactacctggcctggtatcagcagaagcccggccagcctcctaagctgctgatctactggggcagcaccagatccacaggcgtgcccgatagattttctggctctggcagcggcaccgacttcaccctgacaatttctagcctgcaagccgaggacgtggccgtgtactactgccagaacgactacacataccccttcaccttcggccagggcaccaagctggaaatcaaactcgaggacctgaagaacgtgttcccacctgaggtggccgtgttcgagcctagcgaggccgagatcagccacacccagaaagccaccctcgtgtgcctggctaccggcttctaccccgaccatgtggaactgtcttggtgggtcaacggcaaagaggtgcacagcggcgtgtgtaccgacccccagccactgaaagaacagcccgccctgaacgacagccggtactgcctgagcagcagactgagagtgtccgccaccttctggcagaacccccggaaccacttcagatgccaggtgcagttctacggcctgagcgagaacgacgagtggacccaggacagagccaagcccgtgacccagatcgtgtctgccgaagcctggggcagagccgattgcggctttaccagcgagagctaccagcagggcgtgctgagcgccaccatcctgtacgagatcctgctgggcaaggccaccctgtacgccgtgctggtgtctgccctggtgctgatggctatggtcaagcggaaggacagccggggaagggccaagcgatctggatctggagcaacaaacttctcactactcaaacaagcaggtgacgtggaggagaatcccgggcctactagtaccatggactggatttggcgcatccttttccttgtcggcgctgctaccggcgcccattccgggccccaggtgcagctggttgaatctggcggaggactggttcagcctggcggatctctgagactgtcttgtgccgccagcggcaacatcaacagcagaaactgcatgggctggttcagacaggcccctggcaagggaagagaaggcgtggcagctatcggccaagtgaccggcagaacctactacgtggacagcgtgaagggcagattcaccatcagcctggacaacagcaagaacaccctgtacctccagatgaacagcctgagagccgaggacaccgccgtgtactattgtgctgctgcccctggctgtctgctgtctgcacttagaagcgccgactacagaaactggggccagggcacactggtcaccgtttcttctggatccggcggcggaggatctggcggaggcggatctgggggcggaggctctttcgaacaagttcagctggttcagagcggagccgaagtgaagaaacctggggcctctgtgaaggtgtcctgcaaggcttccggctataccttcaccagcttttggctgaactgggtccgacaggcccctggacaaggactggaatggatgggcaacatctaccccagcaccagctacaccgtgtacaaccagaaattcaaggaccgcgtgaccatgaccagggacaccagcacaagcacagtgtacatggaactgagcagcctgcggagcgaggataccgccgtgtattattgcgccagaacctggcggggcaacagcttcgattattggggccagggaaccaccgtgaccgtgtcatctacgcgtatccagaaccctgatcctgccgtgtaccagctgcgggatagcaagagcagcgacaagagcgtgtgtctgttcaccgacttcgacagccagaccaacgtgtcccagagcaaggactccgacgtgtacatcaccgataagtgcgtgctggacatgcggagcatggacttcaagagcaactccgccgtggcctggtccaacaagtccgatttcgcctgcgccaacgccttcaacaacagcattatccccgaggacacattcttcccaagccccgagagcagctgcgacgtgaagctggtggaaaagagcttcgagacagacaccaacctgaacttccagaacctgagcgtgatcggcttcagaatcctgctgctgaaagtggccggctttaacctgctgatgaccctgcggctgtggtccagc

SEQ ID NO: 37627 - DNA, 2730 bp, synthetic construct
  source 1..2730: mol_type = other DNA
atggccttaccagtgaccgccttgctcctgccgctggccttgctgctccacgccgccaggccgcaggttcagctgcaagagtctggccctggcctggtcaagcctagccaaacactgagcctgacctgtaccgtgtctggcggctctatcaccaccggcgagttctactggaactggttcagacagcctcctggcaaaggactggaatggatgggagccattgccgccagcggcagcacaacatacagccctagcttcgagagccggaccagcatcagcagagacaccagcaagaatcagttcagcctgaagctgagcagcgtgacagccgccgatacagccgtgtattactgcggcagatcctttggagtggccgccgtgacaaccggccagaatagaggacagggcaccctggtcacagtgtctagcggtaccggcggaggcggatctggcggcggaggtagcggtggcggaggatctgaattcgacatcgtgatgacacagagccctgatagcctggccgtgtctctgggagagagagccaccatcaactgcaagagcagccagagcctgctgaacagcggcaaccagaagaactacctggcctggtatcagcagaagcccggccagcctcctaagctgctgatctactggggcagcaccagatccacaggcgtgcccgatagattttctggctctggcagcggcaccgacttcaccctgacaatttctagcctgcaagccgaggacgtggccgtgtactactgccagaacgactacacataccccttcaccttcggccagggcaccaagctggaaatcaaactcgaggacctgaagaacgtgttcccacctgaggtggccgtgttcgagcctagcgaggccgagatcagccacacccagaaagccaccctcgtgtgcctggctaccggcttctaccccgaccatgtggaactgtcttggtgggtcaacggcaaagaggtgcacagcggcgtgtgtaccgacccccagccactgaaagaacagcccgccctgaacgacagccggtactgcctgagcagcagactgagagtgtccgccaccttctggcagaacccccggaaccacttcagatgccaggtgcagttctacggcctgagcgagaacgacgagtggacccaggacagagccaagcccgtgacccagatcgtgtctgccgaagcctggggcagagccgattgcggctttaccagcgagagctaccagcagggcgtgctgagcgccaccatcctgtacgagatcctgctgggcaaggccaccctgtacgccgtgctggtgtctgccctggtgctgatggctatggtcaagcggaaggacagccggggaagggccaagcgatctggatctggagcaacaaacttctcactactcaaacaagcaggtgacgtggaggagaatcccgggcctactagtaccatggactggatttggcgcatccttttccttgtcggcgctgctaccggcgcccattccgggccccaggtgcagctggttgaatctggcggaggactggttcagcctggcggatctctgagactgtcttgtgccgccagcggcaacatcaacagcagaaactgcatgggctggttcagacaggcccctggcaagggaagagaaggcgtggcagctatcggccaagtgaccggcagaacctactacgtggacagcgtgaagggcagattcaccatcagcctggacaacagcaagaacaccctgtacctccagatgaacagcctgagagccgaggacaccgccgtgtactattgtgctgctgcccctggctgtctgctgtctgcacttagaagcgccgactacagaaactggggccagggcacactggtcaccgtttcttctggatccggcggcggaggatctggcggaggcggatctgggggcggaggctctttcgaacaagttcagctggttcagagcggagccgaagtgaagaaacctggggcctctgtgaaggtgtcctgcaaggcttccggctataccttcaccagcttttggctgaactgggtccgacaggcccctggacaaggactggaatggatgggcaacatctaccccagcaccagctacaccgtgtacaaccagaaattcaaggaccgcgtgaccatgaccagggacaccagcacaagcacagtgtacatggaactgagcagcctgcggagcgaggataccgccgtgtattattgcgccagaacctggcggggcaacagcttcgattattggggccagggaaccaccgtgaccgtgtcatctacgcgtatccagaaccctgatcctgccgtgtaccagctgcgggatagcaagagcagcgacaagagcgtgtgtctgttcaccgacttcgacagccagaccaacgtgtcccagagcaaggactccgacgtgtacatcaccgataagtgcgtgctggacatgcggagcatggacttcaagagcaactccgccgtggcctggtccaacaagtccgatttcgcctgcgccaacgccttcaacaacagcattatccccgaggacacattcttcccaagccccgagagcagctgcgacgtgaagctggtggaaaagagcttcgagacagacaccaacctgaacttccagaacctgagcgtgatcggcttcagaatcctgctgctgaaagtggccggctttaacctgctgatgaccctgcggctgtggtccagc

SEQ ID NO: 37628 - DNA, 1467 bp, synthetic construct
  source 1..1467: mol_type = other DNA
atggccttaccagtgaccgccttgctcctgccgctggccttgctgctccacgccgccaggccggacatcgtgatgacacagagccctgatagcctggccgtgtctctgggagagagagccaccatcaactgcaagagcagccagagcctgctgaacagcggcaacaacaagaactacgtgacatggtatcagcagaagcccggccagcctcctaagctgctgatctactggggcagcaccagatccacaggcgtgcccgatagattttctggctctggcagcggcaccgacttcaccctgacaatttctagcctgcaagccgaggacgtggccgtgtactactgccagaacgactacacataccccttcaccttcggccagggcaccaagctggaaatcaaaggcggaggcggaagtggaggcggaggatctggcggcggaggctctcaagttcagctggttcagagcggagccgaagtgaagaaacctggggcctctgtgaaggtgtcctgcaaggcttccggctataccttcaccagcttttggctgaactgggtccgacaggcccctggacaaggactggaatggatgggcaacatctaccccagcgacagctacaccgtgtacaaccagaaattcaaggaccgcgtgaccatgaccagggacaccagcacaagcacagtgtacatggaactgagcagcctgcggagcgaggataccgccgtgtattattgcgccagaacctggcggggcaacagcttcgattattggggccagggaaccaccgtgaccgtgtcatctacgcgtaaaattgaagttatgtatcctcctccttacctagacaatgagaagagcaatggaaccattatccatgtgaaagggaaacacctttgtccaagtcccctatttcccggaccttctaagcccttttgggtgctggtggtggttgggggagtcctggcttgctatagcttgctagtaacagtggcctttattattttctgggtgaggagtaagaggagcaggctcctgcacagtgactacatgaacatgactccacgccgccccggacccacccgcaagcattaccagccctatgccccaccacgcgacttcgcagcctatcgctccagagtgaagttcagcaggagcgcagacgcccccgcgtaccagcagggccagaaccagctctataacgagctcaatctaggacgaagagaggagtacgatgttttggacaagagacgtggccgggaccctgagatggggggaaagccgagaaggaagaaccctcaggaaggcctgtacaatgaactgcagaaagataagatggcggaggcctacagtgagattgggatgaaaggcgagcgccggaggggcaaggggcacgatggcctttaccagggtctcagtacagccaccaaggacacctacgacgcccttcacatgcaggccctgccccctcgc

SEQ ID NO: 37629 - DNA, 1485 bp, synthetic construct
  source 1..1485: mol_type = other DNA
atggccttaccagtgaccgccttgctcctgccgctggccttgctgctccacgccgccaggccggacatcgtgatgacacagagccctgatagcctggccgtgtctctgggagagagagccaccatcaactgcaagagcagccagagcctgctgaacagcggcaacaacaagaactacgtgacatggtatcagcagaagcccggccagcctcctaagctgctgatctactggggcagcaccagatccacaggcgtgcccgatagattttctggctctggcagcggcaccgacttcaccctgacaatttctagcctgcaagccgaggacgtggccgtgtactactgccagaacgactacacataccccttcaccttcggccagggcaccaagctggaaatcaaaggcggaggcggaagtggaggcggaggatctggcggcggaggctctcaagttcagctggttcagagcggagccgaagtgaagaaacctggggcctctgtgaaggtgtcctgcaaggcttccggctataccttcaccagcttttggctgaactgggtccgacaggcccctggacaaggactggaatggatgggcaacatctaccccagcgacagctacaccgtgtacaaccagaaattcaaggaccgcgtgaccatgaccagggacaccagcacaagcacagtgtacatggaactgagcagcctgcggagcgaggataccgccgtgtattattgcgccagaacctggcggggcaacagcttcgattattggggccagggaaccaccgtgaccgtgtcatctacgcgtgcgaagcccaccacgacgccagcgccgcgaccaccaacaccggcgcccaccatcgcgtcgcagcccctgtccctgcgcccagaggcgtgccggccagcggcggggggcgcagtgcacacgagggggctggacttcgcctgtgacatctacatctgggcgcccttggccgggacttgtggggtccttctcctgtcactggttatcaccctttactgcaaacggggcagaaagaaactcctgtatatattcaaacaaccatttatgagaccagtacaaactactcaagaggaagatggctgtagctgccgatttccagaagaagaagaaggaggatgtgaactgagagtgaagttcagcaggagcgcagacgcccccgcgtaccagcagggccagaaccagctctataacgagctgaatctaggacgaagagaggagtacgatgttttggacaagagacgtggccgggaccctgagatggggggaaagccgagaaggaagaaccctcaggaaggcctgtacaatgaactgcagaaagataagatggcggaggcctacagtgagattgggatgaaaggcgagcgccggaggggcaaggggcacgatggcctttaccagggtctcagtacagccaccaaggacacctacgacgcccttcacatgcaggccctgccccctcgc

SEQ ID NO: 37630 - DNA, 1485 bp, synthetic construct
  source 1..1485: mol_type = other DNA
atggccttaccagtgaccgccttgctcctgccgctggccttgctgctccacgccgccaggccgcaagttcagctggttcagagcggagccgaagtgaagaaacctggggcctctgtgaaggtgtcctgcaaggcttccggctataccttcaccagcttttggctgaactgggtccgacaggcccctggacaaggactggaatggatgggcaacatctaccccagcgacagctacaccgtgtacaaccagaaattcaaggaccgcgtgaccatgaccagggacaccagcacaagcacagtgtacatggaactgagcagcctgcggagcgaggataccgccgtgtattattgcgccagaacctggcggggcaacagcttcgattattggggccagggaaccaccgtgaccgtgtcatctggcggaggcggaagtggaggcggaggatctggcggcggaggctctgacatcgtgatgacacagagccctgatagcctggccgtgtctctgggagagagagccaccatcaactgcaagagcagccagagcctgctgaacagcggcaacaacaagaactacgtgacatggtatcagcagaagcccggccagcctcctaagctgctgatctactggggcagcaccagatccacaggcgtgcccgatagattttctggctctggcagcggcaccgacttcaccctgacaatttctagcctgcaagccgaggacgtggccgtgtactactgccagaacgactacacataccccttcaccttcggccagggcaccaagctggaaatcaaaacgcgtgcgaagcccaccacgacgccagcgccgcgaccaccaacaccggcgcccaccatcgcgtcgcagcccctgtccctgcgcccagaggcgtgccggccagcggcggggggcgcagtgcacacgagggggctggacttcgcctgtgacatctacatctgggcgcccttggccgggacttgtggggtccttctcctgtcactggttatcaccctttactgcaaacggggcagaaagaaactcctgtatatattcaaacaaccatttatgagaccagtacaaactactcaagaggaagatggctgtagctgccgatttccagaagaagaagaaggaggatgtgaactgagagtgaagttcagcaggagcgcagacgcccccgcgtaccagcagggccagaaccagctctataacgagctgaatctaggacgaagagaggagtacgatgttttggacaagagacgtggccgggaccctgagatggggggaaagccgagaaggaagaaccctcaggaaggcctgtacaatgaactgcagaaagataagatggcggaggcctacagtgagattgggatgaaaggcgagcgccggaggggcaaggggcacgatggcctttaccagggtctcagtacagccaccaaggacacctacgacgcccttcacatgcaggccctgccccctcgc

SEQ ID NO: 37631 - DNA, 1884 bp, synthetic construct
  source 1..1884: mol_type = other DNA
atggccttaccagtgaccgccttgctcctgccgctggccttgctgctccacgccgccaggccggacatcgtgatgacacagagccctgatagcctggccgtgtctctgggagagagagccaccatcaactgcaagagcagccagagcctgctgaacagcggcaacaacaagaactacgtgacatggtatcagcagaagcccggccagcctcctaagctgctgatctactggggcagcaccagatccacaggcgtgcccgatagattttctggctctggcagcggcaccgacttcaccctgacaatttctagcctgcaagccgaggacgtggccgtgtactactgccagaacgactacacataccccttcaccttcggccagggcaccaagctggaaatcaaactcgagatccagaaccctgatcctgccgtgtaccagctgcgggatagcaagagcagcgacaagagcgtgtgtctgttcaccgacttcgacagccagaccaacgtgtcccagagcaaggactccgacgtgtacatcaccgataagtgcgtgctggacatgcggagcatggacttcaagagcaactccgccgtggcctggtccaacaagtccgatttcgcctgcgccaacgccttcaacaacagcattatccccgaggacacattcttcccaagcagcgacgtgccctgcgacgtgaagctggtggaaaagagcttcgagacagacaccaacctgaacttccagaacctgagcgtgatcggcttcagaatcctgctgctgaaagtggccggctttaacctgctgatgaccctgcggctgtggtccagccgcgccaagagaagcggatctggcgtgaagcagaccctgaatttcgacctgctgaagctggctggcgacgtggaatccaacccaggccctactagtatggactggatttggcgcatccttttccttgtcggcgctgctaccggcgcgcattccttcgaacaagttcagctggttcagagcggagccgaagtgaagaaacctggggcctctgtgaaggtgtcctgcaaggcttccggctataccttcaccagcttttggctgaactgggtccgacaggcccctggacaaggactggaatggatgggcaacatctaccccagcgacagctacaccgtgtacaaccagaaattcaaggaccgcgtgaccatgaccagggacaccagcacaagcacagtgtacatggaactgagcagcctgcggagcgaggataccgccgtgtattattgcgccagaacctggcggggcaacagcttcgattattggggccagggaaccaccgtgaccgtgtcatctacgcgtgaggacctgaagaacgtgttcccacctgaggtggccgtgttcgagcctagcaaggccgagatcgcccacacccagaaagccaccctcgtgtgcctggctaccggcttctaccccgaccatgtggaactgtcttggtgggtcaacggcaaagaggtgcacagcggcgtgtgtaccgacccccagccactgaaagaacagcccgccctgaacgacagccggtactgcctgagcagcagactgagagtgtccgccaccttctggcagaacccccggaaccacttcagatgccaggtgcagttctacggcctgagcgagaacgacgagtggacccaggacagagccaagcccgtgacccagatcgtgtctgccgaagcctggggcagagccgattgcggcatcaccagcgccagctaccaccagggcgtgctgagcgccaccatcctgtacgagatcctgctgggcaaggccaccctgtacgccgtgctggtgtctgccctggtgctgatggctatggtcaagcggaaggacagccgggga

SEQ ID NO: 37632 - DNA, 1872 bp, synthetic construct
  source 1..1872: mol_type = other DNA
atggccttaccagtgaccgccttgctcctgccgctggccttgctgctccacgccgccaggccggacatcgtgatgacacagagccctgatagcctggccgtgtctctgggagagagagccaccatcaactgcaagagcagccagagcctgctgaacagcggcaacaacaagaactacgtgacatggtatcagcagaagcccggccagcctcctaagctgctgatctactggggcagcaccagatccacaggcgtgcccgatagattttctggctctggcagcggcaccgacttcaccctgacaatttctagcctgcaagccgaggacgtggccgtgtactactgccagaacgactacacataccccttcaccttcggccagggcaccaagctggaaatcaaactcgaggacctgaagaacgtgttcccacctgaggtggccgtgttcgagcctagcaaggccgagatcgcccacacccagaaagccaccctcgtgtgcctggctaccggcttctaccccgaccatgtggaactgtcttggtgggtcaacggcaaagaggtgcacagcggcgtgtgtaccgacccccagccactgaaagaacagcccgccctgaacgacagccggtactgcctgagcagcagactgagagtgtccgccaccttctggcagaacccccggaaccacttcagatgccaggtgcagttctacggcctgagcgagaacgacgagtggacccaggacagagccaagcccgtgacccagatcgtgtctgccgaagcctggggcagagccgattgcggcatcaccagcgccagctaccaccagggcgtgctgagcgccaccatcctgtacgagatcctgctgggcaaggccaccctgtacgccgtgctggtgtctgccctggtgctgatggctatggtcaagcggaaggacagccggggaagggccaagcgatctggatctggagcaacaaacttctcactactcaaacaagcaggtgacgtggaggagaatcccgggcctactagtatggactggatttggcgcatccttttccttgtcggcgctgctaccggcgcgcattccttcgaacaagttcagctggttcagagcggagccgaagtgaagaaacctggggcctctgtgaaggtgtcctgcaaggcttccggctataccttcaccagcttttggctgaactgggtccgacaggcccctggacaaggactggaatggatgggcaacatctaccccagcgacagctacaccgtgtacaaccagaaattcaaggaccgcgtgaccatgaccagggacaccagcacaagcacagtgtacatggaactgagcagcctgcggagcgaggataccgccgtgtattattgcgccagaacctggcggggcaacagcttcgattattggggccagggaaccaccgtgaccgtgtcatctacgcgtatccagaaccctgatcctgccgtgtaccagctgcgggatagcaagagcagcgacaagagcgtgtgtctgttcaccgacttcgacagccagaccaacgtgtcccagagcaaggactccgacgtgtacatcaccgataagtgcgtgctggacatgcggagcatggacttcaagagcaactccgccgtggcctggtccaacaagtccgatttcgcctgcgccaacgccttcaacaacagcattatccccgaggacacattcttcccaagcagcgacgtgccctgcgacgtgaagctggtggaaaagagcttcgagacagacaccaacctgaacttccagaacctgagcgtgatcggcttcagaatcctgctgctgaaagtggccggctttaacctgctgatgaccctgcggctgtggtccagc

SEQ ID NO: 37633 - DNA, 1872 bp, synthetic construct
  source 1..1872: mol_type = other DNA
atggccttaccagtgaccgccttgctcctgccgctggccttgctgctccacgccgccaggccggacatcgtgatgacacagagccctgatagcctggccgtgtctctgggagagagagccaccatcaactgcaagagcagccagagcctgctgaacagcggcaacaacaagaactacgtgacatggtatcagcagaagcccggccagcctcctaagctgctgatctactggggcagcaccagatccacaggcgtgcccgatagattttctggctctggcagcggcaccgacttcaccctgacaatttctagcctgcaagccgaggacgtggccgtgtactactgccagaacgactacacataccccttcaccttcggccagggcaccaagctggaaatcaaactcgaggacctgaagaacgtgttcccacctgaggtggccgtgttcgagcctagcgaggccgagatcagccacacccagaaagccaccctcgtgtgcctggctaccggcttctaccccgaccatgtggaactgtcttggtgggtcaacggcaaagaggtgcacagcggcgtgtgtaccgacccccagccactgaaagaacagcccgccctgaacgacagccggtactgcctgagcagcagactgagagtgtccgccaccttctggcagaacccccggaaccacttcagatgccaggtgcagttctacggcctgagcgagaacgacgagtggacccaggacagagccaagcccgtgacccagatcgtgtctgccgaagcctggggcagagccgattgcggctttaccagcgagagctaccagcagggcgtgctgagcgccaccatcctgtacgagatcctgctgggcaaggccaccctgtacgccgtgctggtgtctgccctggtgctgatggctatggtcaagcggaaggacagccggggaagggccaagcgatctggatctggagcaacaaacttctcactactcaaacaagcaggtgacgtggaggagaatcccgggcctactagtatggactggatttggcgcatccttttccttgtcggcgctgctaccggcgcgcattccttcgaacaagttcagctggttcagagcggagccgaagtgaagaaacctggggcctctgtgaaggtgtcctgcaaggcttccggctataccttcaccagcttttggctgaactgggtccgacaggcccctggacaaggactggaatggatgggcaacatctaccccagcgacagctacaccgtgtacaaccagaaattcaaggaccgcgtgaccatgaccagggacaccagcacaagcacagtgtacatggaactgagcagcctgcggagcgaggataccgccgtgtattattgcgccagaacctggcggggcaacagcttcgattattggggccagggaaccaccgtgaccgtgtcatctacgcgtatccagaaccctgatcctgccgtgtaccagctgcgggatagcaagagcagcgacaagagcgtgtgtctgttcaccgacttcgacagccagaccaacgtgtcccagagcaaggactccgacgtgtacatcaccgataagtgcgtgctggacatgcggagcatggacttcaagagcaactccgccgtggcctggtccaacaagtccgatttcgcctgcgccaacgccttcaacaacagcattatccccgaggacacattcttcccaagccccgagagcagctgcgacgtgaagctggtggaaaagagcttcgagacagacaccaacctgaacttccagaacctgagcgtgatcggcttcagaatcctgctgctgaaagtggccggctttaacctgctgatgaccctgcggctgtggtccagc

SEQ ID NO: 37634 - DNA, 1884 bp, synthetic construct
  source 1..1884: mol_type = other DNA
atggccttaccagtgaccgccttgctcctgccgctggccttgctgctccacgccgccaggccggacatcgtgatgacacagagccctgatagcctggccgtgtctctgggagagagagccaccatcaactgcaagagcagccagagcctgctgaacagcggcaacaacaagaactacgtgacatggtatcagcagaagcccggccagcctcctaagctgctgatctactggggcagcaccagatccacaggcgtgcccgatagattttctggctctggcagcggcaccgacttcaccctgacaatttctagcctgcaagccgaggacgtggccgtgtactactgccagaacgactacacataccccttcaccttcggccagggcaccaagctggaaatcaaactcgagatccagaaccctgatcctgccgtgtaccagctgcgggatagcaagagcagcgacaagagcgtgtgtctgttcaccgacttcgacagccagaccaacgtgtcccagagcaaggactccgacgtgtacatcaccgataagtgcgtgctggacatgcggagcatggacttcaagagcaactccgccgtggcctggtccaacaagtccgatttcgcctgcgccaacgccttcaacaacagcattatccccgaggacacattcttcccaagccccgagagcagctgcgacgtgaagctggtggaaaagagcttcgagacagacaccaacctgaacttccagaacctgagcgtgatcggcttcagaatcctgctgctgaaagtggccggctttaacctgctgatgaccctgcggctgtggtccagccgcgccaagagaagcggatctggcgtgaagcagaccctgaatttcgacctgctgaagctggctggcgacgtggaatccaacccaggccctactagtatggactggatttggcgcatccttttccttgtcggcgctgctaccggcgcgcattccttcgaacaagttcagctggttcagagcggagccgaagtgaagaaacctggggcctctgtgaaggtgtcctgcaaggcttccggctataccttcaccagcttttggctgaactgggtccgacaggcccctggacaaggactggaatggatgggcaacatctaccccagcgacagctacaccgtgtacaaccagaaattcaaggaccgcgtgaccatgaccagggacaccagcacaagcacagtgtacatggaactgagcagcctgcggagcgaggataccgccgtgtattattgcgccagaacctggcggggcaacagcttcgattattggggccagggaaccaccgtgaccgtgtcatctacgcgtgaggacctgaagaacgtgttcccacctgaggtggccgtgttcgagcctagcgaggccgagatcagccacacccagaaagccaccctcgtgtgcctggctaccggcttctaccccgaccatgtggaactgtcttggtgggtcaacggcaaagaggtgcacagcggcgtgtgtaccgacccccagccactgaaagaacagcccgccctgaacgacagccggtactgcctgagcagcagactgagagtgtccgccaccttctggcagaacccccggaaccacttcagatgccaggtgcagttctacggcctgagcgagaacgacgagtggacccaggacagagccaagcccgtgacccagatcgtgtctgccgaagcctggggcagagccgattgcggctttaccagcgagagctaccagcagggcgtgctgagcgccaccatcctgtacgagatcctgctgggcaaggccaccctgtacgccgtgctggtgtctgccctggtgctgatggctatggtcaagcggaaggacagccgggga

SEQ ID NO: 37635 - DNA, 1920 bp, synthetic construct
  source 1..1920: mol_type = other DNA
atggccttaccagtgaccgccttgctcctgccgctggccttgctgctccacgccgccaggccgctcgaggaggacctgaagaacgtgttcccacctgaggtggccgtgttcgagcctagcaaggccgagatcgcccacacccagaaagccaccctcgtgtgcctggctaccggcttctaccccgaccatgtggaactgtcttggtgggtcaacggcaaagaggtgcacagcggcgtgtgtaccgacccccagccactgaaagaacagcccgccctgaacgacagccggtactgcctgagcagcagactgagagtgtccgccaccttctggcagaacccccggaaccacttcagatgccaggtgcagttctacggcctgagcgagaacgacgagtggacccaggacagagccaagcccgtgacccagatcgtgtctgccgaagcctggggcagagccgattgcggcatcaccagcgccagctaccaccagggcgtgctgagcgccaccatcctgtacgagatcctgctgggcaaggccaccctgtacgccgtgctggtgtctgccctggtgctgatggctatggtcaagcggaaggacagccggggaagggccaagcgatctggatctggagcaacaaacttctcactactcaaacaagcaggtgacgtggaggagaatcccgggcctactagcatggccttaccagtgaccgccttgctcctgccgctggccttgctgctccacgccgccaggccggacatcgtgatgacacagagccctgatagcctggccgtgtctctgggagagagagccaccatcaactgcaagagcagccagagcctgctgaacagcggcaacaacaagaactacgtgacatggtatcagcagaagcccggccagcctcctaagctgctgatctactggggcagcaccagatccacaggcgtgcccgatagattttctggctctggcagcggcaccgacttcaccctgacaatttctagcctgcaagccgaggacgtggccgtgtactactgccagaacgactacacataccccttcaccttcggccagggcaccaagctggaaatcaaaggcggaggcggaagtggaggcggaggatctggcggcggaggctctcaagttcagctggttcagagcggagccgaagtgaagaaacctggggcctctgtgaaggtgtcctgcaaggcttccggctataccttcaccagcttttggctgaactgggtccgacaggcccctggacaaggactggaatggatgggcaacatctaccccagcgacagctacaccgtgtacaaccagaaattcaaggaccgcgtgaccatgaccagggacaccagcacaagcacagtgtacatggaactgagcagcctgcggagcgaggataccgccgtgtattattgcgccagaacctggcggggcaacagcttcgattattggggccagggaaccaccgtgaccgtgtcatctacgcgtatccagaaccctgatcctgccgtgtaccagctgcgggatagcaagagcagcgacaagagcgtgtgtctgttcaccgacttcgacagccagaccaacgtgtcccagagcaaggactccgacgtgtacatcaccgataagtgcgtgctggacatgcggagcatggacttcaagagcaactccgccgtggcctggtccaacaagtccgatttcgcctgcgccaacgccttcaacaacagcattatccccgaggacacattcttcccaagcagcgacgtgccctgcgacgtgaagctggtggaaaagagcttcgagacagacaccaacctgaacttccagaacctgagcgtgatcggcttcagaatcctgctgctgaaagtggccggctttaacctgctgatgaccctgcggctgtggtccagc

SEQ ID NO: 37636 - DNA, 1941 bp, synthetic construct
  source 1..1941: mol_type = other DNA
atggccttaccagtgaccgccttgctcctgccgctggccttgctgctccacgccgccaggccgctcgagggctccggcgatcgccctgatcctgccgtgtaccagctgcgggatagcaagagcagcgacaagagcgtgtgtctgttcaccgacttcgacagccagaccaacgtgtcccagagcaaggactccgacgtgtacatcaccgataagtgcgtgctggacatgcggagcatggacttcaagagcaactccgccgtggcctggtccaacaagtccgatttcgcctgcgccaacgccttcaacaacagcattatccccgaggacacattcttcccaagccccgagagcagctgcgacgtgaagctggtggaaaagagcttcgagacagacaccaacctgaacttccagaacctgagcgtgatcggcttcagaatcctgctgctgaaagtggccggctttaacctgctgatgaccctgcggctgtggtccagctctagtcgcgccaagagaagcggatctggcgtgaagcagaccctgaatttcgacctgctgaagctggctggcgacgtggaatccaacccaggccccactagcatggccttaccagtgaccgccttgctcctgccgctggccttgctgctccacgccgccaggccggacatcgtgatgacacagagccctgatagcctggccgtgtctctgggagagagagccaccatcaactgcaagagcagccagagcctgctgaacagcggcaacaacaagaactacgtgacatggtatcagcagaagcccggccagcctcctaagctgctgatctactggggcagcaccagatccacaggcgtgcccgatagattttctggctctggcagcggcaccgacttcaccctgacaatttctagcctgcaagccgaggacgtggccgtgtactactgccagaacgactacacataccccttcaccttcggccagggcaccaagctggaaatcaaaggcggaggcggaagtggaggcggaggatctggcggcggaggctctcaagttcagctggttcagagcggagccgaagtgaagaaacctggggcctctgtgaaggtgtcctgcaaggcttccggctataccttcaccagcttttggctgaactgggtccgacaggcccctggacaaggactggaatggatgggcaacatctaccccagcgacagctacaccgtgtacaaccagaaattcaaggaccgcgtgaccatgaccagggacaccagcacaagcacagtgtacatggaactgagcagcctgcggagcgaggataccgccgtgtattattgcgccagaacctggcggggcaacagcttcgattattggggccagggaaccaccgtgaccgtgtcatctacgcgtgaggacctgaagaacgtgttcccacctgaggtggccgtgttcgagcctagcgaggccgagatcagccacacccagaaagccaccctcgtgtgcctggctaccggcttctaccccgaccatgtggaactgtcttggtgggtcaacggcaaagaggtgcacagcggcgtgtgtaccgacccccagccactgaaagaacagcccgccctgaacgacagccggtactgcctgagcagcagactgagagtgtccgccaccttctggcagaacccccggaaccacttcagatgccaggtgcagttctacggcctgagcgagaacgacgagtggacccaggacagagccaagcccgtgacccagatcgtgtctgccgaagcctggggcagagccgattgcggctttaccagcgagagctaccagcagggcgtgctgagcgccaccatcctgtacgagatcctgctgggcaaggccaccctgtacgccgtgctggtgtctgccctggtgctgatggctatggtcaagcggaaggacagccgggga

SEQ ID NO: 37637 - DNA, 1872 bp, synthetic construct
  source 1..1872: mol_type = other DNA
atggccttaccagtgaccgccttgctcctgccgctggccttgctgctccacgccgccaggccggacatcgtgatgacacagagccctgatagcctggccgtgtctctgggagagagagccaccatcaactgcaagagcagccagagcctgctgaacagcggcaacaacaagaactacgtgacatggtatcagcagaagcccggccagcctcctaagctgctgatctactggggcagcaccagatccacaggcgtgcccgatagattttctggctctggcagcggcaccgacttcaccctgacaatttctagcctgcaagccgaggacgtggccgtgtactactgccagaacgactacacataccccttcaccttcggccagggcaccaagctggaaatcaaactcgaggacctgaagaacgtgttcccacctgaggtggccgtgttcgagcctagcgaggccgagatcagccacacccagaaagccaccctcgtgtgcctggctaccggcttctaccccgaccatgtggaactgtcttggtgggtcaacggcaaagaggtgcacagcggcgtgtctaccgacccccagccactgaaagaacagcccgccctgaacgacagccggtactgcctgagcagcagactgagagtgtccgccaccttctggcagaacccccggaaccacttcagatgccaggtgcagttctacggcctgagcgagaacgacgagtggacccaggacagagccaagcccgtgacccagatcgtgtctgccgaagcctggggcagagccgattgcggctttaccagcgagagctaccagcagggcgtgctgagcgccaccatcctgtacgagatcctgctgggcaaggccaccctgtacgccgtgctggtgtctgccctggtgctgatggctatggtcaagcggaaggacagccggggaagggccaagcgatctggatctggagcaacaaacttctcactactcaaacaagcaggtgacgtggaggagaatcccgggcctactagtatggactggatttggcgcatccttttccttgtcggcgctgctaccggcgcgcattccttcgaacaagttcagctggttcagagcggagccgaagtgaagaaacctggggcctctgtgaaggtgtcctgcaaggcttccggctataccttcaccagcttttggctgaactgggtccgacaggcccctggacaaggactggaatggatgggcaacatctaccccagcgacagctacaccgtgtacaaccagaaattcaaggaccgcgtgaccatgaccagggacaccagcacaagcacagtgtacatggaactgagcagcctgcggagcgaggataccgccgtgtattattgcgccagaacctggcggggcaacagcttcgattattggggccagggaaccaccgtgaccgtgtcatctacgcgtatccagaaccctgatcctgccgtgtaccagctgcgggatagcaagagcagcgacaagagcgtgtgtctgttcaccgacttcgacagccagaccaacgtgtcccagagcaaggactccgacgtgtacatcaccgataagaccgtgctggacatgcggagcatggacttcaagagcaactccgccgtggcctggtccaacaagtccgatttcgcctgcgccaacgccttcaacaacagcattatccccgaggacacattcttcccaagccccgagagcagctgcgacgtgaagctggtggaaaagagcttcgagacagacaccaacctgaacttccagaacctgagcgtgatcggcttcagaatcctgctgctgaaagtggccggctttaacctgctgatgaccctgcggctgtggtccagc

SEQ ID NO: 37638 - DNA, 1896 bp, synthetic construct
  source 1..1896: mol_type = other DNA
atggccttaccagtgaccgccttgctcctgccgctggccttgctgctccacgccgccaggccggacatcgtgatgacacagagccctgatagcctggccgtgtctctgggagagagagccaccatcaactgcaagagcagccagagcctgctgaacagcggcaacaacaagaactacgtgacatggtatcagcagaagcccggccagcctcctaagctgctgatctactggggcagcaccagatccacaggcgtgcccgatagattttctggctctggcagcggcaccgacttcaccctgacaatttctagcctgcaagccgaggacgtggccgtgtactactgccagaacgactacacataccccttcaccttcggccagggcaccaagctggaaatcaaactcgaggacaagcagctggacgccgacgtgtcccccaagcctaccatcttcctgccctctatcgccgagacaaagctccagaaggccggcacctacctgtgcctgctggaaaagttcttcccagatgtgattaagatccactggcaggaaaagaagtccaacaccatcctgggcagccaggaaggcaacaccatgaagaccaacgacacctacatgaagttcagctggctgaccgtgcccgagaagtccctggacaaagaacacagatgcatcgtgcggcacgaaaacaacaagaacggcgtggaccaggaaatcatcttcccacccatcaagaccgatgtgattacaatggaccccaaggacaactgctccaaggacgccaacgataccctgctgctccagctgaccaacaccagcgcctactacatgtacttgttgctgctgctgaagtccgtggtgtacttcgccatcatcacatgctgcctgctgcggagaaccgccttctgctgcaacggcgagaagtctagggccaagcgatctggatctggagcaacaaacttctcactactcaaacaagcaggtgacgtggaggagaatcccgggcctactagtatggactggatttggcgcatccttttccttgtcggcgctgctaccggcgcgcattccttcgaacaagttcagctggttcagagcggagccgaagtgaagaaacctggggcctctgtgaaggtgtcctgcaaggcttccggctataccttcaccagcttttggctgaactgggtccgacaggcccctggacaaggactggaatggatgggcaacatctaccccagcgacagctacaccgtgtacaaccagaaattcaaggaccgcgtgaccatgaccagggacaccagcacaagcacagtgtacatggaactgagcagcctgcggagcgaggataccgccgtgtattattgcgccagaacctggcggggcaacagcttcgattattggggccagggaaccaccgtgaccgtgtcatctacgcgtagccagcctcacaccaagcccagcgtgttcgtgatgaagaacggcaccaacgtggcctgcctcgtgaaagagttctaccccaaggacatcaggatcaacctggtgtccagcaagaagatcaccgagttcgaccccgccatcgtgatctcccccagcggcaagtacaacgccgtgaagctggggaagtacgaggacagcaacagcgtgacctgctccgtgcagcacgacaacaagaccgtgcacagcaccgactttgaagtgaaaaccgactccaccgaccacgtgaagcccaaagagacagagaacaccaagcagcccagcaagagctgccacaagcccaaggccatcgtgcacaccgagaaagtgaacatgatgagcctgaccgtgctgggcctgcggatgctgttcgccaaaaccgtggccgtgaacttcctgctgaccgccaagctgttcttcctc

SEQ ID NO: 37639 - DNA, 1896 bp, synthetic construct
  source 1..1896: mol_type = other DNA
atggccttaccagtgaccgccttgctcctgccgctggccttgctgctccacgccgccaggccggacatcgtgatgacacagagccctgatagcctggccgtgtctctgggagagagagccaccatcaactgcaagagcagccagagcctgctgaacagcggcaacaacaagaactacgtgacatggtatcagcagaagcccggccagcctcctaagctgctgatctactggggcagcaccagatccacaggcgtgcccgatagattttctggctctggcagcggcaccgacttcaccctgacaatttctagcctgcaagccgaggacgtggccgtgtactactgccagaacgactacacataccccttcaccttcggccagggcaccaagctggaaatcaaactcgagagccagcctcacaccaagcccagcgtgttcgtgatgaagaacggcaccaacgtggcctgcctcgtgaaagagttctaccccaaggacatcaggatcaacctggtgtccagcaagaagatcaccgagttcgaccccgccatcgtgatctcccccagcggcaagtacaacgccgtgaagctggggaagtacgaggacagcaacagcgtgacctgctccgtgcagcacgacaacaagaccgtgcacagcaccgactttgaagtgaaaaccgactccaccgaccacgtgaagcccaaagagacagagaacaccaagcagcccagcaagagctgccacaagcccaaggccatcgtgcacaccgagaaagtgaacatgatgagcctgaccgtgctgggcctgcggatgctgttcgccaaaaccgtggccgtgaacttcctgctgaccgccaagctgttcttcctcagggccaagcgatctggatctggagcaacaaacttctcactactcaaacaagcaggtgacgtggaggagaatcccgggcctactagtatggactggatttggcgcatccttttccttgtcggcgctgctaccggcgcgcattccttcgaacaagttcagctggttcagagcggagccgaagtgaagaaacctggggcctctgtgaaggtgtcctgcaaggcttccggctataccttcaccagcttttggctgaactgggtccgacaggcccctggacaaggactggaatggatgggcaacatctaccccagcgacagctacaccgtgtacaaccagaaattcaaggaccgcgtgaccatgaccagggacaccagcacaagcacagtgtacatggaactgagcagcctgcggagcgaggataccgccgtgtattattgcgccagaacctggcggggcaacagcttcgattattggggccagggaaccaccgtgaccgtgtcatctacgcgtgacaagcagctggacgccgacgtgtcccccaagcctaccatcttcctgccctctatcgccgagacaaagctccagaaggccggcacctacctgtgcctgctggaaaagttcttcccagatgtgattaagatccactggcaggaaaagaagtccaacaccatcctgggcagccaggaaggcaacaccatgaagaccaacgacacctacatgaagttcagctggctgaccgtgcccgagaagtccctggacaaagaacacagatgcatcgtgcggcacgaaaacaacaagaacggcgtggaccaggaaatcatcttcccacccatcaagaccgatgtgattacaatggaccccaaggacaactgctccaaggacgccaacgataccctgctgctccagctgaccaacaccagcgcctactacatgtacttgttgctgctgctgaagtccgtggtgtacttcgccatcatcacatgctgcctgctgcggagaaccgccttctgctgcaacggcgagaagtct

SEQ ID NO: 37640 - DNA, 1941 bp, synthetic construct
  source 1..1941: mol_type = other DNA
atggccttaccagtgaccgccttgctcctgccgctggccttgctgctccacgccgccaggccgctcgaggacaagcagctggacgccgacgtgtcccccaagcctaccatcttcctgccctctatcgccgagacaaagctccagaaggccggcacctacctgtgcctgctggaaaagttcttcccagatgtgattaagatccactggcaggaaaagaagtccaacaccatcctgggcagccaggaaggcaacaccatgaagaccaacgacacctacatgaagttcagctggctgaccgtgcccgagaagtccctggacaaagaacacagatgcatcgtgcggcacgaaaacaacaagaacggcgtggaccaggaaatcatcttcccacccatcaagaccgatgtgattacaatggaccccaaggacaactgctccaaggacgccaacgataccctgctgctccagctgaccaacaccagcgcctactacatgtacttgttgctgctgctgaagtccgtggtgtacttcgccatcatcacatgctgcctgctgcggagaaccgccttctgctgcaacggcgagaagtctagggccaagcgatctggatctggagcaacaaacttctcactactcaaacaagcaggtgacgtggaggagaatcccgggcctactagcatggccttaccagtgaccgccttgctcctgccgctggccttgctgctccacgccgccaggccggacatcgtgatgacacagagccctgatagcctggccgtgtctctgggagagagagccaccatcaactgcaagagcagccagagcctgctgaacagcggcaacaacaagaactacgtgacatggtatcagcagaagcccggccagcctcctaagctgctgatctactggggcagcaccagatccacaggcgtgcccgatagattttctggctctggcagcggcaccgacttcaccctgacaatttctagcctgcaagccgaggacgtggccgtgtactactgccagaacgactacacataccccttcaccttcggccagggcaccaagctggaaatcaaaggcggaggcggaagtggaggcggaggatctggcggcggaggctctcaagttcagctggttcagagcggagccgaagtgaagaaacctggggcctctgtgaaggtgtcctgcaaggcttccggctataccttcaccagcttttggctgaactgggtccgacaggcccctggacaaggactggaatggatgggcaacatctaccccagcgacagctacaccgtgtacaaccagaaattcaaggaccgcgtgaccatgaccagggacaccagcacaagcacagtgtacatggaactgagcagcctgcggagcgaggataccgccgtgtattattgcgccagaacctggcggggcaacagcttcgattattggggccagggaaccaccgtgaccgtgtcatctacgcgtagccagcctcacaccaagcccagcgtgttcgtgatgaagaacggcaccaacgtggcctgcctcgtgaaagagttctaccccaaggacatcaggatcaacctggtgtccagcaagaagatcaccgagttcgaccccgccatcgtgatctcccccagcggcaagtacaacgccgtgaagctggggaagtacgaggacagcaacagcgtgacctgctccgtgcagcacgacaacaagaccgtgcacagcaccgactttgaagtgaaaaccgactccaccgaccacgtgaagcccaaagagacagagaacaccaagcagcccagcaagagctgccacaagcccaaggccatcgtgcacaccgagaaagtgaacatgatgagcctgaccgtgctgggcctgcggatgctgttcgccaaaaccgtggccgtgaacttcctgctgaccgccaagctgttcttcctc

SEQ ID NO: 37641 - DNA, 2403 bp, synthetic construct
  source 1..2403: mol_type = other DNA
atggccttaccagtgaccgccttgctcctgccgctggccttgctgctccacgccgccaggccggacatcgtgatgacacagagccctgatagcctggccgtgtctctgggagagagagccaccatcaactgcaagagcagccagagcctgctgaacagcggcaacaacaagaactacgtgacatggtatcagcagaagcccggccagcctcctaagctgctgatctactggggcagcaccagatccacaggcgtgcccgatagattttctggctctggcagcggcaccgacttcaccctgacaatttctagcctgcaagccgaggacgtggccgtgtactactgccagaacgactacacataccccttcaccttcggccagggcaccaagctggaaatcaaaggacagcctaaggccaatcctaccgtgacactgttccctccaagcagcgaagaactccaggccaacaaggccacacttgtgtgcctgatctccgacttctaccctggggctgtgacagtggcttggaaggccgatggatctcctgtgaaagccggcgtggaaaccaccaagccatccaagcagagcaacaacaaatacgccgccagctcctacctgagcctgacacctgagcagtggaagtcccacagatcctacagctgccaagtgacccacgaaggcagcaccgtggaaaagacagtggcccctacagagtgcagcggatcccagagcttcggcctgctggaccccaagctgtgctacctgctggatggcatcctgttcatctacggcgtgatcctgaccgccctgttcctgagagtgaagttcagcagaagcgccgacgcccctgcctaccagcagggacagaaccaactgtacaacgagctgaacctgggcagacgggaagagtacgacgtgctggacaagcggagaggcagggaccctgagatgggcggaaagccccagcggagaaagaacccccaggaaggactgtataacgaactccagaaagacaagatggccgaagcctacagcgagatcggcatgaagggcgagcggagaagaggcaagggccacgatggcctgtaccagggcctgagcaccgccaccaaggacacctatgacgccctgcacatgcaggccctgcctccaagaagggccaagcgatctggatctggagcaacaaacttctcactactcaaacaagcaggtgacgtggaggagaatcccgggcctactagtatggactggatttggcgcatccttttccttgtcggcgctgctaccggcgcgcattccttcgaacaagttcagctggttcagagcggagccgaagtgaagaaacctggggcctctgtgaaggtgtcctgcaaggcttccggctataccttcaccagcttttggctgaactgggtccgacaggcccctggacaaggactggaatggatgggcaacatctaccccagcgacagctacaccgtgtacaaccagaaattcaaggaccgcgtgaccatgaccagggacaccagcacaagcacagtgtacatggaactgagcagcctgcggagcgaggataccgccgtgtattattgcgccagaacctggcggggcaacagcttcgattattggggccagggaaccaccgtgaccgtgtcatctgcctctacaaagggaccctccgtgtttcctctggctcccagcagcaagtctacaagcggaggaacagccgctctgggctgcctggtcaaggattactttcccgagcctgtgaccgtgtcctggaatagcggagcactgacaagcggcgtgcacacctttccagccgtgctgcaaagcagcggcctgtactctctgagcagcgtggtcacagtgcctagctctagcctgggcacccagacctacatctgcaatgtgaaccacaagcctagcaacaccaaggtggacaagagagtggaacccaagagctgtggtacccagagttttgggttgttggaccctaaattgtgctatctgttggacggaatcctgttcatttacggagtgatcctgaccgcattgttcctgcgggttaagttttccagatccgcagacgcacccgcttaccaacaagggcagaaccaactctacaatgaacttaatttggggcggagggaagagtacgacgttctggacaaaaggaggggacgagatcccgagatgggcggaaagcctcagcgaaggaagaatccgcaagaggggctttataacgaactccagaaagataaaatggcagaagcctatagtgagattgggatgaagggagaaaggaggaggggtaaaggtcacgatgggttgtaccaaggattgagcacagccactaaagatacctatgatgcgctccacatgcaggccctgccgccaaga

SEQ ID NO: 37642 - DNA, 2460 bp, synthetic construct
  source 1..2460: mol_type = other DNA
atggccttaccagtgaccgccttgctcctgccgctggccttgctgctccacgccgccaggccggacatcgtgatgacacagagccctgatagcctggccgtgtctctgggagagagagccaccatcaactgcaagagcagccagagcctgctgaacagcggcaacaacaagaactacgtgacatggtatcagcagaagcccggccagcctcctaagctgctgatctactggggcagcaccagatccacaggcgtgcccgatagattttctggctctggcagcggcaccgacttcaccctgacaatttctagcctgcaagccgaggacgtggccgtgtactactgccagaacgactacacataccccttcaccttcggccagggcaccaagctggaaatcaaactcgaggacctgaagaacgtgttcccacctgaggtggccgtgttcgagcctagcgaggccgagatcagccacacccagaaagccaccctcgtgtgcctggctaccggcttctaccccgaccatgtggaactgtcttggtgggtcaacggcaaagaggtgcacagcggcgtgtctaccgacccccagccactgaaagaacagcccgccctgaacgacagccggtactgcctgagcagcagactgagagtgtccgccaccttctggcagaacccccggaaccacttcagatgccaggtgcagttctacggcctgagcgagaacgacgagtggacccaggacagagccaagcccgtgacccagatcgtgtctgccgaagcctggggcagagccgattgcggatcccagagcttcggcctgctggaccccaagctgtgctacctgctggatggcatcctgttcatctacggcgtgatcctgaccgccctgttcctgagagtgaagttcagcagaagcgccgacgcccctgcctaccagcagggacagaaccaactgtacaacgagctgaacctgggcagacgggaagagtacgacgtgctggacaagcggagaggcagggaccctgagatgggcggaaagccccagcggagaaagaacccccaggaaggactgtataacgaactccagaaagacaagatggccgaagcctacagcgagatcggcatgaagggcgagcggagaagaggcaagggccacgatggcctgtaccagggcctgagcaccgccaccaaggacacctatgacgccctgcacatgcaggccctgcctccaagaagggccaagcgatctggatctggagcaacaaacttctcactactcaaacaagcaggtgacgtggaggagaatcccgggcctactagtatggactggatttggcgcatccttttccttgtcggcgctgctaccggcgcgcattccttcgaacaagttcagctggttcagagcggagccgaagtgaagaaacctggggcctctgtgaaggtgtcctgcaaggcttccggctataccttcaccagcttttggctgaactgggtccgacaggcccctggacaaggactggaatggatgggcaacatctaccccagcgacagctacaccgtgtacaaccagaaattcaaggaccgcgtgaccatgaccagggacaccagcacaagcacagtgtacatggaactgagcagcctgcggagcgaggataccgccgtgtattattgcgccagaacctggcggggcaacagcttcgattattggggccagggaaccaccgtgaccgtgtcatctacgcgtatccagaaccctgatcctgccgtgtaccagctgcgggatagcaagagcagcgacaagagcgtgtgtctgttcaccgacttcgacagccagaccaacgtgtcccagagcaaggactccgacgtgtacatcaccgataagaccgtgctggacatgcggagcatggacttcaagagcaactccgccgtggcctggtccaacaagtccgatttcgcctgcgccaacgccttcaacaacagcattatccccgaggacacattcttcccaagccccgagagcagctgcggtacccagagttttgggttgttggaccctaaattgtgctatctgttggacggaatcctgttcatttacggagtgatcctgaccgcattgttcctgcgggttaagttttccagatccgcagacgcacccgcttaccaacaagggcagaaccaactctacaatgaacttaatttggggcggagggaagagtacgacgttctggacaaaaggaggggacgagatcccgagatgggcggaaagcctcagcgaaggaagaatccgcaagaggggctttataacgaactccagaaagataaaatggcagaagcctatagtgagattgggatgaagggagaaaggaggaggggtaaaggtcacgatgggttgtaccaaggattgagcacagccactaaagatacctatgatgcgctccacatgcaggccctgccgccaaga

SEQ ID NO: 37643 - DNA, 2586 bp, synthetic construct
  source 1..2586: mol_type = other DNA
atggccttaccagtgaccgccttgctcctgccgctggccttgctgctccacgccgccaggccggacatcgtgatgacacagagccctgatagcctggccgtgtctctgggagagagagccaccatcaactgcaagagcagccagagcctgctgaacagcggcaacaacaagaactacgtgacatggtatcagcagaagcccggccagcctcctaagctgctgatctactggggcagcaccagatccacaggcgtgcccgatagattttctggctctggcagcggcaccgacttcaccctgacaatttctagcctgcaagccgaggacgtggccgtgtactactgccagaacgactacacataccccttcaccttcggccagggcaccaagctggaaatcaaactcgaggaggacctgaagaacgtgttcccacctgaggtggccgtgttcgagcctagcgaggccgagatcagccacacccagaaagccaccctcgtgtgcctggctaccggcttctaccccgaccatgtggaactgtcttggtgggtcaacggcaaagaggtgcacagcggcgtgtctaccgacccccagccactgaaagaacagcccgccctgaacgacagccggtactgcctgagcagcagactgagagtgtccgccaccttctggcagaacccccggaaccacttcagatgccaggtgcagttctacggcctgagcgagaacgacgagtggacccaggacagagccaagcccgtgacccagatcgtgtctgccgaagcctggggcagagccgattgcggatcccagagcttcggcctgctggaccccaagctgtgctacctgctggatggcatcctgttcatctacggcgtgatcctgaccgccctgttcctgagagtgaagttcagcagaagcgccgacgcccctgcctaccagcagggacagaaccaactgtacaacgagctgaacctgggcagacgggaagagtacgacgtgctggacaagcggagaggcagggaccctgagatgggcggaaagccccagcggagaaagaacccccaggaaggactgtataacgaactccagaaagacaagatggccgaagcctacagcgagatcggcatgaagggcgagcggagaagaggcaagggccacgatggcctgtaccagggcctgagcaccgccaccaaggacacctatgacgccctgcacatgcaggccctgcctccaagaagggccaagcgatctggatctggagcaacaaacttctcactactcaaacaagcaggtgacgtggaggagaatcccgggcctactagtatggactggatttggcgcatccttttccttgtcggcgctgctaccggcgcgcattccttcgaacaagttcagctggttcagagcggagccgaagtgaagaaacctggggcctctgtgaaggtgtcctgcaaggcttccggctataccttcaccagcttttggctgaactgggtccgacaggcccctggacaaggactggaatggatgggcaacatctaccccagcgacagctacaccgtgtacaaccagaaattcaaggaccgcgtgaccatgaccagggacaccagcacaagcacagtgtacatggaactgagcagcctgcggagcgaggataccgccgtgtattattgcgccagaacctggcggggcaacagcttcgattattggggccagggaaccaccgtgaccgtgtcatctacgcgtatccagaaccctgatcctgccgtgtaccagctgcgggatagcaagagcagcgacaagagcgtgtgtctgttcaccgacttcgacagccagaccaacgtgtcccagagcaaggactccgacgtgtacatcaccgataagaccgtgctggacatgcggagcatggacttcaagagcaactccgccgtggcctggtccaacaagtccgatttcgcctgcgccaacgccttcaacaacagcattatccccgaggacacattcttcccaagccccgagagcagctgcggtacccagagttttgggttgttggaccctaaattgtgctatctgttggacggaatcctgttcatttacggagtgatcctgaccgcattgttcctgaggagcaagcggtcacggctgctccacagcgattacatgaatatgacaccacgaagaccgggtcctactcgcaaacactaccaaccctacgcacctccccgcgactttgcagcgtaccgatctcgggttaagttttccagatccgcagacgcacccgcttaccaacaagggcagaaccaactctacaatgaacttaatttggggcggagggaagagtacgacgttctggacaaaaggaggggacgagatcccgagatgggcggaaagcctcagcgaaggaagaatccgcaagaggggctttataacgaactccagaaagataaaatggcagaagcctatagtgagattgggatgaagggagaaaggaggaggggtaaaggtcacgatgggttgtaccaaggattgagcacagccactaaagatacctatgatgcgctccacatgcaggccctgccgccaaga

SEQ ID NO: 37644 - DNA, 2715 bp, synthetic construct
  source 1..2715: mol_type = other DNA
atggccttaccagtgaccgccttgctcctgccgctggccttgctgctccacgccgccaggccggacatcgtgatgacacagagccctgatagcctggccgtgtctctgggagagagagccaccatcaactgcaagagcagccagagcctgctgaacagcggcaacaacaagaactacgtgacatggtatcagcagaagcccggccagcctcctaagctgctgatctactggggcagcaccagatccacaggcgtgcccgatagattttctggctctggcagcggcaccgacttcaccctgacaatttctagcctgcaagccgaggacgtggccgtgtactactgccagaacgactacacataccccttcaccttcggccagggcaccaagctggaaatcaaactcgaggaggacctgaagaacgtgttcccacctgaggtggccgtgttcgagcctagcgaggccgagatcagccacacccagaaagccaccctcgtgtgcctggctaccggcttctaccccgaccatgtggaactgtcttggtgggtcaacggcaaagaggtgcacagcggcgtgtctaccgacccccagccactgaaagaacagcccgccctgaacgacagccggtactgcctgagcagcagactgagagtgtccgccaccttctggcagaacccccggaaccacttcagatgccaggtgcagttctacggcctgagcgagaacgacgagtggacccaggacagagccaagcccgtgacccagatcgtgtctgccgaagcctggggcagagccgattgcggatcccagagcttcggcctgctggaccccaagctgtgctacctgctggatggcatcctgttcatctacggcgtgatcctgaccgccctgttcctgaaacggggcagaaagaaactcctgtatatattcaaacaaccatttatgagaccagtacaaactactcaagaggaagatggctgtagctgccgatttccagaagaagaagaaggaggatgtgaactgagagtgaagttcagcagaagcgccgacgcccctgcctaccagcagggacagaaccaactgtacaacgagctgaacctgggcagacgggaagagtacgacgtgctggacaagcggagaggcagggaccctgagatgggcggaaagccccagcggagaaagaacccccaggaaggactgtataacgaactccagaaagacaagatggccgaagcctacagcgagatcggcatgaagggcgagcggagaagaggcaagggccacgatggcctgtaccagggcctgagcaccgccaccaaggacacctatgacgccctgcacatgcaggccctgcctccaagaagggccaagcgatctggatctggagcaacaaacttctcactactcaaacaagcaggtgacgtggaggagaatcccgggcctactagtatggactggatttggcgcatccttttccttgtcggcgctgctaccggcgcgcattccttcgaacaagttcagctggttcagagcggagccgaagtgaagaaacctggggcctctgtgaaggtgtcctgcaaggcttccggctataccttcaccagcttttggctgaactgggtccgacaggcccctggacaaggactggaatggatgggcaacatctaccccagcgacagctacaccgtgtacaaccagaaattcaaggaccgcgtgaccatgaccagggacaccagcacaagcacagtgtacatggaactgagcagcctgcggagcgaggataccgccgtgtattattgcgccagaacctggcggggcaacagcttcgattattggggccagggaaccaccgtgaccgtgtcatctacgcgtatccagaaccctgatcctgccgtgtaccagctgcgggatagcaagagcagcgacaagagcgtgtgtctgttcaccgacttcgacagccagaccaacgtgtcccagagcaaggactccgacgtgtacatcaccgataagaccgtgctggacatgcggagcatggacttcaagagcaactccgccgtggcctggtccaacaagtccgatttcgcctgcgccaacgccttcaacaacagcattatccccgaggacacattcttcccaagccccgagagcagctgcggtacccagagttttgggttgttggaccctaaattgtgctatctgttggacggaatcctgttcatttacggagtgatcctgaccgcattgttcctgaagagaggccggaagaagctgctgtacatcttcaagcagcctttcatgcggcccgtgcagaccacccaggaagaggacggctgctcctgccggttccccgaggaagaagaaggcggctgcgagctgcgggttaagttttccagatccgcagacgcacccgcttaccaacaagggcagaaccaactctacaatgaacttaatttggggcggagggaagagtacgacgttctggacaaaaggaggggacgagatcccgagatgggcggaaagcctcagcgaaggaagaatccgcaagaggggctttataacgaactccagaaagataaaatggcagaagcctatagtgagattgggatgaagggagaaaggaggaggggtaaaggtcacgatgggttgtaccaaggattgagcacagccactaaagatacctatgatgcgctccacatgcaggccctgccgccaaga

SEQ ID NO: 37645 - DNA, 1776 bp, synthetic construct
  source 1..1776: mol_type = other DNA
atggccttaccagtgaccgccttgctcctgccgctggccttgctgctccacgccgccaggccggacatcgtgatgacacagagccctgatagcctggccgtgtctctgggagagagagccaccatcaactgcaagagcagccagagcctgctgaacagcggcaacaacaagaactacgtgacatggtatcagcagaagcccggccagcctcctaagctgctgatctactggggcagcaccagatccacaggcgtgcccgatagattttctggctctggcagcggcaccgacttcaccctgacaatttctagcctgcaagccgaggacgtggccgtgtactactgccagaacgactacacataccccttcaccttcggccagggcaccaagctggaaatcaaactcgagcagagcttcggcctgctggaccccaagctgtgctacctgctggatggcatcctgttcatctacggcgtgatcctgaccgccctgttcctgagagtgaagttcagcagaagcgccgacgcccctgcctaccagcagggacagaaccaactgtacaacgagctgaacctgggcagacgggaagagtacgacgtgctggacaagcggagaggcagggaccctgagatgggcggaaagccccagcggagaaagaacccccaggaaggactgtataacgaactccagaaagacaagatggccgaagcctacagcgagatcggcatgaagggcgagcggagaagaggcaagggccacgatggcctgtaccagggcctgagcaccgccaccaaggacacctatgacgccctgcacatgcaggccctgcctccaagaagggccaagcgatctggatctggagcaacaaacttctcactactcaaacaagcaggtgacgtggaggagaatcccgggcctactagtatggactggatttggcgcatccttttccttgtcggcgctgctaccggcgcgcattccttcgaacaagttcagctggttcagagcggagccgaagtgaagaaacctggggcctctgtgaaggtgtcctgcaaggcttccggctataccttcaccagcttttggctgaactgggtccgacaggcccctggacaaggactggaatggatgggcaacatctaccccagcgacagctacaccgtgtacaaccagaaattcaaggaccgcgtgaccatgaccagggacaccagcacaagcacagtgtacatggaactgagcagcctgcggagcgaggataccgccgtgtattattgcgccagaacctggcggggcaacagcttcgattattggggccagggaaccaccgtgaccgtgtcatctacgcgtcagagttttgggttgttggaccctaaattgtgctatctgttggacggaatcctgttcatttacggagtgatcctgaccgcattgttcctgcgggttaagttttccagatccgcagacgcacccgcttaccaacaagggcagaaccaactctacaatgaacttaatttggggcggagggaagagtacgacgttctggacaaaaggaggggacgagatcccgagatgggcggaaagcctcagcgaaggaagaatccgcaagaggggctttataacgaactccagaaagataaaatggcagaagcctatagtgagattgggatgaagggagaaaggaggaggggtaaaggtcacgatgggttgtaccaaggattgagcacagccactaaagatacctatgatgcgctccacatgcaggccctgccgccaaga

SEQ ID NO: 37646 - DNA, 1950 bp, synthetic construct
  source 1..1950: mol_type = other DNA
atggccttaccagtgaccgccttgctcctgccgctggccttgctgctccacgccgccaggccggacatcgtgatgacacagagccctgatagcctggccgtgtctctgggagagagagccaccatcaactgcaagagcagccagagcctgctgaacagcggcaacaacaagaactacgtgacatggtatcagcagaagcccggccagcctcctaagctgctgatctactggggcagcaccagatccacaggcgtgcccgatagattttctggctctggcagcggcaccgacttcaccctgacaatttctagcctgcaagccgaggacgtggccgtgtactactgccagaacgactacacataccccttcaccttcggccagggcaccaagctggaaatcaaactcgagggacagcctaaggccaatcctaccgtgacactgttccctccaagcagcgaagaactccaggccaacaaggccacacttgtgtgcctgatctccgacttctaccctggggctgtgacagtggcttggaaggccgatggatctcctgtgaaagccggcgtggaaaccaccaagccatccaagcagagcaacaacaaatacgccgccagctcctacctgagcctgacacctgagcagtggaagtcccacagatcctacagctgccaagtgacccacgaaggcagcaccgtggaaaagacagtggcccctacagagtgcagccccatcaagaccgatgtgattacaatggaccccaaggacaactgctccaaggacgccaacgataccctgctgctccagctgaccaacaccagcgcctactacatgtacttgttgctgctgctgaagtccgtggtgtacttcgccatcatcacatgctgcctgctgcggagaaccgccttctgctgcaacggcgagaagtctagggccaagcgatctggatctggagcaacaaacttctcactactcaaacaagcaggtgacgtggaggagaatcccgggcctactagtatggactggatttggcgcatccttttccttgtcggcgctgctaccggcgcgcattccttcgaacaagttcagctggttcagagcggagccgaagtgaagaaacctggggcctctgtgaaggtgtcctgcaaggcttccggctataccttcaccagcttttggctgaactgggtccgacaggcccctggacaaggactggaatggatgggcaacatctaccccagcgacagctacaccgtgtacaaccagaaattcaaggaccgcgtgaccatgaccagggacaccagcacaagcacagtgtacatggaactgagcagcctgcggagcgaggataccgccgtgtattattgcgccagaacctggcggggcaacagcttcgattattggggccagggaaccaccgtgaccgtgtcatctacgcgtgcctctacaaagggaccctccgtgtttcctctggctcccagcagcaagtctacaagcggaggaacagccgctctgggctgcctggtcaaggattactttcccgagcctgtgaccgtgtcctggaatagcggagcactgacaagcggcgtgcacacctttccagccgtgctgcaaagcagcggcctgtactctctgagcagcgtggtcacagtgcctagctctagcctgggcacccagacctacatctgcaatgtgaaccacaagcctagcaacaccaaggtggacaagagagtggaacccaagagctgtgaagtgaaaaccgactccaccgaccacgtgaagcccaaagagacagagaacaccaagcagcccagcaagagctgccacaagcccaaggccatcgtgcacaccgagaaagtgaacatgatgagcctgaccgtgctgggcctgcggatgctgttcgccaaaaccgtggccgtgaacttcctgctgaccgccaagctgttcttcctc

SEQ ID NO: 37647 - DNA, 1884 bp, synthetic construct
  source 1..1884: mol_type = other DNA
atggccttaccagtgaccgccttgctcctgccgctggccttgctgctccacgccgccaggccggacatcgtgatgacacagagccctgatagcctggccgtgtctctgggagagagagccaccatcaactgcaagagcagccagagcctgctgaacagcggcaacaacaagaactacgtgacatggtatcagcagaagcccggccagcctcctaagctgctgatctactggggcagcaccagatccacaggcgtgcccgatagattttctggctctggcagcggcaccgacttcaccctgacaatttctagcctgcaagccgaggacgtggccgtgtactactgccagaacgactacacataccccttcaccttcggccagggcaccaagctggaaatcaaactcgagggacagcctaaggccaatcctaccgtgacactgttccctccaagcagcgaagaactccaggccaacaaggccacacttgtgtgcctgatctccgacttctaccctggggctgtgacagtggcttggaaggccgatggatctcctgtgaaagccggcgtggaaaccaccaagccatccaagcagagcaacaacaaatacgccgccagctcctacctgagcctgacacctgagcagtggaagtcccacagatcctacagctgccaagtgacccacgaaggcagcaccgtggaaaagacagtggcccctacagagtgcagcggcagagccgattgcggcatcaccagcgccagctaccaccagggcgtgctgagcgccaccatcctgtacgagatcctgctgggcaaggccaccctgtacgccgtgctggtgtctgccctggtgctgatggctatggtcaagcggaaggacagccggggaagggccaagcgatctggatctggagcaacaaacttctcactactcaaacaagcaggtgacgtggaggagaatcccgggcctactagtatggactggatttggcgcatccttttccttgtcggcgctgctaccggcgcgcattccttcgaacaagttcagctggttcagagcggagccgaagtgaagaaacctggggcctctgtgaaggtgtcctgcaaggcttccggctataccttcaccagcttttggctgaactgggtccgacaggcccctggacaaggactggaatggatgggcaacatctaccccagcgacagctacaccgtgtacaaccagaaattcaaggaccgcgtgaccatgaccagggacaccagcacaagcacagtgtacatggaactgagcagcctgcggagcgaggataccgccgtgtattattgcgccagaacctggcggggcaacagcttcgattattggggccagggaaccaccgtgaccgtgtcatctacgcgtgcctctacaaagggaccctccgtgtttcctctggctcccagcagcaagtctacaagcggaggaacagccgctctgggctgcctggtcaaggattactttcccgagcctgtgaccgtgtcctggaatagcggagcactgacaagcggcgtgcacacctttccagccgtgctgcaaagcagcggcctgtactctctgagcagcgtggtcacagtgcctagctctagcctgggcacccagacctacatctgcaatgtgaaccacaagcctagcaacaccaaggtggacaagagagtggaacccaagagctgtatccccgaggacacattcttcccaagcagcgacgtgccctgcgacgtgaagctggtggaaaagagcttcgagacagacaccaacctgaacttccagaacctgagcgtgatcggcttcagaatcctgctgctgaaagtggccggctttaacctgctgatgaccctgcggctgtggtccagc

SEQ ID NO: 37648 - DNA, 1884 bp, synthetic construct
  source 1..1884: mol_type = other DNA
atggccttaccagtgaccgccttgctcctgccgctggccttgctgctccacgccgccaggccggacatcgtgatgacacagagccctgatagcctggccgtgtctctgggagagagagccaccatcaactgcaagagcagccagagcctgctgaacagcggcaacaacaagaactacgtgacatggtatcagcagaagcccggccagcctcctaagctgctgatctactggggcagcaccagatccacaggcgtgcccgatagattttctggctctggcagcggcaccgacttcaccctgacaatttctagcctgcaagccgaggacgtggccgtgtactactgccagaacgactacacataccccttcaccttcggccagggcaccaagctggaaatcaaactcgagggacagcctaaggccaatcctaccgtgacactgttccctccaagcagcgaagaactccaggccaacaaggccacacttgtgtgcctgatctccgacttctaccctggggctgtgacagtggcttggaaggccgatggatctcctgtgaaagccggcgtggaaaccaccaagccatccaagcagagcaacaacaaatacgccgccagctcctacctgagcctgacacctgagcagtggaagtcccacagatcctacagctgccaagtgacccacgaaggcagcaccgtggaaaagacagtggcccctacagagtgcagcggcagagccgattgcggctttaccagcgagagctaccagcagggcgtgctgagcgccaccatcctgtacgagatcctgctgggcaaggccaccctgtacgccgtgctggtgtctgccctggtgctgatggctatggtcaagcggaaggacagccggggaagggccaagcgatctggatctggagcaacaaacttctcactactcaaacaagcaggtgacgtggaggagaatcccgggcctactagtatggactggatttggcgcatccttttccttgtcggcgctgctaccggcgcgcattccttcgaacaagttcagctggttcagagcggagccgaagtgaagaaacctggggcctctgtgaaggtgtcctgcaaggcttccggctataccttcaccagcttttggctgaactgggtccgacaggcccctggacaaggactggaatggatgggcaacatctaccccagcgacagctacaccgtgtacaaccagaaattcaaggaccgcgtgaccatgaccagggacaccagcacaagcacagtgtacatggaactgagcagcctgcggagcgaggataccgccgtgtattattgcgccagaacctggcggggcaacagcttcgattattggggccagggaaccaccgtgaccgtgtcatctacgcgtgcctctacaaagggaccctccgtgtttcctctggctcccagcagcaagtctacaagcggaggaacagccgctctgggctgcctggtcaaggattactttcccgagcctgtgaccgtgtcctggaatagcggagcactgacaagcggcgtgcacacctttccagccgtgctgcaaagcagcggcctgtactctctgagcagcgtggtcacagtgcctagctctagcctgggcacccagacctacatctgcaatgtgaaccacaagcctagcaacaccaaggtggacaagagagtggaacccaagagctgtatccccgaggacacattcttcccaagccccgagagcagctgcgacgtgaagctggtggaaaagagcttcgagacagacaccaacctgaacttccagaacctgagcgtgatcggcttcagaatcctgctgctgaaagtggccggctttaacctgctgatgaccctgcggctgtggtccagc

SEQ ID NO: 37649 - DNA, 1362 bp, synthetic construct
  source 1..1362: mol_type = other DNA
atggccttaccagtgaccgccttgctcctgccgctggccttgctgctccacgccgccaggccggacatcgtgatgacacagagccctgatagcctggccgtgtctctgggagagagagccaccatcaactgcaagagcagccagagcctgctgaacagcggcaacaacaagaactacgtgacatggtatcagcagaagcccggccagcctcctaagctgctgatctactggggcagcaccagatccacaggcgtgcccgatagattttctggctctggcagcggcaccgacttcaccctgacaatttctagcctgcaagccgaggacgtggccgtgtactactgccagaacgactacacataccccttcaccttcggccagggcaccaagctggaaatcaaaggcggaggcggaagtggaggcggaggatctggcggcggaggctctcaagttcagctggttcagagcggagccgaagtgaagaaacctggggcctctgtgaaggtgtcctgcaaggcttccggctataccttcaccagcttttggctgaactgggtccgacaggcccctggacaaggactggaatggatgggcaacatctaccccagcgacagctacaccgtgtacaaccagaaattcaaggaccgcgtgaccatgaccagggacaccagcacaagcacagtgtacatggaactgagcagcctgcggagcgaggataccgccgtgtattattgcgccagaacctggcggggcaacagcttcgattattggggccagggaaccaccgtgaccgtgtcatctacgcgtgacggtaacgaggagatgggaggaatcactcaaaccccttacaaagtctcaatttcaggaacaactgttatccttacatgtccccagtatcctggcagcgagatcctttggcagcataacgacaagaatatagggggagatgaagacgataagaatatcggatctgacgaggatcacttgagcctgaaagagttctccgagcttgaacaaagcggatattatgtgtgctatccgcgcgggtcaaagccggaagacgctaacttttacctttatctccgagccagagtgtgcgaaaattgcatggaaatggacgttatgtccgttgctacaatagttatcgtagatatatgcatcacgggtggactgcttctgctggtttattattggtccaagaatagaaaggccaaagctaaacccgtgaccagaggcgctggcgcaggcggaaggcaaaggggacaaaacaaagaacggccaccaccagtgccaaatccagattatgagcctattcggaaaggacagagggacctgtactctggcctgaatcagagaagaatc

SEQ ID NO: 37650 - DNA, 1257 bp, synthetic construct
  source 1..1257: mol_type = other DNA
atggccttaccagtgaccgccttgctcctgccgctggccttgctgctccacgccgccaggccggacatcgtgatgacacagagccctgatagcctggccgtgtctctgggagagagagccaccatcaactgcaagagcagccagagcctgctgaacagcggcaacaacaagaactacgtgacatggtatcagcagaagcccggccagcctcctaagctgctgatctactggggcagcaccagatccacaggcgtgcccgatagattttctggctctggcagcggcaccgacttcaccctgacaatttctagcctgcaagccgaggacgtggccgtgtactactgccagaacgactacacataccccttcaccttcggccagggcaccaagctggaaatcaaaggcggaggcggaagtggaggcggaggatctggcggcggaggctctcaagttcagctggttcagagcggagccgaagtgaagaaacctggggcctctgtgaaggtgtcctgcaaggcttccggctataccttcaccagcttttggctgaactgggtccgacaggcccctggacaaggactggaatggatgggcaacatctaccccagcgacagctacaccgtgtacaaccagaaattcaaggaccgcgtgaccatgaccagggacaccagcacaagcacagtgtacatggaactgagcagcctgcggagcgaggataccgccgtgtattattgcgccagaacctggcggggcaacagcttcgattattggggccagggaaccaccgtgaccgtgtcatctacgcgtttcaagatccccatcgaggaactggaagatcgggtgttcgtgaactgcaacacctctatcacctgggtggaaggcaccgtgggaacactgctgagcgacatcaccagactggacctcggcaagcggattctggaccctcggggcatctacagatgcaacggcaccgacatctacaaggacaaagaaagcaccgtgcaggtccactacagaatgtgccagtcctgcgtggaactggaccctgctacagtggccggcatcatcgtgaccgatgtgatcgctactctgctgctggctctgggagtgttctgcttcgccggacacgaaacaggcagactgtctggcgctgccgatacacaggccctgctgagaaacgaccaagtgtatcagcccctgcgcgacagagatgatgcccagtattctcacctcggcggcaactgggctagaaacaag

SEQ ID NO: 37651 - DNA, 1287 bp, synthetic construct
  source 1..1287: mol_type = other DNA
atggccttaccagtgaccgccttgctcctgccgctggccttgctgctccacgccgccaggccggacatcgtgatgacacagagccctgatagcctggccgtgtctctgggagagagagccaccatcaactgcaagagcagccagagcctgctgaacagcggcaacaacaagaactacgtgacatggtatcagcagaagcccggccagcctcctaagctgctgatctactggggcagcaccagatccacaggcgtgcccgatagattttctggctctggcagcggcaccgacttcaccctgacaatttctagcctgcaagccgaggacgtggccgtgtactactgccagaacgactacacataccccttcaccttcggccagggcaccaagctggaaatcaaaggcggaggcggaagtggaggcggaggatctggcggcggaggctctcaagttcagctggttcagagcggagccgaagtgaagaaacctggggcctctgtgaaggtgtcctgcaaggcttccggctataccttcaccagcttttggctgaactgggtccgacaggcccctggacaaggactggaatggatgggcaacatctaccccagcgacagctacaccgtgtacaaccagaaattcaaggaccgcgtgaccatgaccagggacaccagcacaagcacagtgtacatggaactgagcagcctgcggagcgaggataccgccgtgtattattgcgccagaacctggcggggcaacagcttcgattattggggccagggaaccaccgtgaccgtgtcatctacgcgtcagagcatcaagggcaaccacctggtcaaggtgtacgactaccaagaggacggcagcgtgctgctgacatgtgatgccgaggccaagaacatcacctggtttaaggacggcaagatgatcggcttcctgaccgaggacaagaagaagtggaacctgggcagcaacgctaaggaccccagaggcatgtatcagtgcaagggcagccagaacaagagcaagcccctccaggtgtactaccggatgtgccagaactgcatcgagctgaacgccgctaccatcagcggctttctgttcgccgagatcgtgtccatcttcgtgctggccgtgggcgtgtactttatcgctggacaggatggcgtgcggcagagcagagcttccgataagcaaaccctgctgcctaacgaccagctgtaccagcctctgaaggacagagaggacgaccagtacagccacctccagggcaatcagctgagaagaaac

SEQ ID NO: 37652 - DNA, 1236 bp, synthetic construct
  source 1..1236: mol_type = other DNA
atggccttaccagtgaccgccttgctcctgccgctggccttgctgctccacgccgccaggccggacatcgtgatgacacagagccctgatagcctggccgtgtctctgggagagagagccaccatcaactgcaagagcagccagagcctgctgaacagcggcaacaacaagaactacgtgacatggtatcagcagaagcccggccagcctcctaagctgctgatctactggggcagcaccagatccacaggcgtgcccgatagattttctggctctggcagcggcaccgacttcaccctgacaatttctagcctgcaagccgaggacgtggccgtgtactactgccagaacgactacacataccccttcaccttcggccagggcaccaagctggaaatcaaaggcggaggcggaagtggaggcggaggatctggcggcggaggctctcaagttcagctggttcagagcggagccgaagtgaagaaacctggggcctctgtgaaggtgtcctgcaaggcttccggctataccttcaccagcttttggctgaactgggtccgacaggcccctggacaaggactggaatggatgggcaacatctaccccagcgacagctacaccgtgtacaaccagaaattcaaggaccgcgtgaccatgaccagggacaccagcacaagcacagtgtacatggaactgagcagcctgcggagcgaggataccgccgtgtattattgcgccagaacctggcggggcaacagcttcgattattggggccagggaaccaccgtgaccgtgtcatctacgcgtcagagttttgggttgttggaccctaaattgtgctatctgttggacggaatcctgttcatttacggagtgatcctgaccgcattgttcctgcgggttaagttttccagatccgcagacgcacccgcttaccaacaagggcagaaccaactctacaatgaacttaatttggggcggagggaagagtacgacgttctggacaaaaggaggggacgagatcccgagatgggcggaaagcctcagcgaaggaagaatccgcaagaggggctttataacgaactccagaaagataaaatggcagaagcctatagtgagattgggatgaagggagaaaggaggaggggtaaaggtcacgatgggttgtaccaaggattgagcacagccactaaagatacctatgatgcgctccacatgcaggccctgccgccaaga

SEQ ID NO: 37653 - DNA, 1521 bp, synthetic construct
  source 1..1521: mol_type = other DNA
atggccttaccagtgaccgccttgctcctgccgctggccttgctgctccacgccgccaggccggacatcgtgatgacacagagccctgatagcctggccgtgtctctgggagagagagccaccatcaactgcaagagcagccagagcctgctgaacagcggcaacaacaagaactacgtgacatggtatcagcagaagcccggccagcctcctaagctgctgatctactggggcagcaccagatccacaggcgtgcccgatagattttctggctctggcagcggcaccgacttcaccctgacaatttctagcctgcaagccgaggacgtggccgtgtactactgccagaacgactacacataccccttcaccttcggccagggcaccaagctggaaatcaaaggcggaggcggaagtggaggcggaggatctggcggcggaggctctcaagttcagctggttcagagcggagccgaagtgaagaaacctggggcctctgtgaaggtgtcctgcaaggcttccggctataccttcaccagcttttggctgaactgggtccgacaggcccctggacaaggactggaatggatgggcaacatctaccccagcgacagctacaccgtgtacaaccagaaattcaaggaccgcgtgaccatgaccagggacaccagcacaagcacagtgtacatggaactgagcagcctgcggagcgaggataccgccgtgtattattgcgccagaacctggcggggcaacagcttcgattattggggccagggaaccaccgtgaccgtgtcatctacgcgtggaatgaggactgaggatcttcccaaagctgtcgtctttctcgaaccccaatggtatcgggtgctcgaaaaagactctgtgacactgaaatgccaaggggcctactctcccgaggacaactccacacagtggtttcataatgagtccctcatcagctctcaggccagctcttatttcattgatgccgctacagtggacgactccggcgagtatcggtgtcagaccaatctgtctacactgtctgaccccgtgcagcttgaggtccacattggatggttgctcttgcaagccccacgctgggttttcaaagaggaagatccaatccatctgcggtgccacagctggaaaaacaccgctctccacaaagtcacatacctgcaaaatggcaaaggacgcaaatacttccatcacaattccgatttttacattccgaaggctaccctgaaagacagcggcagctatttctgccggggactcgtcggctccaagaatgtgtcctccgaaaccgtgaatatcacgattacccaaggactggctgtgcctacaatctctagcttctttccgcctggataccaagtctccttctgtcttgtgatggtcctcctgtttgctgtggacacaggactgtacttttccgtgaaaacgaacatccgcagctccacacgcgattggaaagatcacaagtttaaatggcgcaaagatccccaggacaag

SEQ ID NO: 37654 - DNA, 1446 bp, synthetic construct
  source 1..1446: mol_type = other DNA
atggccttaccagtgaccgccttgctcctgccgctggccttgctgctccacgccgccaggccggacatcgtgatgacacagagccctgatagcctggccgtgtctctgggagagagagccaccatcaactgcaagagcagccagagcctgctgaacagcggcaacaacaagaactacgtgacatggtatcagcagaagcccggccagcctcctaagctgctgatctactggggcagcaccagatccacaggcgtgcccgatagattttctggctctggcagcggcaccgacttcaccctgacaatttctagcctgcaagccgaggacgtggccgtgtactactgccagaacgactacacataccccttcaccttcggccagggcaccaagctggaaatcaaaggcggaggcggaagtggaggcggaggatctggcggcggaggctctcaagttcagctggttcagagcggagccgaagtgaagaaacctggggcctctgtgaaggtgtcctgcaaggcttccggctataccttcaccagcttttggctgaactgggtccgacaggcccctggacaaggactggaatggatgggcaacatctaccccagcgacagctacaccgtgtacaaccagaaattcaaggaccgcgtgaccatgaccagggacaccagcacaagcacagtgtacatggaactgagcagcctgcggagcgaggataccgccgtgtattattgcgccagaacctggcggggcaacagcttcgattattggggccagggaaccaccgtgaccgtgtcatctacgcgtggaatgaggactgaggatcttcccaaagctgtcgtctttctcgaaccccaatggtatcgggtgctcgaaaaagactctgtgacactgaaatgccaaggggcctactctcccgaggacaactccacacagtggtttcataatgagtccctcatcagctctcaggccagctcttatttcattgatgccgctacagtggacgactccggcgagtatcggtgtcagaccaatctgtctacactgtctgaccccgtgcagcttgaggtccacattggatggttgctcttgcaagccccacgctgggttttcaaagaggaagatccaatccatctgcggtgccacagctggaaaaacaccgctctccacaaagtcacatacctgcaaaatggcaaaggacgcaaatacttccatcacaattccgatttttacattccgaaggctaccctgaaagacagcggcagctatttctgccggggactcgtcggctccaagaatgtgtcctccgaaaccgtgaatatcacgattacccaaggactggctgtgcctacaatctctagcttctttccgcctggataccaagtctccttctgtcttgtgatggtcctcctgtttgctgtggacacaggactgtacttttccgtg

SEQ ID NO: 37655 - DNA, 1449 bp, synthetic construct
  source 1..1449: mol_type = other DNA
atggccttaccagtgaccgccttgctcctgccgctggccttgctgctccacgccgccaggccggacatcgtgatgacacagagccctgatagcctggccgtgtctctgggagagagagccaccatcaactgcaagagcagccagagcctgctgaacagcggcaacaacaagaactacgtgacatggtatcagcagaagcccggccagcctcctaagctgctgatctactggggcagcaccagatccacaggcgtgcccgatagattttctggctctggcagcggcaccgacttcaccctgacaatttctagcctgcaagccgaggacgtggccgtgtactactgccagaacgactacacataccccttcaccttcggccagggcaccaagctggaaatcaaaggcggaggcggaagtggaggcggaggatctggcggcggaggctctcaagttcagctggttcagagcggagccgaagtgaagaaacctggggcctctgtgaaggtgtcctgcaaggcttccggctataccttcaccagcttttggctgaactgggtccgacaggcccctggacaaggactggaatggatgggcaacatctaccccagcgacagctacaccgtgtacaaccagaaattcaaggaccgcgtgaccatgaccagggacaccagcacaagcacagtgtacatggaactgagcagcctgcggagcgaggataccgccgtgtattattgcgccagaacctggcggggcaacagcttcgattattggggccagggaaccaccgtgaccgtgtcatctacgcgtggaatgaggactgaggatcttcccaaagctgtcgtctttctcgaaccccaatggtatcgggtgctcgaaaaagactctgtgacactgaaatgccaaggggcctactctcccgaggacaactccacacagtggtttcataatgagtccctcatcagctctcaggccagctcttatttcattgatgccgctacagtggacgactccggcgagtatcggtgtcagaccaatctgtctacactgtctgaccccgtgcagcttgaggtccacattggatggttgctcttgcaagccccacgctgggttttcaaagaggaagatccaatccatctgcggtgccacagctggaaaaacaccgctctccacaaagtcacatacctgcaaaatggcaaaggacgcaaatacttccatcacaattccgatttttacattccgaaggctaccctgaaagacagcggcagctatttctgccggggactcgtcggctccaagaatgtgtcctccgaaaccgtgaatatcacgattacccaaggactggctgtgcctacaatctctagcttctttccgcctggataccaagtctccttctgtcttgtgatggtcctcctgtttgctgtggacacaggactgtacttttccgtgaaa

SEQ ID NO: 37656 - DNA, 2181 bp, synthetic construct
  source 1..2181: mol_type = other DNA
atggccttaccagtgaccgccttgctcctgccgctggccttgctgctccacgccgccaggccggacatcgtgatgacacagagccctgatagcctggccgtgtctctgggagagagagccaccatcaactgcaagagcagccagagcctgctgaacagcggcaacaacaagaactacgtgacatggtatcagcagaagcccggccagcctcctaagctgctgatctactggggcagcaccagatccacaggcgtgcccgatagattttctggctctggcagcggcaccgacttcaccctgacaatttctagcctgcaagccgaggacgtggccgtgtactactgccagaacgactacacataccccttcaccttcggccagggcaccaagctggaaatcaaactcgagggacagcctaaggccaatcctaccgtgacactgttccctccaagcagcgaagaactccaggccaacaaggccacacttgtgtgcctgatctccgacttctaccctggggctgtgacagtggcttggaaggccgatggatctcctgtgaaagccggcgtggaaaccaccaagccatccaagcagagcaacaacaaatacgccgccagctcctacctgagcctgacacctgagcagtggaagtcccacagatcctacagctgccaagtgacccacgaaggcagcaccgtggaaaagacagtggcccctacagagtgcagcggatcccagagcttcggcctgctggaccccaagctgtgctacctgctggatggcatcctgttcatctacggcgtgatcctgaccgccctgttcctgagagtgaagttcagcagaagcgccgacgcccctgcctaccagcagggacagaaccaactgtacaacgagctgaacctgggcagacgggaagagtacgacgtgctggacaagcggagaggcagggaccctgagatgggcggaaagccccagcggagaaagaacccccaggaaggactgtataacgaactccagaaagacaagatggccgaagcctacagcgagatcggcatgaagggcgagcggagaagaggcaagggccacgatggcctgtaccagggcctgagcaccgccaccaaggacacctatgacgccctgcacatgcaggccctgcctccaagaagggccaagcgatctggatctggagcaacaaacttctcactactcaaacaagcaggtgacgtggaggagaatcccgggcctactagtatggactggatttggcgcatccttttccttgtcggcgctgctaccggcgcgcattccttcgaacaagttcagctggttcagagcggagccgaagtgaagaaacctggggcctctgtgaaggtgtcctgcaaggcttccggctataccttcaccagcttttggctgaactgggtccgacaggcccctggacaaggactggaatggatgggcaacatctaccccagcgacagctacaccgtgtacaaccagaaattcaaggaccgcgtgaccatgaccagggacaccagcacaagcacagtgtacatggaactgagcagcctgcggagcgaggataccgccgtgtattattgcgccagaacctggcggggcaacagcttcgattattggggccagggaaccaccgtgaccgtgtcatctacgcgtgcctctacaaagggaccctccgtgtttcctctggctcccagcagcaagtctacaagcggaggaacagccgctctgggctgcctggtcaaggattactttcccgagcctgtgaccgtgtcctggaatagcggagcactgacaagcggcgtgcacacctttccagccgtgctgcaaagcagcggcctgtactctctgagcagcgtggtcacagtgcctagctctagcctgggcacccagacctacatctgcaatgtgaaccacaagcctagcaacaccaaggtggacaagagagtggaacccaagagctgtggtaccatcactcaaggtttggcagtgtcaaccatctcatcattctttccacctggctaccaagtgtccttctgcctggtcatggtgctgctgttcgccgtggataccggcctgtacttcagcgtcaagaccaacatccggtccagcaccagagactggaaggaccacaagttcaagtggcggaaggaccctcaggacaag

SEQ ID NO: 37657 - DNA, 2226 bp, synthetic construct
  source 1..2226: mol_type = other DNA
atggccttaccagtgaccgccttgctcctgccgctggccttgctgctccacgccgccaggccggacatcgtgatgacacagagccctgatagcctggccgtgtctctgggagagagagccaccatcaactgcaagagcagccagagcctgctgaacagcggcaacaacaagaactacgtgacatggtatcagcagaagcccggccagcctcctaagctgctgatctactggggcagcaccagatccacaggcgtgcccgatagattttctggctctggcagcggcaccgacttcaccctgacaatttctagcctgcaagccgaggacgtggccgtgtactactgccagaacgactacacataccccttcaccttcggccagggcaccaagctggaaatcaaactcgaggacctgaagaacgtgttcccacctgaggtggccgtgttcgagcctagcgaggccgagatcagccacacccagaaagccaccctcgtgtgcctggctaccggcttctaccccgaccatgtggaactgtcttggtgggtcaacggcaaagaggtgcacagcggcgtgtctaccgacccccagccactgaaagaacagcccgccctgaacgacagccggtactgcctgagcagcagactgagagtgtccgccaccttctggcagaacccccggaaccacttcagatgccaggtgcagttctacggcctgagcgagaacgacgagtggacccaggacagagccaagcccgtgacccagatcgtgtctgccgaagcctggggcagagccgattgcggatcccagagcttcggcctgctggaccccaagctgtgctacctgctggatggcatcctgttcatctacggcgtgatcctgaccgccctgttcctgagagtgaagttcagcagaagcgccgacgcccctgcctaccagcagggacagaaccaactgtacaacgagctgaacctgggcagacgggaagagtacgacgtgctggacaagcggagaggcagggaccctgagatgggcggaaagccccagcggagaaagaacccccaggaaggactgtataacgaactccagaaagacaagatggccgaagcctacagcgagatcggcatgaagggcgagcggagaagaggcaagggccacgatggcctgtaccagggcctgagcaccgccaccaaggacacctatgacgccctgcacatgcaggccctgcctccaagaagggccaagcgatctggatctggagcaacaaacttctcactactcaaacaagcaggtgacgtggaggagaatcccgggcctactagtatggactggatttggcgcatccttttccttgtcggcgctgctaccggcgcgcattccttcgaacaagttcagctggttcagagcggagccgaagtgaagaaacctggggcctctgtgaaggtgtcctgcaaggcttccggctataccttcaccagcttttggctgaactgggtccgacaggcccctggacaaggactggaatggatgggcaacatctaccccagcgacagctacaccgtgtacaaccagaaattcaaggaccgcgtgaccatgaccagggacaccagcacaagcacagtgtacatggaactgagcagcctgcggagcgaggataccgccgtgtattattgcgccagaacctggcggggcaacagcttcgattattggggccagggaaccaccgtgaccgtgtcatctacgcgtatccagaaccctgatcctgccgtgtaccagctgcgggatagcaagagcagcgacaagagcgtgtgtctgttcaccgacttcgacagccagaccaacgtgtcccagagcaaggactccgacgtgtacatcaccgataagaccgtgctggacatgcggagcatggacttcaagagcaactccgccgtggcctggtccaacaagtccgatttcgcctgcgccaacgccttcaacaacagcattatccccgaggacacattcttcccaagccccgagagcagctgcggtaccatcactcaaggtttggcagtgtcaaccatctcatcattctttccacctggctaccaagtgtccttctgcctggtcatggtgctgctgttcgccgtggataccggcctgtacttcagcgtcaagaccaacatccggtccagcaccagagactggaaggaccacaagttcaagtggcggaaggaccctcaggacaag

SEQ ID NO: 37658 - DNA, 2151 bp, synthetic construct
  source 1..2151: mol_type = other DNA
atggccttaccagtgaccgccttgctcctgccgctggccttgctgctccacgccgccaggccggacatcgtgatgacacagagccctgatagcctggccgtgtctctgggagagagagccaccatcaactgcaagagcagccagagcctgctgaacagcggcaacaacaagaactacgtgacatggtatcagcagaagcccggccagcctcctaagctgctgatctactggggcagcaccagatccacaggcgtgcccgatagattttctggctctggcagcggcaccgacttcaccctgacaatttctagcctgcaagccgaggacgtggccgtgtactactgccagaacgactacacataccccttcaccttcggccagggcaccaagctggaaatcaaactcgaggacctgaagaacgtgttcccacctgaggtggccgtgttcgagcctagcgaggccgagatcagccacacccagaaagccaccctcgtgtgcctggctaccggcttctaccccgaccatgtggaactgtcttggtgggtcaacggcaaagaggtgcacagcggcgtgtctaccgacccccagccactgaaagaacagcccgccctgaacgacagccggtactgcctgagcagcagactgagagtgtccgccaccttctggcagaacccccggaaccacttcagatgccaggtgcagttctacggcctgagcgagaacgacgagtggacccaggacagagccaagcccgtgacccagatcgtgtctgccgaagcctggggcagagccgattgcggatcccagagcttcggcctgctggaccccaagctgtgctacctgctggatggcatcctgttcatctacggcgtgatcctgaccgccctgttcctgagagtgaagttcagcagaagcgccgacgcccctgcctaccagcagggacagaaccaactgtacaacgagctgaacctgggcagacgggaagagtacgacgtgctggacaagcggagaggcagggaccctgagatgggcggaaagccccagcggagaaagaacccccaggaaggactgtataacgaactccagaaagacaagatggccgaagcctacagcgagatcggcatgaagggcgagcggagaagaggcaagggccacgatggcctgtaccagggcctgagcaccgccaccaaggacacctatgacgccctgcacatgcaggccctgcctccaagaagggccaagcgatctggatctggagcaacaaacttctcactactcaaacaagcaggtgacgtggaggagaatcccgggcctactagtatggactggatttggcgcatccttttccttgtcggcgctgctaccggcgcgcattccttcgaacaagttcagctggttcagagcggagccgaagtgaagaaacctggggcctctgtgaaggtgtcctgcaaggcttccggctataccttcaccagcttttggctgaactgggtccgacaggcccctggacaaggactggaatggatgggcaacatctaccccagcgacagctacaccgtgtacaaccagaaattcaaggaccgcgtgaccatgaccagggacaccagcacaagcacagtgtacatggaactgagcagcctgcggagcgaggataccgccgtgtattattgcgccagaacctggcggggcaacagcttcgattattggggccagggaaccaccgtgaccgtgtcatctacgcgtatccagaaccctgatcctgccgtgtaccagctgcgggatagcaagagcagcgacaagagcgtgtgtctgttcaccgacttcgacagccagaccaacgtgtcccagagcaaggactccgacgtgtacatcaccgataagaccgtgctggacatgcggagcatggacttcaagagcaactccgccgtggcctggtccaacaagtccgatttcgcctgcgccaacgccttcaacaacagcattatccccgaggacacattcttcccaagccccgagagcagctgcggtaccatcactcaaggtttggcagtgtcaaccatctcatcattctttccacctggctaccaagtgtccttctgcctggtcatggtgctgctgttcgccgtggataccggcctgtacttcagcgtc

SEQ ID NO: 37659 - DNA, 2154 bp, synthetic construct
  source 1..2154: mol_type = other DNA
atggccttaccagtgaccgccttgctcctgccgctggccttgctgctccacgccgccaggccggacatcgtgatgacacagagccctgatagcctggccgtgtctctgggagagagagccaccatcaactgcaagagcagccagagcctgctgaacagcggcaacaacaagaactacgtgacatggtatcagcagaagcccggccagcctcctaagctgctgatctactggggcagcaccagatccacaggcgtgcccgatagattttctggctctggcagcggcaccgacttcaccctgacaatttctagcctgcaagccgaggacgtggccgtgtactactgccagaacgactacacataccccttcaccttcggccagggcaccaagctggaaatcaaactcgaggacctgaagaacgtgttcccacctgaggtggccgtgttcgagcctagcgaggccgagatcagccacacccagaaagccaccctcgtgtgcctggctaccggcttctaccccgaccatgtggaactgtcttggtgggtcaacggcaaagaggtgcacagcggcgtgtctaccgacccccagccactgaaagaacagcccgccctgaacgacagccggtactgcctgagcagcagactgagagtgtccgccaccttctggcagaacccccggaaccacttcagatgccaggtgcagttctacggcctgagcgagaacgacgagtggacccaggacagagccaagcccgtgacccagatcgtgtctgccgaagcctggggcagagccgattgcggatcccagagcttcggcctgctggaccccaagctgtgctacctgctggatggcatcctgttcatctacggcgtgatcctgaccgccctgttcctgagagtgaagttcagcagaagcgccgacgcccctgcctaccagcagggacagaaccaactgtacaacgagctgaacctgggcagacgggaagagtacgacgtgctggacaagcggagaggcagggaccctgagatgggcggaaagccccagcggagaaagaacccccaggaaggactgtataacgaactccagaaagacaagatggccgaagcctacagcgagatcggcatgaagggcgagcggagaagaggcaagggccacgatggcctgtaccagggcctgagcaccgccaccaaggacacctatgacgccctgcacatgcaggccctgcctccaagaagggccaagcgatctggatctggagcaacaaacttctcactactcaaacaagcaggtgacgtggaggagaatcccgggcctactagtatggactggatttggcgcatccttttccttgtcggcgctgctaccggcgcgcattccttcgaacaagttcagctggttcagagcggagccgaagtgaagaaacctggggcctctgtgaaggtgtcctgcaaggcttccggctataccttcaccagcttttggctgaactgggtccgacaggcccctggacaaggactggaatggatgggcaacatctaccccagcgacagctacaccgtgtacaaccagaaattcaaggaccgcgtgaccatgaccagggacaccagcacaagcacagtgtacatggaactgagcagcctgcggagcgaggataccgccgtgtattattgcgccagaacctggcggggcaacagcttcgattattggggccagggaaccaccgtgaccgtgtcatctacgcgtatccagaaccctgatcctgccgtgtaccagctgcgggatagcaagagcagcgacaagagcgtgtgtctgttcaccgacttcgacagccagaccaacgtgtcccagagcaaggactccgacgtgtacatcaccgataagaccgtgctggacatgcggagcatggacttcaagagcaactccgccgtggcctggtccaacaagtccgatttcgcctgcgccaacgccttcaacaacagcattatccccgaggacacattcttcccaagccccgagagcagctgcggtaccatcactcaaggtttggcagtgtcaaccatctcatcattctttccacctggctaccaagtgtccttctgcctggtcatggtgctgctgttcgccgtggataccggcctgtacttcagcgtcaag

SEQ ID NO: 37660 - DNA, 2157 bp, synthetic construct
  source 1..2157: mol_type = other DNA
atggccttaccagtgaccgccttgctcctgccgctggccttgctgctccacgccgccaggccggacatcgtgatgacacagagccctgatagcctggccgtgtctctgggagagagagccaccatcaactgcaagagcagccagagcctgctgaacagcggcaacaacaagaactacgtgacatggtatcagcagaagcccggccagcctcctaagctgctgatctactggggcagcaccagatccacaggcgtgcccgatagattttctggctctggcagcggcaccgacttcaccctgacaatttctagcctgcaagccgaggacgtggccgtgtactactgccagaacgactacacataccccttcaccttcggccagggcaccaagctggaaatcaaactcgaggacctgaagaacgtgttcccacctgaggtggccgtgttcgagcctagcgaggccgagatcagccacacccagaaagccaccctcgtgtgcctggctaccggcttctaccccgaccatgtggaactgtcttggtgggtcaacggcaaagaggtgcacagcggcgtgtctaccgacccccagccactgaaagaacagcccgccctgaacgacagccggtactgcctgagcagcagactgagagtgtccgccaccttctggcagaacccccggaaccacttcagatgccaggtgcagttctacggcctgagcgagaacgacgagtggacccaggacagagccaagcccgtgacccagatcgtgtctgccgaagcctggggcagagccgattgcggatcccagagcttcggcctgctggaccccaagctgtgctacctgctggatggcatcctgttcatctacggcgtgatcctgaccgccctgttcctgagagtgaagttcagcagaagcgccgacgcccctgcctaccagcagggacagaaccaactgtacaacgagctgaacctgggcagacgggaagagtacgacgtgctggacaagcggagaggcagggaccctgagatgggcggaaagccccagcggagaaagaacccccaggaaggactgtataacgaactccagaaagacaagatggccgaagcctacagcgagatcggcatgaagggcgagcggagaagaggcaagggccacgatggcctgtaccagggcctgagcaccgccaccaaggacacctatgacgccctgcacatgcaggccctgcctccaagaagggccaagcgatctggatctggagcaacaaacttctcactactcaaacaagcaggtgacgtggaggagaatcccgggcctactagtatggactggatttggcgcatccttttccttgtcggcgctgctaccggcgcgcattccttcgaacaagttcagctggttcagagcggagccgaagtgaagaaacctggggcctctgtgaaggtgtcctgcaaggcttccggctataccttcaccagcttttggctgaactgggtccgacaggcccctggacaaggactggaatggatgggcaacatctaccccagcgacagctacaccgtgtacaaccagaaattcaaggaccgcgtgaccatgaccagggacaccagcacaagcacagtgtacatggaactgagcagcctgcggagcgaggataccgccgtgtattattgcgccagaacctggcggggcaacagcttcgattattggggccagggaaccaccgtgaccgtgtcatctacgcgtatccagaaccctgatcctgccgtgtaccagctgcgggatagcaagagcagcgacaagagcgtgtgtctgttcaccgacttcgacagccagaccaacgtgtcccagagcaaggactccgacgtgtacatcaccgataagaccgtgctggacatgcggagcatggacttcaagagcaactccgccgtggcctggtccaacaagtccgatttcgcctgcgccaacgccttcaacaacagcattatccccgaggacacattcttcccaagccccgagagcagctgcggtaccatcactcaaggtttggcagtgtcaaccatctcatcattctttccacctggctaccaagtgtccttctgcctggtcatggtgctgctgttcgccgtggataccggcctgtacttcagcgtcaagacc

SEQ ID NO: 37661 - DNA, 1968 bp, synthetic construct
  source 1..1968: mol_type = other DNA
atggccttaccagtgaccgccttgctcctgccgctggccttgctgctccacgccgccaggccggacatcgtgatgacacagagccctgatagcctggccgtgtctctgggagagagagccaccatcaactgcaagagcagccagagcctgctgaacagcggcaacaacaagaactacgtgacatggtatcagcagaagcccggccagcctcctaagctgctgatctactggggcagcaccagatccacaggcgtgcccgatagattttctggctctggcagcggcaccgacttcaccctgacaatttctagcctgcaagccgaggacgtggccgtgtactactgccagaacgactacacataccccttcaccttcggccagggcaccaagctggaaatcaaactcgagggacagcctaaggccaatcctaccgtgacactgttccctccaagcagcgaagaactccaggccaacaaggccacacttgtgtgcctgatctccgacttctaccctggggctgtgacagtggcttggaaggccgatggatctcctgtgaaagccggcgtggaaaccaccaagccatccaagcagagcaacaacaaatacgccgccagctcctacctgagcctgacacctgagcagtggaagtcccacagatcctacagctgccaagtgacccacgaaggcagcaccgtggaaaagacagtggcccctacagagtgcagcggatccctgggagagcctcagctgtgctatatcctggacgccatcctgtttctgtacggcatcgtgctgaccctgctgtactgccggctgaagatccaagtgcggaaggccgccatcaccagctacgagaaatccgacggcgtgtacaccggcctgagcaccagaaatcaagagacatacgagacactgaagcacgaaaagcctccacaaagggccaagcgatctggatctggagcaacaaacttctcactactcaaacaagcaggtgacgtggaggagaatcccgggcctactagtatggactggatttggcgcatccttttccttgtcggcgctgctaccggcgcgcattccttcgaacaagttcagctggttcagagcggagccgaagtgaagaaacctggggcctctgtgaaggtgtcctgcaaggcttccggctataccttcaccagcttttggctgaactgggtccgacaggcccctggacaaggactggaatggatgggcaacatctaccccagcgacagctacaccgtgtacaaccagaaattcaaggaccgcgtgaccatgaccagggacaccagcacaagcacagtgtacatggaactgagcagcctgcggagcgaggataccgccgtgtattattgcgccagaacctggcggggcaacagcttcgattattggggccagggaaccaccgtgaccgtgtcatctacgcgtgcctctacaaagggaccctccgtgtttcctctggctcccagcagcaagtctacaagcggaggaacagccgctctgggctgcctggtcaaggattactttcccgagcctgtgaccgtgtcctggaatagcggagcactgacaagcggcgtgcacacctttccagccgtgctgcaaagcagcggcctgtactctctgagcagcgtggtcacagtgcctagctctagcctgggcacccagacctacatctgcaatgtgaaccacaagcctagcaacaccaaggtggacaagagagtggaacccaagagctgtggtaccctcggagaaccacagctctgttacattctggatgctatcctgttcctctatgggatcgtcctgacactcctgtattgcagactcaaaattcaagttcgcaaagccgccattacctcttacgagaagagtgatggggtgtacacaggactgtctacccggaatcaagaaacctacgaaaccctcaaacatgagaagccacctcagtaa

SEQ ID NO: 37662 - DNA, 1875 bp, synthetic construct
  source 1..1875: mol_type = other DNA
atggccttaccagtgaccgccttgctcctgccgctggccttgctgctccacgccgccaggccggacatcgtgatgacacagagccctgatagcctggccgtgtctctgggagagagagccaccatcaactgcaagagcagccagagcctgctgaacagcggcaacaacaagaactacgtgacatggtatcagcagaagcccggccagcctcctaagctgctgatctactggggcagcaccagatccacaggcgtgcccgatagattttctggctctggcagcggcaccgacttcaccctgacaatttctagcctgcaagccgaggacgtggccgtgtactactgccagaacgactacacataccccttcaccttcggccagggcaccaagctggaaatcaaactcgaggacctgaagaacgtgttcccacctgaggtggccgtgttcgagcctagcgaggccgagatcagccacacccagaaagccaccctcgtgtgcctggctaccggcttctaccccgaccatgtggaactgtcttggtgggtcaacggcaaagaggtgcacagcggcgtgtgtaccgacccccagccactgaaagaacagcccgccctgaacgacagccggtactgcctgagcagcagactgagagtgtccgccaccttctggcagaacccccggaaccacttcagatgccaggtgcagttctacggcctgagcgagaacgacgagtggacccaggacagagccaagcccgtgacccagatcgtgtctgccgaagcctggggcagagccgattgcggctttaccagcgagagctaccagcagggcgtgctgagcgcctactacatgtacttgttgctgctgctgaagtccgtggtgtacttcgccatcatcacatgctgcctgctgcggagaaccgccttctgctgcaacggcgagaagtctagggccaagcgatctggatctggagcaacaaacttctcactactcaaacaagcaggtgacgtggaggagaatcccgggcctactagtatggactggatttggcgcatccttttccttgtcggcgctgctaccggcgcgcattccttcgaacaagttcagctggttcagagcggagccgaagtgaagaaacctggggcctctgtgaaggtgtcctgcaaggcttccggctataccttcaccagcttttggctgaactgggtccgacaggcccctggacaaggactggaatggatgggcaacatctaccccagcgacagctacaccgtgtacaaccagaaattcaaggaccgcgtgaccatgaccagggacaccagcacaagcacagtgtacatggaactgagcagcctgcggagcgaggataccgccgtgtattattgcgccagaacctggcggggcaacagcttcgattattggggccagggaaccaccgtgaccgtgtcatctacgcgtatccagaaccctgatcctgccgtgtaccagctgcgggatagcaagagcagcgacaagagcgtgtgtctgttcaccgacttcgacagccagaccaacgtgtcccagagcaaggactccgacgtgtacatcaccgataagtgcgtgctggacatgcggagcatggacttcaagagcaactccgccgtggcctggtccaacaagtccgatttcgcctgcgccaacgccttcaacaacagcattatccccgaggacacattcttcccaagccccgagagcagctgcgacgtgaagctggtggaaaagagcttcgagacagacaccaacctgaacttccagaacctgagcgtgatcggcttcagaatcctgctgctgaaagtggccggctttaacctgctgatgaccctgcggctgtggtccagc

SEQ ID NO: 37663 - DNA, 1896 bp, synthetic construct
  source 1..1896: mol_type = other DNA
atggccttaccagtgaccgccttgctcctgccgctggccttgctgctccacgccgccaggccggacatcgtgatgacacagagccctgatagcctggccgtgtctctgggagagagagccaccatcaactgcaagagcagccagagcctgctgaacagcggcaacaacaagaactacgtgacatggtatcagcagaagcccggccagcctcctaagctgctgatctactggggcagcaccagatccacaggcgtgcccgatagattttctggctctggcagcggcaccgacttcaccctgacaatttctagcctgcaagccgaggacgtggccgtgtactactgccagaacgactacacataccccttcaccttcggccagggcaccaagctggaaatcaaactcgaggacaagcagctggacgccgacgtgtcccccaagcctaccatcttcctgccctctatcgccgagacaaagctccagaaggccggcacctacctgtgcctgctggaaaagttcttcccagatgtgattaagatccactggcaggaaaagaagtccaacaccatcctgggcagccaggaaggcaacaccatgaagaccaacgacacctacatgaagttcagctggctgaccgtgcccgagaagtccctggacaaagaacacagatgcatcgtgcggcacgaaaacaacaagaacggcgtggaccaggaaatcatcttcccacccatcaagaccgatgtgattacaatggaccccaaggacaactgctccaaggacgccaacgataccctgctgctccagctgaccaacaccagcgcctactacatgtacgagatcctgctgggcaaggccaccctgtacgccgtgctggtgtctgccctggtgctgatggctatggtcaagcggaaggacagccggggaagggccaagcgatctggatctggagcaacaaacttctcactactcaaacaagcaggtgacgtggaggagaatcccgggcctactagtatggactggatttggcgcatccttttccttgtcggcgctgctaccggcgcgcattccttcgaacaagttcagctggttcagagcggagccgaagtgaagaaacctggggcctctgtgaaggtgtcctgcaaggcttccggctataccttcaccagcttttggctgaactgggtccgacaggcccctggacaaggactggaatggatgggcaacatctaccccagcgacagctacaccgtgtacaaccagaaattcaaggaccgcgtgaccatgaccagggacaccagcacaagcacagtgtacatggaactgagcagcctgcggagcgaggataccgccgtgtattattgcgccagaacctggcggggcaacagcttcgattattggggccagggaaccaccgtgaccgtgtcatctacgcgtagccagcctcacaccaagcccagcgtgttcgtgatgaagaacggcaccaacgtggcctgcctcgtgaaagagttctaccccaaggacatcaggatcaacctggtgtccagcaagaagatcaccgagttcgaccccgccatcgtgatctcccccagcggcaagtacaacgccgtgaagctggggaagtatgaggacagcaacagcgtgacctgctccgtgcagcacgacaacaagaccgtgcacagcaccgactttgaagtgaaaaccgactccaccgaccacgtgaagcccaaagagacagagaacaccaagcagcccagcaagagctgccacaagcccaaggccatcgtgcacaccgagaaagtgaacatgatgagcctgaccgtgatcggcttcagaatcctgctgctgaaagtggccggctttaacctgctgatgaccctgcggctgtggtccagctaa

SEQ ID NO: 37664 - DNA, 1896 bp, synthetic construct
  source 1..1896: mol_type = other DNA
atggccttaccagtgaccgccttgctcctgccgctggccttgctgctccacgccgccaggccggacatcgtgatgacacagagccctgatagcctggccgtgtctctgggagagagagccaccatcaactgcaagagcagccagagcctgctgaacagcggcaacaacaagaactacgtgacatggtatcagcagaagcccggccagcctcctaagctgctgatctactggggcagcaccagatccacaggcgtgcccgatagattttctggctctggcagcggcaccgacttcaccctgacaatttctagcctgcaagccgaggacgtggccgtgtactactgccagaacgactacacataccccttcaccttcggccagggcaccaagctggaaatcaaactcgaggacaagcagctggacgccgacgtgtcccccaagcctaccatcttcctgccctctatcgccgagacaaagctccagaaggccggcacctacctgtgcctgctggaaaagttcttcccagatgtgattaagatccactggcaggaaaagaagtccaacaccatcctgggcagccaggaaggcaacaccatgaagaccaacgacacctacatgaagttcagctggctgaccgtgcccgagaagtccctggacaaagaacacagatgcatcgtgcggcacgaaaacaacaagaacggcgtggaccaggaaatcatcttcccacccatcaagaccgatgtgattacaatggaccccaaggacaactgctccaaggacgccaacgataccctgctgctccagctgaccaacaccagcgccaccatcctgtacgagatcctgctgggcaaggccaccctgtacgccgtgctggtgtctgccctggtgctgatggctatggtcaagcggaaggacagccggggaagggccaagcgatctggatctggagcaacaaacttctcactactcaaacaagcaggtgacgtggaggagaatcccgggcctactagtatggactggatttggcgcatccttttccttgtcggcgctgctaccggcgcgcattccttcgaacaagttcagctggttcagagcggagccgaagtgaagaaacctggggcctctgtgaaggtgtcctgcaaggcttccggctataccttcaccagcttttggctgaactgggtccgacaggcccctggacaaggactggaatggatgggcaacatctaccccagcgacagctacaccgtgtacaaccagaaattcaaggaccgcgtgaccatgaccagggacaccagcacaagcacagtgtacatggaactgagcagcctgcggagcgaggataccgccgtgtattattgcgccagaacctggcggggcaacagcttcgattattggggccagggaaccaccgtgaccgtgtcatctacgcgtagccagcctcacaccaagcccagcgtgttcgtgatgaagaacggcaccaacgtggcctgcctcgtgaaagagttctaccccaaggacatcaggatcaacctggtgtccagcaagaagatcaccgagttcgaccccgccatcgtgatctcccccagcggcaagtacaacgccgtgaagctggggaagtatgaggacagcaacagcgtgacctgctccgtgcagcacgacaacaagaccgtgcacagcaccgactttgaagtgaaaaccgactccaccgaccacgtgaagcccaaagagacagagaacaccaagcagcccagcaagagctgccacaagcccaaggccatcgtgcacaccgagaaagtgaacatgatgagcctgaccgtgatcggcttcagaatcctgctgctgaaagtggccggctttaacctgctgatgaccctgcggctgtggtccagctaa

SEQ ID NO: 37665 - DNA, 1896 bp, synthetic construct
  source 1..1896: mol_type = other DNA
atggccttaccagtgaccgccttgctcctgccgctggccttgctgctccacgccgccaggccggacatcgtgatgacacagagccctgatagcctggccgtgtctctgggagagagagccaccatcaactgcaagagcagccagagcctgctgaacagcggcaacaacaagaactacgtgacatggtatcagcagaagcccggccagcctcctaagctgctgatctactggggcagcaccagatccacaggcgtgcccgatagattttctggctctggcagcggcaccgacttcaccctgacaatttctagcctgcaagccgaggacgtggccgtgtactactgccagaacgactacacataccccttcaccttcggccagggcaccaagctggaaatcaaactcgaggacaagcagctggacgccgacgtgtcccccaagcctaccatcttcctgccctctatcgccgagacaaagctccagaaggccggcacctacctgtgcctgctggaaaagttcttcccagatgtgattaagatccactggcaggaaaagaagtccaacaccatcctgggcagccaggaaggcaacaccatgaagaccaacgacacctacatgaagttcagctggctgaccgtgcccgagaagtccctggacaaagaacacagatgcatcgtgcggcacgaaaacaacaagaacggcgtggaccaggaaatcatcttcccacccatcaagaccgatgtgattacaatggaccccaaggacaactgctccaaggacgccaacgataccctgctgctccagctgaccaacaccagcgcctactacatgtacgagatcctgctgggcaaggccaccctgtacgccgtgctggtgtctgccctggtgctgatggctatggtcaagcggaaggacagccggggaagggccaagcgatctggatctggagcaacaaacttctcactactcaaacaagcaggtgacgtggaggagaatcccgggcctactagtatggactggatttggcgcatccttttccttgtcggcgctgctaccggcgcgcattccttcgaacaagttcagctggttcagagcggagccgaagtgaagaaacctggggcctctgtgaaggtgtcctgcaaggcttccggctataccttcaccagcttttggctgaactgggtccgacaggcccctggacaaggactggaatggatgggcaacatctaccccagcgacagctacaccgtgtacaaccagaaattcaaggaccgcgtgaccatgaccagggacaccagcacaagcacagtgtacatggaactgagcagcctgcggagcgaggataccgccgtgtattattgcgccagaacctggcggggcaacagcttcgattattggggccagggaaccaccgtgaccgtgtcatctacgcgtagccagcctcacaccaagcccagcgtgttcgtgatgaagaacggcaccaacgtggcctgcctcgtgaaagagttctaccccaaggacatcaggatcaacctggtgtccagcaagaagatcaccgagttcgaccccgccatcgtgatctcccccagcggcaagtacaacgccgtgaagctggggaagtacgaggacagcaacagcgtgacctgctccgtgcagcacgacaacaagaccgtgcacagcaccgactttgaagtgaaaaccgactccaccgaccacgtgaagcccaaagagacagagaacaccaagcagcccagcaagagctgccacaagcccaaggccatcgtgcacaccgagaaagtgaacatgatgagcctgaccgtgctgggcttcagaatcctgctgctgaaagtggccggctttaacctgctgatgaccctgcggctgtggtccagctaa

SEQ ID NO: 37666 - DNA, 1896 bp, synthetic construct
  source 1..1896: mol_type = other DNA
atggccttaccagtgaccgccttgctcctgccgctggccttgctgctccacgccgccaggccggacatcgtgatgacacagagccctgatagcctggccgtgtctctgggagagagagccaccatcaactgcaagagcagccagagcctgctgaacagcggcaacaacaagaactacgtgacatggtatcagcagaagcccggccagcctcctaagctgctgatctactggggcagcaccagatccacaggcgtgcccgatagattttctggctctggcagcggcaccgacttcaccctgacaatttctagcctgcaagccgaggacgtggccgtgtactactgccagaacgactacacataccccttcaccttcggccagggcaccaagctggaaatcaaactcgaggacaagcagctggacgccgacgtgtcccccaagcctaccatcttcctgccctctatcgccgagacaaagctccagaaggccggcacctacctgtgcctgctggaaaagttcttcccagatgtgattaagatccactggcaggaaaagaagtccaacaccatcctgggcagccaggaaggcaacaccatgaagaccaacgacacctacatgaagttcagctggctgaccgtgcccgagaagtccctggacaaagaacacagatgcatcgtgcggcacgaaaacaacaagaacggcgtggaccaggaaatcatcttcccacccatcaagaccgatgtgattacaatggaccccaaggacaactgctccaaggacgccaacgataccctgctgctccagctgaccaacaccagcgccaccatcctgtacgagatcctgctgggcaaggccaccctgtacgccgtgctggtgtctgccctggtgctgatggctatggtcaagcggaaggacagccggggaagggccaagcgatctggatctggagcaacaaacttctcactactcaaacaagcaggtgacgtggaggagaatcccgggcctactagtatggactggatttggcgcatccttttccttgtcggcgctgctaccggcgcgcattccttcgaacaagttcagctggttcagagcggagccgaagtgaagaaacctggggcctctgtgaaggtgtcctgcaaggcttccggctataccttcaccagcttttggctgaactgggtccgacaggcccctggacaaggactggaatggatgggcaacatctaccccagcgacagctacaccgtgtacaaccagaaattcaaggaccgcgtgaccatgaccagggacaccagcacaagcacagtgtacatggaactgagcagcctgcggagcgaggataccgccgtgtattattgcgccagaacctggcggggcaacagcttcgattattggggccagggaaccaccgtgaccgtgtcatctacgcgtagccagcctcacaccaagcccagcgtgttcgtgatgaagaacggcaccaacgtggcctgcctcgtgaaagagttctaccccaaggacatcaggatcaacctggtgtccagcaagaagatcaccgagttcgaccccgccatcgtgatctcccccagcggcaagtacaacgccgtgaagctggggaagtacgaggacagcaacagcgtgacctgctccgtgcagcacgacaacaagaccgtgcacagcaccgactttgaagtgaaaaccgactccaccgaccacgtgaagcccaaagagacagagaacaccaagcagcccagcaagagctgccacaagcccaaggccatcgtgcacaccgagaaagtgaacatgatgagcctgaccgtgctgggcttcagaatcctgctgctgaaagtggccggctttaacctgctgatgaccctgcggctgtggtccagctaa

SEQ ID NO: 37667 - DNA, 1878 bp, synthetic construct
  source 1..1878: mol_type = other DNA
atggccttaccagtgaccgccttgctcctgccgctggccttgctgctccacgccgccaggccggacatcgtgatgacacagagccctgatagcctggccgtgtctctgggagagagagccaccatcaactgcaagagcagccagagcctgctgaacagcggcaacaacaagaactacgtgacatggtatcagcagaagcccggccagcctcctaagctgctgatctactggggcagcaccagatccacaggcgtgcccgatagattttctggctctggcagcggcaccgacttcaccctgacaatttctagcctgcaagccgaggacgtggccgtgtactactgccagaacgactacacataccccttcaccttcggccagggcaccaagctggaaatcaaactcgaggacctgaagaacgtgttcccacctgaggtggccgtgttcgagcctagcgaggccgagatcagccacacccagaaagccaccctcgtgtgcctggctaccggcttctaccccgaccatgtggaactgtcttggtgggtcaacggcaaagaggtgcacagcggcgtgtgtaccgacccccagccactgaaagaacagcccgccctgaacgacagccggtactgcctgagcagcagactgagagtgtccgccaccttctggcagaacccccggaaccacttcagatgccaggtgcagttctacggcctgagcgagaacgacgagtggacccaggacagagccaagcccgtgacccagatcgtgtctgccgaagcctggggcagagccgattgcggctttaccagcgagagctaccagcagggcgtgctgagcgccaccatcctgtacttgttgctgctgctgaagtccgtggtgtacttcgccatcatcacatgctgcctgctgcggagaaccgccttctgctgcaacggcgagaagtctagggccaagcgatctggatctggagcaacaaacttctcactactcaaacaagcaggtgacgtggaggagaatcccgggcctactagtatggactggatttggcgcatccttttccttgtcggcgctgctaccggcgcgcattccttcgaacaagttcagctggttcagagcggagccgaagtgaagaaacctggggcctctgtgaaggtgtcctgcaaggcttccggctataccttcaccagcttttggctgaactgggtccgacaggcccctggacaaggactggaatggatgggcaacatctaccccagcgacagctacaccgtgtacaaccagaaattcaaggaccgcgtgaccatgaccagggacaccagcacaagcacagtgtacatggaactgagcagcctgcggagcgaggataccgccgtgtattattgcgccagaacctggcggggcaacagcttcgattattggggccagggaaccaccgtgaccgtgtcatctacgcgtatccagaaccctgatcctgccgtgtaccagctgcgggatagcaagagcagcgacaagagcgtgtgtctgttcaccgacttcgacagccagaccaacgtgtcccagagcaaggactccgacgtgtacatcaccgataagtgcgtgctggacatgcggagcatggacttcaagagcaactccgccgtggcctggtccaacaagtccgatttcgcctgcgccaacgccttcaacaacagcattatccccgaggacacattcttcccaagccccgagagcagctgcgacgtgaagctggtggaaaagagcttcgagacagacaccaacctgaacttccagaacctgagcgtgatcggcctgcggatgctgttcgccaaaaccgtggccgtgaacttcctgctgaccgccaagctgttcttcctctaa

SEQ ID NO: 37668 - DNA, 1965 bp, synthetic construct
  source 1..1965: mol_type = other DNA
atggccttaccagtgaccgccttgctcctgccgctggccttgctgctccacgccgccaggccggacatcgtgatgacacagagccctgatagcctggccgtgtctctgggagagagagccaccatcaactgcaagagcagccagagcctgctgaacagcggcaacaacaagaactacgtgacatggtatcagcagaagcccggccagcctcctaagctgctgatctactggggcagcaccagatccacaggcgtgcccgatagattttctggctctggcagcggcaccgacttcaccctgacaatttctagcctgcaagccgaggacgtggccgtgtactactgccagaacgactacacataccccttcaccttcggccagggcaccaagctggaaatcaaactcgaggacctgaagaacgtgttcccacctgaggtggccgtgttcgagcctagcgaggccgagatcagccacacccagaaagccaccctcgtgtgcctggctaccggcttctaccccgaccatgtggaactgtcttggtgggtcaacggcaaagaggtgcacagcggcgtgtctaccgacccccagccactgaaagaacagcccgccctgaacgacagccggtactgcctgagcagcagactgagagtgtccgccaccttctggcagaacccccggaaccacttcagatgccaggtgcagttctacggcctgagcgagaacgacgagtggacccaggacagagccaagcccgtgacccagatcgtgtctgccgaagcctggggcagagccgattgcggatcctccaaggacgccaacgataccctgctgctccagctgaccaacaccagcgcctactacatgtacttgttgctgctgctgaagtccgtggtgtacttcgccatcatcacatgctgcctgctgcggagaaccgccttctgctgcaacggcgagaagtctagggccaagcgatctggatctggagcaacaaacttctcactactcaaacaagcaggtgacgtggaggagaatcccgggcctactagtatggactggatttggcgcatccttttccttgtcggcgctgctaccggcgcgcattccttcgaacaagttcagctggttcagagcggagccgaagtgaagaaacctggggcctctgtgaaggtgtcctgcaaggcttccggctataccttcaccagcttttggctgaactgggtccgacaggcccctggacaaggactggaatggatgggcaacatctaccccagcgacagctacaccgtgtacaaccagaaattcaaggaccgcgtgaccatgaccagggacaccagcacaagcacagtgtacatggaactgagcagcctgcggagcgaggataccgccgtgtattattgcgccagaacctggcggggcaacagcttcgattattggggccagggaaccaccgtgaccgtgtcatctacgcgtatccagaaccctgatcctgccgtgtaccagctgcgggatagcaagagcagcgacaagagcgtgtgtctgttcaccgacttcgacagccagaccaacgtgtcccagagcaaggactccgacgtgtacatcaccgataagaccgtgctggacatgcggagcatggacttcaagagcaactccgccgtggcctggtccaacaagtccgatttcgcctgcgccaacgccttcaacaacagcattatccccgaggacacattcttcccaagccccgagagcagctgcggtaccgaagtgaaaaccgactccaccgaccacgtgaagcccaaagagacagagaacaccaagcagcccagcaagagctgccacaagcccaaggccatcgtgcacaccgagaaagtgaacatgatgagcctgaccgtgctgggcctgcggatgctgttcgccaaaaccgtggccgtgaacttcctgctgaccgccaagctgttcttcctctaa

SEQ ID NO: 37669 - DNA, 1875 bp, synthetic construct
  source 1..1875: mol_type = other DNA
atggccttaccagtgaccgccttgctcctgccgctggccttgctgctccacgccgccaggccggacatcgtgatgacacagagccctgatagcctggccgtgtctctgggagagagagccaccatcaactgcaagagcagccagagcctgctgaacagcggcaacaacaagaactacgtgacatggtatcagcagaagcccggccagcctcctaagctgctgatctactggggcagcaccagatccacaggcgtgcccgatagattttctggctctggcagcggcaccgacttcaccctgacaatttctagcctgcaagccgaggacgtggccgtgtactactgccagaacgactacacataccccttcaccttcggccagggcaccaagctggaaatcaaactcgaggacctgaagaacgtgttcccacctgaggtggccgtgttcgagcctagcgaggccgagatcagccacacccagaaagccaccctcgtgtgcctggctaccggcttctaccccgaccatgtggaactgtcttggtgggtcaacggcaaagaggtgcacagcggcgtgtgtaccgacccccagccactgaaagaacagcccgccctgaacgacagccggtactgcctgagcagcagactgagagtgtccgccaccttctggcagaacccccggaaccacttcagatgccaggtgcagttctacggcctgagcgagaacgacgagtggacccaggacagagccaagcccgtgacccagatcgtgtctgccgaagcctggggcagagccgattgcgacgtgaagctggtggaaaagagcttcgagacagacaccaacctgaacttccagaacctgagcgtgatcggcttcagaatcctgctgctgaaagtggccggctttaacctgctgatgaccctgcggctgtggtccagcagggccaagcgatctggatctggagcaacaaacttctcactactcaaacaagcaggtgacgtggaggagaatcccgggcctactagtatggactggatttggcgcatccttttccttgtcggcgctgctaccggcgcgcattccttcgaacaagttcagctggttcagagcggagccgaagtgaagaaacctggggcctctgtgaaggtgtcctgcaaggcttccggctataccttcaccagcttttggctgaactgggtccgacaggcccctggacaaggactggaatggatgggcaacatctaccccagcgacagctacaccgtgtacaaccagaaattcaaggaccgcgtgaccatgaccagggacaccagcacaagcacagtgtacatggaactgagcagcctgcggagcgaggataccgccgtgtattattgcgccagaacctggcggggcaacagcttcgattattggggccagggaaccaccgtgaccgtgtcatctacgcgtatccagaaccctgatcctgccgtgtaccagctgcgggatagcaagagcagcgacaagagcgtgtgtctgttcaccgacttcgacagccagaccaacgtgtcccagagcaaggactccgacgtgtacatcaccgataagtgcgtgctggacatgcggagcatggacttcaagagcaactccgccgtggcctggtccaacaagtccgatttcgcctgcgccaacgccttcaacaacagcattatccccgaggacacattcttcccaagccccgagagcagctgcggctttaccagcgagagctaccagcagggcgtgctgagcgccaccatcctgtacgagatcctgctgggcaaggccaccctgtacgccgtgctggtgtctgccctggtgctgatggctatggtcaagcggaaggacagccggggataa

SEQ ID NO: 37670 - DNA, 1875 bp, synthetic construct
  source 1..1875: mol_type = other DNA
atggccttaccagtgaccgccttgctcctgccgctggccttgctgctccacgccgccaggccggacatcgtgatgacacagagccctgatagcctggccgtgtctctgggagagagagccaccatcaactgcaagagcagccagagcctgctgaacagcggcaacaacaagaactacgtgacatggtatcagcagaagcccggccagcctcctaagctgctgatctactggggcagcaccagatccacaggcgtgcccgatagattttctggctctggcagcggcaccgacttcaccctgacaatttctagcctgcaagccgaggacgtggccgtgtactactgccagaacgactacacataccccttcaccttcggccagggcaccaagctggaaatcaaactcgaggacctgaagaacgtgttcccacctgaggtggccgtgttcgagcctagcgaggccgagatcagccacacccagaaagccaccctcgtgtgcctggctaccggcttctaccccgaccatgtggaactgtcttggtgggtcaacggcaaagaggtgcacagcggcgtgtgtaccgacccccagccactgaaagaacagcccgccctgaacgacagccggtactgcctgagcagcagactgagagtgtccgccaccttctggcagaacccccggaaccacttcagatgccaggtgcagttctacggcctgagcgagaacgacgagtggacccaggacagagccaagcccgtgacccagatcgtgtctgccgaagcctggggcagagccgattgcggctttaccagcgagagctaccagcagggcgtgctgagcgccaccaacctgagcgtgatcggcttcagaatcctgctgctgaaagtggccggctttaacctgctgatgaccctgcggctgtggtccagcagggccaagcgatctggatctggagcaacaaacttctcactactcaaacaagcaggtgacgtggaggagaatcccgggcctactagtatggactggatttggcgcatccttttccttgtcggcgctgctaccggcgcgcattccttcgaacaagttcagctggttcagagcggagccgaagtgaagaaacctggggcctctgtgaaggtgtcctgcaaggcttccggctataccttcaccagcttttggctgaactgggtccgacaggcccctggacaaggactggaatggatgggcaacatctaccccagcgacagctacaccgtgtacaaccagaaattcaaggaccgcgtgaccatgaccagggacaccagcacaagcacagtgtacatggaactgagcagcctgcggagcgaggataccgccgtgtattattgcgccagaacctggcggggcaacagcttcgattattggggccagggaaccaccgtgaccgtgtcatctacgcgtatccagaaccctgatcctgccgtgtaccagctgcgggatagcaagagcagcgacaagagcgtgtgtctgttcaccgacttcgacagccagaccaacgtgtcccagagcaaggactccgacgtgtacatcaccgataagtgcgtgctggacatgcggagcatggacttcaagagcaactccgccgtggcctggtccaacaagtccgatttcgcctgcgccaacgccttcaacaacagcattatccccgaggacacattcttcccaagccccgagagcagctgcgacgtgaagctggtggaaaagagcttcgagacagacaccaacctgaacttccagatcctgtacgagatcctgctgggcaaggccaccctgtacgccgtgctggtgtctgccctggtgctgatggctatggtcaagcggaaggacagccggggataa

SEQ ID NO: 37671 - DNA, 1875 bp, synthetic construct; identical to SEQ ID NO: 37669
  source 1..1875: mol_type = other DNA

SEQ ID NO: 37672 - DNA, 1875 bp, synthetic construct; identical to SEQ ID NO: 37670
  source 1..1875: mol_type = other DNA

SEQ ID NO: 37673 - DNA, 1872 bp, synthetic construct
  source 1..1872: mol_type = other DNA
atggccttaccagtgaccgccttgctcctgccgctggccttgctgctccacgccgccaggccggacatcgtgatgacacagagccctgatagcctggccgtgtctctgggagagagagccaccatcaactgcaagagcagccagagcctgctgaacagcggcaacaacaagaactacgtgacatggtatcagcagaagcccggccagcctcctaagctgctgatctactggggcagcaccagatccacaggcgtgcccgatagattttctggctctggcagcggcaccgacttcaccctgacaatttctagcctgcaagccgaggacgtggccgtgtactactgccagaacgactacacataccccttcaccttcggccagggcaccaagctggaaatcaaactcgaggacctgaagaacgtgttcccacctgaggtggccgtgttcgagcctagcgaggccgagatcagccacacccagaaagccaccctcgtgtgcctggctaccggcttctaccccgaccatgtggaactgtcttggtgggtcaacggcaaagaggtgcacagcggcgtgtgtaccgacccccagccactgaaagaacagcccgccctgaacgacagccggtactgcctgagcagcagactgagagtgtccgccaccttctggcagaacccccggaaccacttcagatgccaggtgcagttctacggcctgagcgagaacgacgagtggacccaggacagagccaagcccgtgacccagatcgtgtctgccgaagcctggggcagagccgattgcgacgtgaagctggtggaaaagagcttcgagacagacaccaacctgaacttccagaacctgagcgtgatcggcttcagaatcctgctgctgaaagtggccggctttaacctgctgatgaccctgcggctgtggtccagcagggccaagcgatctggatctggagcaacaaacttctcactactcaaacaagcaggtgacgtggaggagaatcccgggcctactagtatggactggatttggcgcatccttttccttgtcggcgctgctaccggcgcgcattccttcgaacaagttcagctggttcagagcggagccgaagtgaagaaacctggggcctctgtgaaggtgtcctgcaaggcttccggctataccttcaccagcttttggctgaactgggtccgacaggcccctggacaaggactggaatggatgggcaacatctaccccagcgacagctacaccgtgtacaaccagaaattcaaggaccgcgtgaccatgaccagggacaccagcacaagcacagtgtacatggaactgagcagcctgcggagcgaggataccgccgtgtattattgcgccagaacctggcggggcaacagcttcgattattggggccagggaaccaccgtgaccgtgtcatctacgcgtatccagaaccctgatcctgccgtgtaccagctgcgggatagcaagagcagcgacaagagcgtgtgtctgttcaccgacttcgacagccagaccaacgtgtcccagagcaaggactccgacgtgtacatcaccgataagtgcgtgctggacatgcggagcatggacttcaagagcaactccgccgtggcctggtccaacaagtccgatttcgcctgcgccaacgccttcaacaacagcattatccccgaggacacattcttcccaagccccgagagcagctgcggctttaccagcgagagctaccagcagggcgtgctgagcgccaccatcctgtacgagatcctgctgggcaaggccaccctgtacgccgtgctggtgtctgccctggtgctgatggctatggtcaagcggaaggacagccgggga

SEQ ID NO: 37674 - DNA, 1884 bp, synthetic construct
  source 1..1884: mol_type = other DNA
atggccttaccagtgaccgccttgctcctgccgctggccttgctgctccacgccgccaggccggacatcgtgatgacacagagccctgatagcctggccgtgtctctgggagagagagccaccatcaactgcaagagcagccagagcctgctgaacagcggcaacaacaagaactacgtgacatggtatcagcagaagcccggccagcctcctaagctgctgatctactggggcagcaccagatccacaggcgtgcccgatagattttctggctctggcagcggcaccgacttcaccctgacaatttctagcctgcaagccgaggacgtggccgtgtactactgccagaacgactacacataccccttcaccttcggccagggcaccaagctggaaatcaaactcgaggccgacgtgtcccccaagcctaccatcttcctgccctctatcgccgagacaaagctccagaaggccggcacctacctgtgcctgctggaaaagttcttcccagatgtgattaagatccactggcaggaaaagaagtccaacaccatcctgggcagccaggaaggcaacaccatgaagaccaacgacacctacatgaagttcagctggctgaccgtgcccgagaagtccctggacaaagaacacagatgcatcgtgcggcacgaaaacaacaagaacggcgtggaccaggaaatcatcttcccacccatcaagaccgatgtgattacaatggaccccaaggacaactgctccaaggacgccaacgataccctgctgctccagctgaccaacaccagcgcctactacatgtacttgttgctgctgctgaagtccgtggtgtacttcgccatcatcacatgctgcctgctgcggagaaccgccttctgctgcaacggcgagaagtctagggccaagcgatctggatctggagcaacaaacttctcactactcaaacaagcaggtgacgtggaggagaatcccgggcctactagtatggactggatttggcgcatccttttccttgtcggcgctgctaccggcgcgcattccttcgaacaagttcagctggttcagagcggagccgaagtgaagaaacctggggcctctgtgaaggtgtcctgcaaggcttccggctataccttcaccagcttttggctgaactgggtccgacaggcccctggacaaggactggaatggatgggcaacatctaccccagcgacagctacaccgtgtacaaccagaaattcaaggaccgcgtgaccatgaccagggacaccagcacaagcacagtgtacatggaactgagcagcctgcggagcgaggataccgccgtgtattattgcgccagaacctggcggggcaacagcttcgattattggggccagggaaccaccgtgaccgtgtcatctacgcgtagccagcctcacaccaagcccagcgtgttcgtgatgaagaacggcaccaacgtggcctgcctcgtgaaagagttctaccccaaggacatcaggatcaacctggtgtccagcaagaagatcaccgagttcgaccccgccatcgtgatctcccccagcggcaagtacaacgccgtgaagctggggaagtatgaggacagcaacagcgtgacctgctccgtgcagcacgacaacaagaccgtgcacagcaccgactttgaagtgaaaaccgactccaccgaccacgtgaagcccaaagagacagagaacaccaagcagcccagcaagagctgccacaagcccaaggccatcgtgcacaccgagaaagtgaacatgatgagcctgaccgtgatcggcttcagaatcctgctgctgaaagtggccggctttaacctgctgatgaccctgcggctgtggtccagctaa

SEQ ID NO: 37675 - DNA, 1884 bp, synthetic construct
  source 1..1884: mol_type = other DNA
atggccttaccagtgaccgccttgctcctgccgctggccttgctgctccacgccgccaggccggacatcgtgatgacacagagccctgatagcctggccgtgtctctgggagagagagccaccatcaactgcaagagcagccagagcctgctgaacagcggcaacaacaagaactacgtgacatggtatcagcagaagcccggccagcctcctaagctgctgatctactggggcagcaccagatccacaggcgtgcccgatagattttctggctctggcagcggcaccgacttcaccctgacaatttctagcctgcaagccgaggacgtggccgtgtactactgccagaacgactacacataccccttcaccttcggccagggcaccaagctggaaatcaaactcgaggccgacgtgtcccccaagcctaccatcttcctgccctctatcgccgagacaaagctccagaaggccggcacctacctgtgcctgctggaaaagttcttcccagatgtgattaagatccactggcaggaaaagaagtccaacaccatcctgggcagccaggaaggcaacaccatgaagaccaacgacacctacatgaagttcagctggctgaccgtgcccgagaagtccctggacaaagaacacagatgcatcgtgcggcacgaaaacaacaagaacggcgtggaccaggaaatcatcttcccacccatcaagaccgatgtgattacaatggaccccaaggacaactgctccaaggacgccaacgataccctgctgctccagctgaccaacaccagcgcctactacatgtacttgttgctgctgctgaagtccgtggtgtacttcgccatcatcacatgctgcctgctgcggagaaccgccttctgctgcaacggcgagaagtctagggccaagcgatctggatctggagcaacaaacttctcactactcaaacaagcaggtgacgtggaggagaatcccgggcctactagtatggactggatttggcgcatccttttccttgtcggcgctgctaccggcgcgcattccttcgaacaagttcagctggttcagagcggagccgaagtgaagaaacctggggcctctgtgaaggtgtcctgcaaggcttccggctataccttcaccagcttttggctgaactgggtccgacaggcccctggacaaggactggaatggatgggcaacatctaccccagcgacagctacaccgtgtacaaccagaaattcaaggaccgcgtgaccatgaccagggacaccagcacaagcacagtgtacatggaactgagcagcctgcggagcgaggataccgccgtgtattattgcgccagaacctggcggggcaacagcttcgattattggggccagggaaccaccgtgaccgtgtcatctacgcgtagccagcctcacaccaagcccagcgtgttcgtgatgaagaacggcaccaacgtggcctgcctcgtgaaagagttctaccccaaggacatcaggatcaacctggtgtccagcaagaagatcaccgagttcgaccccgccatcgtgatctcccccagcggcaagtacaacgccgtgaagctggggaagtacgaggacagcaacagcgtgacctgctccgtgcagcacgacaacaagaccgtgcacagcaccgactttgaagtgaaaaccgactccaccgaccacgtgaagcccaaagagacagagaacaccaagcagcccagcaagagctgccacaagcccaaggccatcgtgcacaccgagaaagtgaacatgatgagcctgaccgtgctgggcttcagaatcctgctgctgaaagtggccggctttaacctgctgatgaccctgcggctgtggtccagctaa

SEQ ID NO: 37676 - DNA, 1872 bp, synthetic construct; identical to SEQ ID NO: 37673
  source 1..1872: mol_type = other DNA

SEQ ID NO: 37677 - DNA, 1884 bp, synthetic construct
  source 1..1884: mol_type = other DNA
atggccttaccagtgaccgccttgctcctgccgctggccttgctgctccacgccgccaggccggacatcgtgatgacacagagccctgatagcctggccgtgtctctgggagagagagccaccatcaactgcaagagcagccagagcctgctgaacagcggcaacaacaagaactacgtgacatggtatcagcagaagcccggccagcctcctaagctgctgatctactggggcagcaccagatccacaggcgtgcccgatagattttctggctctggcagcggcaccgacttcaccctgacaatttctagcctgcaagccgaggacgtggccgtgtactactgccagaacgactacacataccccttcaccttcggccagggcaccaagctggaaatcaaactcgagatccagaaccctgatcctgccgtgtaccagctgcgggatagcaagagcagcgacaagagcgtgtgtctgttcaccgacttcgacagccagaccaacgtgtcccagagcaaggactccgacgtgtacatcaccgataagtgcgtgctggacatgcggagcatggacttcaagagcaactccgccgtggcctggtccaacaagtccgatttcgcctgcgccaacgccttcaacaacagcattatccccgaggacacattcttcccaagccccgagagcagctgcggctttaccagcgagagctaccagcagggcgtgctgagcgccaccatcctgtacgagatcctgctgggcaaggccaccctgtacgccgtgctggtgtctgccctggtgctgatggctatggtcaagcggaaggacagccggggacgcgccaagagaagcggatctggcgtgaagcagaccctgaatttcgacctgctgaagctggctggcgacgtggaatccaacccaggccctactagtatggactggatttggcgcatccttttccttgtcggcgctgctaccggcgcgcattccttcgaacaagttcagctggttcagagcggagccgaagtgaagaaacctggggcctctgtgaaggtgtcctgcaaggcttccggctataccttcaccagcttttggctgaactgggtccgacaggcccctggacaaggactggaatggatgggcaacatctaccccagcgacagctacaccgtgtacaaccagaaattcaaggaccgcgtgaccatgaccagggacaccagcacaagcacagtgtacatggaactgagcagcctgcggagcgaggataccgccgtgtattattgcgccagaacctggcggggcaacagcttcgattattggggccagggaaccaccgtgaccgtgtcatctacgcgtgaggacctgaagaacgtgttcccacctgaggtggccgtgttcgagcctagcgaggccgagatcagccacacccagaaagccaccctcgtgtgcctggctaccggcttctaccccgaccatgtggaactgtcttggtgggtcaacggcaaagaggtgcacagcggcgtgtgtaccgacccccagccactgaaagaacagcccgccctgaacgacagccggtactgcctgagcagcagactgagagtgtccgccaccttctggcagaacccccggaaccacttcagatgccaggtgcagttctacggcctgagcgagaacgacgagtggacccaggacagagccaagcccgtgacccagatcgtgtctgccgaagcctggggcagagccgattgcgacgtgaagctggtggaaaagagcttcgagacagacaccaacctgaacttccagaacctgagcgtgatcggcttcagaatcctgctgctgaaagtggccggctttaacctgctgatgaccctgcggctgtggtccagc

SEQ ID NO: 37678 - DNA, 2277 bp, synthetic construct
  source 1..2277: mol_type = other DNA
atggccttaccagtgaccgccttgctcctgccgctggccttgctgctccacgccgccaggccggaagtgcagctggttgaatctggcggaggactggttcagcctggcggatctctgagactgtcttgtgccgccagcggcttcagcttcagcgacttttggatgagctgggtccgacaggcccctggcaaaggacttgaatgggtcgccacaatcagccaggccggcagcgagaaggactacgtggactctgtgaagggcagattcaccatcagccgggacaacgccaagaagtccctgtacctccagatgaacagcctgagagccgaggacaccgccgtgtactattgtgcctctggcgtgtacagcttcgactacagaggccagggcaccctggtcacagtctcttctggtaccggcggaggcggatctggcggcggaggtagcggtggcggaggatctgaattcgacatcgtgatgacacagagccctgatagcctggccgtgtctctgggagagagagccaccatcaactgcaagagcagccagagcctgctgaacagcggcaacaacaagaactacgtgacatggtatcagcagaagcccggccagcctcctaagctgctgatctactggggcagcaccagatccacaggcgtgcccgatagattttctggctctggcagcggcaccgacttcaccctgacaatttctagcctgcaagccgaggacgtggccgtgtactactgccagaacgactacacataccccttcaccttcggccagggcaccaagctggaaatcaaactcgaggacctgaagaacgtgttcccacctgaggtggccgtgttcgagcctagcgaggccgagatcagccacacccagaaagccaccctcgtgtgcctggctaccggcttctaccccgaccatgtggaactgtcttggtgggtcaacggcaaagaggtgcacagcggcgtgtgtaccgacccccagccactgaaagaacagcccgccctgaacgacagccggtactgcctgagcagcagactgagagtgtccgccaccttctggcagaacccccggaaccacttcagatgccaggtgcagttctacggcctgagcgagaacgacgagtggacccaggacagagccaagcccgtgacccagatcgtgtctgccgaagcctggggcagagccgattgcgacgtgaagctggtggaaaagagcttcgagacagacaccaacctgaacttccagaacctgagcgtgatcggcttcagaatcctgctgctgaaagtggccggctttaacctgctgatgaccctgcggctgtggtccagcagggccaagcgatctggatctggagcaacaaacttctcactactcaaacaagcaggtgacgtggaggagaatcccgggcctactagtatggactggatttggcgcatccttttccttgtcggcgctgctaccggcgcgcattccttcgaacaagttcagctggttcagagcggagccgaagtgaagaaacctggggcctctgtgaaggtgtcctgcaaggcttccggctataccttcaccagcttttggctgaactgggtccgacaggcccctggacaaggactggaatggatgggcaacatctaccccagcgacagctacaccgtgtacaaccagaaattcaaggaccgcgtgaccatgaccagggacaccagcacaagcacagtgtacatggaactgagcagcctgcggagcgaggataccgccgtgtattattgcgccagaacctggcggggcaacagcttcgattattggggccagggaaccaccgtgaccgtgtcatctacgcgtatccagaaccctgatcctgccgtgtaccagctgcgggatagcaagagcagcgacaagagcgtgtgtctgttcaccgacttcgacagccagaccaacgtgtcccagagcaaggactccgacgtgtacatcaccgataagtgcgtgctggacatgcggagcatggacttcaagagcaactccgccgtggcctggtccaacaagtccgatttcgcctgcgccaacgccttcaacaacagcattatccccgaggacacattcttcccaagccccgagagcagctgcggctttaccagcgagagctaccagcagggcgtgctgagcgccaccatcctgtacgagatcctgctgggcaaggccaccctgtacgccgtgctggtgtctgccctggtgctgatggctatggtcaagcggaaggacagccgggga

SEQ ID NO: 37679 - DNA, 2289 bp, synthetic construct
  source 1..2289: mol_type = other DNA
atggccttaccagtgaccgccttgctcctgccgctggccttgctgctccacgccgccaggccggaagtgcagctggttgaatctggcggaggactggttcagcctggcggatctctgagactgtcttgtgccgccagcggcttcagcttcagcgacttttggatgagctgggtccgacaggcccctggcaaaggacttgaatgggtcgccacaatcagccaggccggcagcgagaaggactacgtggactctgtgaagggcagattcaccatcagccgggacaacgccaagaagtccctgtacctccagatgaacagcctgagagccgaggacaccgccgtgtactattgtgcctctggcgtgtacagcttcgactacagaggccagggcaccctggtcacagtctcttctggtaccggcggaggcggatctggcggcggaggtagcggtggcggaggatctgaattcgacatcgtgatgacacagagccctgatagcctggccgtgtctctgggagagagagccaccatcaactgcaagagcagccagagcctgctgaacagcggcaacaacaagaactacgtgacatggtatcagcagaagcccggccagcctcctaagctgctgatctactggggcagcaccagatccacaggcgtgcccgatagattttctggctctggcagcggcaccgacttcaccctgacaatttctagcctgcaagccgaggacgtggccgtgtactactgccagaacgactacacataccccttcaccttcggccagggcaccaagctggaaatcaaactcgagatccagaaccctgatcctgccgtgtaccagctgcgggatagcaagagcagcgacaagagcgtgtgtctgttcaccgacttcgacagccagaccaacgtgtcccagagcaaggactccgacgtgtacatcaccgataagtgcgtgctggacatgcggagcatggacttcaagagcaactccgccgtggcctggtccaacaagtccgatttcgcctgcgccaacgccttcaacaacagcattatccccgaggacacattcttcccaagccccgagagcagctgcggctttaccagcgagagctaccagcagggcgtgctgagcgccaccatcctgtacgagatcctgctgggcaaggccaccctgtacgccgtgctggtgtctgccctggtgctgatggctatggtcaagcggaaggacagccggggacgcgccaagagaagcggatctggcgtgaagcagaccctgaatttcgacctgctgaagctggctggcgacgtggaatccaacccaggccctactagtatggactggatttggcgcatccttttccttgtcggcgctgctaccggcgcgcattccttcgaacaagttcagctggttcagagcggagccgaagtgaagaaacctggggcctctgtgaaggtgtcctgcaaggcttccggctataccttcaccagcttttggctgaactgggtccgacaggcccctggacaaggactggaatggatgggcaacatctaccccagcgacagctacaccgtgtacaaccagaaattcaaggaccgcgtgaccatgaccagggacaccagcacaagcacagtgtacatggaactgagcagcctgcggagcgaggataccgccgtgtattattgcgccagaacctggcggggcaacagcttcgattattggggccagggaaccaccgtgaccgtgtcatctacgcgtgaggacctgaagaacgtgttcccacctgaggtggccgtgttcgagcctagcgaggccgagatcagccacacccagaaagccaccctcgtgtgcctggctaccggcttctaccccgaccatgtggaactgtcttggtgggtcaacggcaaagaggtgcacagcggcgtgtgtaccgacccccagccactgaaagaacagcccgccctgaacgacagccggtactgcctgagcagcagactgagagtgtccgccaccttctggcagaacccccggaaccacttcagatgccaggtgcagttctacggcctgagcgagaacgacgagtggacccaggacagagccaagcccgtgacccagatcgtgtctgccgaagcctggggcagagccgattgcgacgtgaagctggtggaaaagagcttcgagacagacaccaacctgaacttccagaacctgagcgtgatcggcttcagaatcctgctgctgaaagtggccggctttaacctgctgatgaccctgcggctgtggtccagc

SEQ ID NO: 37680 - DNA, 2688 bp, synthetic construct
  source 1..2688: mol_type = other DNA
atggccttaccagtgaccgccttgctcctgccgctggccttgctgctccacgccgccaggccggaagtgcagctggttgaatctggcggaggactggttcagcctggcggatctctgagactgtcttgtgccgccagcggcttcagcttcagcgacttttggatgagctgggtccgacaggcccctggcaaaggacttgaatgggtcgccacaatcagccaggccggcagcgagaaggactacgtggactctgtgaagggcagattcaccatcagccgggacaacgccaagaagtccctgtacctccagatgaacagcctgagagccgaggacaccgccgtgtactattgtgcctctggcgtgtacagcttcgactacagaggccagggcaccctggtcacagtctcttctggtaccggcggaggcggatctggcggcggaggtagcggtggcggaggatctgaattcgacatcgtgatgacacagagccctgatagcctggccgtgtctctgggagagagagccaccatcaactgcaagagcagccagagcctgctgaacagcggcaacaacaagaactacgtgacatggtatcagcagaagcccggccagcctcctaagctgctgatctactggggcagcaccagatccacaggcgtgcccgatagattttctggctctggcagcggcaccgacttcaccctgacaatttctagcctgcaagccgaggacgtggccgtgtactactgccagaacgactacacataccccttcaccttcggccagggcaccaagctggaaatcaaactcgaggacctgaagaacgtgttcccacctgaggtggccgtgttcgagcctagcgaggccgagatcagccacacccagaaagccaccctcgtgtgcctggctaccggcttctaccccgaccatgtggaactgtcttggtgggtcaacggcaaagaggtgcacagcggcgtgtgtaccgacccccagccactgaaagaacagcccgccctgaacgacagccggtactgcctgagcagcagactgagagtgtccgccaccttctggcagaacccccggaaccacttcagatgccaggtgcagttctacggcctgagcgagaacgacgagtggacccaggacagagccaagcccgtgacccagatcgtgtctgccgaagcctggggcagagccgattgcgacgtgaagctggtggaaaagagcttcgagacagacaccaacctgaacttccagaacctgagcgtgatcggcttcagaatcctgctgctgaaagtggccggctttaacctgctgatgaccctgcggctgtggtccagcagggccaagcgatctggatctggagcaacaaacttctcactactcaaacaagcaggtgacgtggaggagaatcccgggcctactagtatggactggatttggcgcatccttttccttgtcggcgctgctaccggcgcgcattccgggccccagctccagctgcaagagtctggacctggcctggtcaagcctagcgagacactgagcctgacctgtaccgtgtccggcgatagcatcagcagcggcgattactactggggctggatcagacagcctcctggcaaaggactggaatggatcggccacatctactacagcggcgtgacctactacaaccccagcctgaagtccagagtgaccatcagcgtggacaccagccggaaccagttctccctgaagctgtctagcgtgacagccgccgataccgccgtgtactactgcaccagagaggacagcagcaactggcggagtagaggccagggaacactggtcacagttagctctggatccggcggaggcggaagtggaggcggaggatctggcggcggaggctctttcgaacaagttcagctggttcagagcggagccgaagtgaagaaacctggggcctctgtgaaggtgtcctgcaaggcttccggctataccttcaccagcttttggctgaactgggtccgacaggcccctggacaaggactggaatggatgggcaacatctaccccagcgacagctacaccgtgtacaaccagaaattcaaggaccgcgtgaccatgaccagggacaccagcacaagcacagtgtacatggaactgagcagcctgcggagcgaggataccgccgtgtattattgcgccagaacctggcggggcaacagcttcgattattggggccagggaaccaccgtgaccgtgtcatctacgcgtatccagaaccctgatcctgccgtgtaccagctgcgggatagcaagagcagcgacaagagcgtgtgtctgttcaccgacttcgacagccagaccaacgtgtcccagagcaaggactccgacgtgtacatcaccgataagtgcgtgctggacatgcggagcatggacttcaagagcaactccgccgtggcctggtccaacaagtccgatttcgcctgcgccaacgccttcaacaacagcattatccccgaggacacattcttcccaagccccgagagcagctgcggctttaccagcgagagctaccagcagggcgtgctgagcgccaccatcctgtacgagatcctgctgggcaaggccaccctgtacgccgtgctggtgtctgccctggtgctgatggctatggtcaagcggaaggacagccgggga

SEQ ID NO: 37681 - DNA, 2700 bp, synthetic construct
  source 1..2700: mol_type = other DNA
atggccttaccagtgaccgccttgctcctgccgctggccttgctgctccacgccgccaggccggaagtgcagctggttgaatctggcggaggactggttcagcctggcggatctctgagactgtcttgtgccgccagcggcttcagcttcagcgacttttggatgagctgggtccgacaggcccctggcaaaggacttgaatgggtcgccacaatcagccaggccggcagcgagaaggactacgtggactctgtgaagggcagattcaccatcagccgggacaacgccaagaagtccctgtacctccagatgaacagcctgagagccgaggacaccgccgtgtactattgtgcctctggcgtgtacagcttcgactacagaggccagggcaccctggtcacagtctcttctggtaccggcggaggcggatctggcggcggaggtagcggtggcggaggatctgaattcgacatcgtgatgacacagagccctgatagcctggccgtgtctctgggagagagagccaccatcaactgcaagagcagccagagcctgctgaacagcggcaacaacaagaactacgtgacatggtatcagcagaagcccggccagcctcctaagctgctgatctactggggcagcaccagatccacaggcgtgcccgatagattttctggctctggcagcggcaccgacttcaccctgacaatttctagcctgcaagccgaggacgtggccgtgtactactgccagaacgactacacataccccttcaccttcggccagggcaccaagctggaaatcaaactcgagatccagaaccctgatcctgccgtgtaccagctgcgggatagcaagagcagcgacaagagcgtgtgtctgttcaccgacttcgacagccagaccaacgtgtcccagagcaaggactccgacgtgtacatcaccgataagtgcgtgctggacatgcggagcatggacttcaagagcaactccgccgtggcctggtccaacaagtccgatttcgcctgcgccaacgccttcaacaacagcattatccccgaggacacattcttcccaagccccgagagcagctgcggctttaccagcgagagctaccagcagggcgtgctgagcgccaccatcctgtacgagatcctgctgggcaaggccaccctgtacgccgtgctggtgtctgccctggtgctgatggctatggtcaagcggaaggacagccggggacgcgccaagagaagcggatctggcgtgaagcagaccctgaatttcgacctgctgaagctggctggcgacgtggaatccaacccaggccctactagtatggactggatttggcgcatccttttccttgtcggcgctgctaccggcgcgcattccgggccccagctccagctgcaagagtctggacctggcctggtcaagcctagcgagacactgagcctgacctgtaccgtgtccggcgatagcatcagcagcggcgattactactggggctggatcagacagcctcctggcaaaggactggaatggatcggccacatctactacagcggcgtgacctactacaaccccagcctgaagtccagagtgaccatcagcgtggacaccagccggaaccagttctccctgaagctgtctagcgtgacagccgccgataccgccgtgtactactgcaccagagaggacagcagcaactggcggagtagaggccagggaacactggtcacagttagctctggatccggcggaggcggaagtggaggcggaggatctggcggcggaggctctttcgaacaagttcagctggttcagagcggagccgaagtgaagaaacctggggcctctgtgaaggtgtcctgcaaggcttccggctataccttcaccagcttttggctgaactgggtccgacaggcccctggacaaggactggaatggatgggcaacatctaccccagcgacagctacaccgtgtacaaccagaaattcaaggaccgcgtgaccatgaccagggacaccagcacaagcacagtgtacatggaactgagcagcctgcggagcgaggataccgccgtgtattattgcgccagaacctggcggggcaacagcttcgattattggggccagggaaccaccgtgaccgtgtcatctacgcgtgaggacctgaagaacgtgttcccacctgaggtggccgtgttcgagcctagcgaggccgagatcagccacacccagaaagccaccctcgtgtgcctggctaccggcttctaccccgaccatgtggaactgtcttggtgggtcaacggcaaagaggtgcacagcggcgtgtgtaccgacccccagccactgaaagaacagcccgccctgaacgacagccggtactgcctgagcagcagactgagagtgtccgccaccttctggcagaacccccggaaccacttcagatgccaggtgcagttctacggcctgagcgagaacgacgagtggacccaggacagagccaagcccgtgacccagatcgtgtctgccgaagcctggggcagagccgattgcgacgtgaagctggtggaaaagagcttcgagacagacaccaacctgaacttccagaacctgagcgtgatcggcttcagaatcctgctgctgaaagtggccggctttaacctgctgatgaccctgcggctgtggtccagc

SEQ ID NO: 37682 - DNA, 2082 bp, synthetic construct
  source 1..2082: mol_type = other DNA
atggccttaccagtgaccgccttgctcctgccgctggccttgctgctccacgccgccaggccggacatcgtgatgacacagagccctgatagcctggccgtgtctctgggagagagagccaccatcaactgcaagagcagccagagcctgctgaacagcggcaacaacaagaactacgtgacatggtatcagcagaagcccggccagcctcctaagctgctgatctactggggcagcaccagatccacaggcgtgcccgatagattttctggctctggcagcggcaccgacttcaccctgacaatttctagcctgcaagccgaggacgtggccgtgtactactgccagaacgactacacataccccttcaccttcggccagggcaccaagctggaaatcaaactcgaggacctgaagaacgtgttcccacctgaggtggccgtgttcgagcctagcgaggccgagatcagccacacccagaaagccaccctcgtgtgcctggctaccggcttctaccccgaccatgtggaactgtcttggtgggtcaacggcaaagaggtgcacagcggcgtgtgtaccgacccccagccactgaaagaacagcccgccctgaacgacagccggtactgcctgagcagcagactgagagtgtccgccaccttctggcagaacccccggaaccacttcagatgccaggtgcagttctacggcctgagcgagaacgacgagtggacccaggacagagccaagcccgtgacccagatcgtgtctgccgaagcctggggcagagccgattgcgacgtgaagctggtggaaaagagcttcgagacagacaccaacctgaacttccagaacctgagcgtgatcggcttcagaatcctgctgctgaaagtggccggctttaacctgctgatgaccctgcggctgtggtccagcagggccaagcgatctggatctggagcaacaaacttctcactactcaaacaagcaggtgacgtggaggagaatcccgggcctactagtatggactggatttggcgcatccttttccttgtcggcgctgctaccggcgcccattccgggcccatggaccccgacctggaaatcagagccgccttcctgcggcagagaaacacagccctgagaacagaggtggccgagctggaacaagaggtgcagcggctggaaaacgaggtgtcccagtacgagacaagatacggccctctcggaggcggaaaaggatccggcggcggaggatctggcggaggcggatctgggggcggaggctctttcgaacaagttcagctggttcagagcggagccgaagtgaagaaacctggggcctctgtgaaggtgtcctgcaaggcttccggctataccttcaccagcttttggctgaactgggtccgacaggcccctggacaaggactggaatggatgggcaacatctaccccagcgacagctacaccgtgtacaaccagaaattcaaggaccgcgtgaccatgaccagggacaccagcacaagcacagtgtacatggaactgagcagcctgcggagcgaggataccgccgtgtattattgcgccagaacctggcggggcaacagcttcgattattggggccagggaaccaccgtgaccgtgtcatctacgcgtatccagaaccctgatcctgccgtgtaccagctgcgggatagcaagagcagcgacaagagcgtgtgtctgttcaccgacttcgacagccagaccaacgtgtcccagagcaaggactccgacgtgtacatcaccgataagtgcgtgctggacatgcggagcatggacttcaagagcaactccgccgtggcctggtccaacaagtccgatttcgcctgcgccaacgccttcaacaacagcattatccccgaggacacattcttcccaagccccgagagcagctgcggctttaccagcgagagctaccagcagggcgtgctgagcgccaccatcctgtacgagatcctgctgggcaaggccaccctgtacgccgtgctggtgtctgccctggtgctgatggctatggtcaagcggaaggacagccgggga

SEQ ID NO: 37683 - DNA, 2094 bp, synthetic construct
  source 1..2094: mol_type = other DNA
atggccttaccagtgaccgccttgctcctgccgctggccttgctgctccacgccgccaggccggacatcgtgatgacacagagccctgatagcctggccgtgtctctgggagagagagccaccatcaactgcaagagcagccagagcctgctgaacagcggcaacaacaagaactacgtgacatggtatcagcagaagcccggccagcctcctaagctgctgatctactggggcagcaccagatccacaggcgtgcccgatagattttctggctctggcagcggcaccgacttcaccctgacaatttctagcctgcaagccgaggacgtggccgtgtactactgccagaacgactacacataccccttcaccttcggccagggcaccaagctggaaatcaaactcgagatccagaaccctgatcctgccgtgtaccagctgcgggatagcaagagcagcgacaagagcgtgtgtctgttcaccgacttcgacagccagaccaacgtgtcccagagcaaggactccgacgtgtacatcaccgataagtgcgtgctggacatgcggagcatggacttcaagagcaactccgccgtggcctggtccaacaagtccgatttcgcctgcgccaacgccttcaacaacagcattatccccgaggacacattcttcccaagccccgagagcagctgcggctttaccagcgagagctaccagcagggcgtgctgagcgccaccatcctgtacgagatcctgctgggcaaggccaccctgtacgccgtgctggtgtctgccctggtgctgatggctatggtcaagcggaaggacagccggggacgcgccaagagaagcggatctggcgtgaagcagaccctgaatttcgacctgctgaagctggctggcgacgtggaatccaacccaggccctactagtatggactggatttggcgcatccttttccttgtcggcgctgctaccggcgcccattccgggcccatggaccccgacctggaaatcagagccgccttcctgcggcagagaaacacagccctgagaacagaggtggccgagctggaacaagaggtgcagcggctggaaaacgaggtgtcccagtacgagacaagatacggccctctcggaggcggaaaaggatccggcggcggaggatctggcggaggcggatctgggggcggaggctctttcgaacaagttcagctggttcagagcggagccgaagtgaagaaacctggggcctctgtgaaggtgtcctgcaaggcttccggctataccttcaccagcttttggctgaactgggtccgacaggcccctggacaaggactggaatggatgggcaacatctaccccagcgacagctacaccgtgtacaaccagaaattcaaggaccgcgtgaccatgaccagggacaccagcacaagcacagtgtacatggaactgagcagcctgcggagcgaggataccgccgtgtattattgcgccagaacctggcggggcaacagcttcgattattggggccagggaaccaccgtgaccgtgtcatctacgcgtgaggacctgaagaacgtgttcccacctgaggtggccgtgttcgagcctagcgaggccgagatcagccacacccagaaagccaccctcgtgtgcctggctaccggcttctaccccgaccatgtggaactgtcttggtgggtcaacggcaaagaggtgcacagcggcgtgtgtaccgacccccagccactgaaagaacagcccgccctgaacgacagccggtactgcctgagcagcagactgagagtgtccgccaccttctggcagaacccccggaaccacttcagatgccaggtgcagttctacggcctgagcgagaacgacgagtggacccaggacagagccaagcccgtgacccagatcgtgtctgccgaagcctggggcagagccgattgcgacgtgaagctggtggaaaagagcttcgagacagacaccaacctgaacttccagaacctgagcgtgatcggcttcagaatcctgctgctgaaagtggccggctttaacctgctgatgaccctgcggctgtggtccagc

SEQ ID NO: 37684 - DNA, 2013 bp, synthetic construct
  source 1..2013: mol_type = other DNA
atggccttaccagtgaccgccttgctcctgccgctggccttgctgctccacgccgccaggccggacatcgtgatgacacagagccctgatagcctggccgtgtctctgggagagagagccaccatcaactgcaagagcagccagagcctgctgaacagcggcaacaacaagaactacgtgacatggtatcagcagaagcccggccagcctcctaagctgctgatctactggggcagcaccagatccacaggcgtgcccgatagattttctggctctggcagcggcaccgacttcaccctgacaatttctagcctgcaagccgaggacgtggccgtgtactactgccagaacgactacacataccccttcaccttcggccagggcaccaagctggaaatcaaactcgaggacctgaagaacgtgttcccacctgaggtggccgtgttcgagcctagcgaggccgagatcagccacacccagaaagccaccctcgtgtgcctggctaccggcttctaccccgaccatgtggaactgtcttggtgggtcaacggcaaagaggtgcacagcggcgtgtgtaccgacccccagccactgaaagaacagcccgccctgaacgacagccggtactgcctgagcagcagactgagagtgtccgccaccttctggcagaacccccggaaccacttcagatgccaggtgcagttctacggcctgagcgagaacgacgagtggacccaggacagagccaagcccgtgacccagatcgtgtctgccgaagcctggggcagagccgattgcgacgtgaagctggtggaaaagagcttcgagacagacaccaacctgaacttccagaacctgagcgtgatcggcttcagaatcctgctgctgaaagtggccggctttaacctgctgatgaccctgcggctgtggtccagcagggccaagcgatctggatctggagcaacaaacttctcactactcaaacaagcaggtgacgtggaggagaatcccgggcctactagtatggactggatttggcgcatccttttccttgtcggcgctgctaccggcgcccattccgggcccgaagttgctgccctcgagaaggaggtagcagctttggaaaaagaagtcgcagcccttgagaaagaagttgcggctctggagaagggatccggcggcggaggatctggcggaggcggatctgggggcggaggctctttcgaacaagttcagctggttcagagcggagccgaagtgaagaaacctggggcctctgtgaaggtgtcctgcaaggcttccggctataccttcaccagcttttggctgaactgggtccgacaggcccctggacaaggactggaatggatgggcaacatctaccccagcgacagctacaccgtgtacaaccagaaattcaaggaccgcgtgaccatgaccagggacaccagcacaagcacagtgtacatggaactgagcagcctgcggagcgaggataccgccgtgtattattgcgccagaacctggcggggcaacagcttcgattattggggccagggaaccaccgtgaccgtgtcatctacgcgtatccagaaccctgatcctgccgtgtaccagctgcgggatagcaagagcagcgacaagagcgtgtgtctgttcaccgacttcgacagccagaccaacgtgtcccagagcaaggactccgacgtgtacatcaccgataagtgcgtgctggacatgcggagcatggacttcaagagcaactccgccgtggcctggtccaacaagtccgatttcgcctgcgccaacgccttcaacaacagcattatccccgaggacacattcttcccaagccccgagagcagctgcggctttaccagcgagagctaccagcagggcgtgctgagcgccaccatcctgtacgagatcctgctgggcaaggccaccctgtacgccgtgctggtgtctgccctggtgctgatggctatggtcaagcggaaggacagccgggga

SEQ ID NO: 37685 - DNA, 2025 bp, synthetic construct
  source 1..2025: mol_type = other DNA
atggccttaccagtgaccgccttgctcctgccgctggccttgctgctccacgccgccaggccggacatcgtgatgacacagagccctgatagcctggccgtgtctctgggagagagagccaccatcaactgcaagagcagccagagcctgctgaacagcggcaacaacaagaactacgtgacatggtatcagcagaagcccggccagcctcctaagctgctgatctactggggcagcaccagatccacaggcgtgcccgatagattttctggctctggcagcggcaccgacttcaccctgacaatttctagcctgcaagccgaggacgtggccgtgtactactgccagaacgactacacataccccttcaccttcggccagggcaccaagctggaaatcaaactcgagatccagaaccctgatcctgccgtgtaccagctgcgggatagcaagagcagcgacaagagcgtgtgtctgttcaccgacttcgacagccagaccaacgtgtcccagagcaaggactccgacgtgtacatcaccgataagtgcgtgctggacatgcggagcatggacttcaagagcaactccgccgtggcctggtccaacaagtccgatttcgcctgcgccaacgccttcaacaacagcattatccccgaggacacattcttcccaagccccgagagcagctgcggctttaccagcgagagctaccagcagggcgtgctgagcgccaccatcctgtacgagatcctgctgggcaaggccaccctgtacgccgtgctggtgtctgccctggtgctgatggctatggtcaagcggaaggacagccggggacgcgccaagagaagcggatctggcgtgaagcagaccctgaatttcgacctgctgaagctggctggcgacgtggaatccaacccaggccctactagtatggactggatttggcgcatccttttccttgtcggcgctgctaccggcgcccattccgggcccgaagttgctgccctcgagaaggaggtagcagctttggaaaaagaagtcgcagcccttgagaaagaagttgcggctctggagaagggatccggcggcggaggatctggcggaggcggatctgggggcggaggctctttcgaacaagttcagctggttcagagcggagccgaagtgaagaaacctggggcctctgtgaaggtgtcctgcaaggcttccggctataccttcaccagcttttggctgaactgggtccgacaggcccctggacaaggactggaatggatgggcaacatctaccccagcgacagctacaccgtgtacaaccagaaattcaaggaccgcgtgaccatgaccagggacaccagcacaagcacagtgtacatggaactgagcagcctgcggagcgaggataccgccgtgtattattgcgccagaacctggcggggcaacagcttcgattattggggccagggaaccaccgtgaccgtgtcatctacgcgtgaggacctgaagaacgtgttcccacctgaggtggccgtgttcgagcctagcgaggccgagatcagccacacccagaaagccaccctcgtgtgcctggctaccggcttctaccccgaccatgtggaactgtcttggtgggtcaacggcaaagaggtgcacagcggcgtgtgtaccgacccccagccactgaaagaacagcccgccctgaacgacagccggtactgcctgagcagcagactgagagtgtccgccaccttctggcagaacccccggaaccacttcagatgccaggtgcagttctacggcctgagcgagaacgacgagtggacccaggacagagccaagcccgtgacccagatcgtgtctgccgaagcctggggcagagccgattgcgacgtgaagctggtggaaaagagcttcgagacagacaccaacctgaacttccagaacctgagcgtgatcggcttcagaatcctgctgctgaaagtggccggctttaacctgctgatgaccctgcggctgtggtccagc

SEQ ID NO: 37686 - DNA, 2283 bp, synthetic construct
  source 1..2283: mol_type = other DNA
atggccttaccagtgaccgccttgctcctgccgctggccttgctgctccacgccgccaggccggacatcgtgatgacacagagccctgatagcctggccgtgtctctgggagagagagccaccatcaactgcaagagcagccagagcctgctgaacagcggcaacaacaagaactacgtgacatggtatcagcagaagcccggccagcctcctaagctgctgatctactggggcagcaccagatccacaggcgtgcccgatagattttctggctctggcagcggcaccgacttcaccctgacaatttctagcctgcaagccgaggacgtggccgtgtactactgccagaacgactacacataccccttcaccttcggccagggcaccaagctggaaatcaaactcgaggacctgaagaacgtgttcccacctgaggtggccgtgttcgagcctagcgaggccgagatcagccacacccagaaagccaccctcgtgtgcctggctaccggcttctaccccgaccatgtggaactgtcttggtgggtcaacggcaaagaggtgcacagcggcgtgtgtaccgacccccagccactgaaagaacagcccgccctgaacgacagccggtactgcctgagcagcagactgagagtgtccgccaccttctggcagaacccccggaaccacttcagatgccaggtgcagttctacggcctgagcgagaacgacgagtggacccaggacagagccaagcccgtgacccagatcgtgtctgccgaagcctggggcagagccgattgcgacgtgaagctggtggaaaagagcttcgagacagacaccaacctgaacttccagaacctgagcgtgatcggcttcagaatcctgctgctgaaagtggccggctttaacctgctgatgaccctgcggctgtggtccagcagggccaagcgatctggatctggagcaacaaacttctcactactcaaacaagcaggtgacgtggaggagaatcccgggcctactagtatggactggatttggcgcatccttttccttgtcggcgctgctaccggcgcccattccgggccccaggttcagctgcaagagtctggcggaggacttgctcaagctggcggaagcctgagactgtcttgtgccgcctctggcagaaccttcagcatgggctggtttagacaggcccctggcaaagagagagagttcgtcgccgccatcacatacagcggcggcagcccttactacgcctcttctgtcagaggccggttcaccatcagccgggacaacgccaagaacaccgtgtacctccagatgaacagcctgaagccagaggacaccgccgtgtactactgtgccgccaatccaacctacggcagcgactggaatgccgagaattggggccagggcacccaagtgacagtgtctagtggatccggcggcggaggatctggcggaggcggatctgggggcggaggctctttcgaacaagttcagctggttcagagcggagccgaagtgaagaaacctggggcctctgtgaaggtgtcctgcaaggcttccggctataccttcaccagcttttggctgaactgggtccgacaggcccctggacaaggactggaatggatgggcaacatctaccccagcgacagctacaccgtgtacaaccagaaattcaaggaccgcgtgaccatgaccagggacaccagcacaagcacagtgtacatggaactgagcagcctgcggagcgaggataccgccgtgtattattgcgccagaacctggcggggcaacagcttcgattattggggccagggaaccaccgtgaccgtgtcatctacgcgtatccagaaccctgatcctgccgtgtaccagctgcgggatagcaagagcagcgacaagagcgtgtgtctgttcaccgacttcgacagccagaccaacgtgtcccagagcaaggactccgacgtgtacatcaccgataagtgcgtgctggacatgcggagcatggacttcaagagcaactccgccgtggcctggtccaacaagtccgatttcgcctgcgccaacgccttcaacaacagcattatccccgaggacacattcttcccaagccccgagagcagctgcggctttaccagcgagagctaccagcagggcgtgctgagcgccaccatcctgtacgagatcctgctgggcaaggccaccctgtacgccgtgctggtgtctgccctggtgctgatggctatggtcaagcggaaggacagccgggga

SEQ ID NO: 37687 - DNA, 2295 bp, synthetic construct
  source 1..2295: mol_type = other DNA
atggccttaccagtgaccgccttgctcctgccgctggccttgctgctccacgccgccaggccggacatcgtgatgacacagagccctgatagcctggccgtgtctctgggagagagagccaccatcaactgcaagagcagccagagcctgctgaacagcggcaacaacaagaactacgtgacatggtatcagcagaagcccggccagcctcctaagctgctgatctactggggcagcaccagatccacaggcgtgcccgatagattttctggctctggcagcggcaccgacttcaccctgacaatttctagcctgcaagccgaggacgtggccgtgtactactgccagaacgactacacataccccttcaccttcggccagggcaccaagctggaaatcaaactcgagatccagaaccctgatcctgccgtgtaccagctgcgggatagcaagagcagcgacaagagcgtgtgtctgttcaccgacttcgacagccagaccaacgtgtcccagagcaaggactccgacgtgtacatcaccgataagtgcgtgctggacatgcggagcatggacttcaagagcaactccgccgtggcctggtccaacaagtccgatttcgcctgcgccaacgccttcaacaacagcattatccccgaggacacattcttcccaagccccgagagcagctgcggctttaccagcgagagctaccagcagggcgtgctgagcgccaccatcctgtacgagatcctgctgggcaaggccaccctgtacgccgtgctggtgtctgccctggtgctgatggctatggtcaagcggaaggacagccggggacgcgccaagagaagcggatctggcgtgaagcagaccctgaatttcgacctgctgaagctggctggcgacgtggaatccaacccaggccctactagtatggactggatttggcgcatccttttccttgtcggcgctgctaccggcgcccattccgggccccaggttcagctgcaagagtctggcggaggacttgctcaagctggcggaagcctgagactgtcttgtgccgcctctggcagaaccttcagcatgggctggtttagacaggcccctggcaaagagagagagttcgtcgccgccatcacatacagcggcggcagcccttactacgcctcttctgtcagaggccggttcaccatcagccgggacaacgccaagaacaccgtgtacctccagatgaacagcctgaagccagaggacaccgccgtgtactactgtgccgccaatccaacctacggcagcgactggaatgccgagaattggggccagggcacccaagtgacagtgtctagtggatccggcggcggaggatctggcggaggcggatctgggggcggaggctctttcgaacaagttcagctggttcagagcggagccgaagtgaagaaacctggggcctctgtgaaggtgtcctgcaaggcttccggctataccttcaccagcttttggctgaactgggtccgacaggcccctggacaaggactggaatggatgggcaacatctaccccagcgacagctacaccgtgtacaaccagaaattcaaggaccgcgtgaccatgaccagggacaccagcacaagcacagtgtacatggaactgagcagcctgcggagcgaggataccgccgtgtattattgcgccagaacctggcggggcaacagcttcgattattggggccagggaaccaccgtgaccgtgtcatctacgcgtgaggacctgaagaacgtgttcccacctgaggtggccgtgttcgagcctagcgaggccgagatcagccacacccagaaagccaccctcgtgtgcctggctaccggcttctaccccgaccatgtggaactgtcttggtgggtcaacggcaaagaggtgcacagcggcgtgtgtaccgacccccagccactgaaagaacagcccgccctgaacgacagccggtactgcctgagcagcagactgagagtgtccgccaccttctggcagaacccccggaaccacttcagatgccaggtgcagttctacggcctgagcgagaacgacgagtggacccaggacagagccaagcccgtgacccagatcgtgtctgccgaagcctggggcagagccgattgcgacgtgaagctggtggaaaagagcttcgagacagacaccaacctgaacttccagaacctgagcgtgatcggcttcagaatcctgctgctgaaagtggccggctttaacctgctgatgaccctgcggctgtggtccagc

SEQ ID NO: 37688 - DNA, 2301 bp, synthetic construct
  source 1..2301: mol_type = other DNA
atggccttaccagtgaccgccttgctcctgccgctggccttgctgctccacgccgccaggccggaagtgcaactggtggaatctggaggctctctggtgcagccagggggaagcctgagactgtcttgtgccgcttccggcttcaccttcgacgactacgccatgagctgggtgcgccaggtgccaggcaaaggcctggaatgggtgtccagcatcaactggagcggcacccacaccgattacgccgactccgtgaaaggcagattcacaatcagcagaaacaacgccaacaataccctgtacctgcagatgaactccctgaagtctgaggatacagcagtgtattattgcgccaagaactggcgggacgccggcaccacttggtttgagaaaagcggctctgccggacagggaacccaagtgacagtgtcctccggtaccggcggaggcggatctggcggcggaggtagcggtggcggaggatctgaattcgacatcgtgatgacacagagccctgatagcctggccgtgtctctgggagagagagccaccatcaactgcaagagcagccagagcctgctgaacagcggcaacaacaagaactacgtgacatggtatcagcagaagcccggccagcctcctaagctgctgatctactggggcagcaccagatccacaggcgtgcccgatagattttctggctctggcagcggcaccgacttcaccctgacaatttctagcctgcaagccgaggacgtggccgtgtactactgccagaacgactacacataccccttcaccttcggccagggcaccaagctggaaatcaaactcgaggacctgaagaacgtgttcccacctgaggtggccgtgttcgagcctagcgaggccgagatcagccacacccagaaagccaccctcgtgtgcctggctaccggcttctaccccgaccatgtggaactgtcttggtgggtcaacggcaaagaggtgcacagcggcgtgtgtaccgacccccagccactgaaagaacagcccgccctgaacgacagccggtactgcctgagcagcagactgagagtgtccgccaccttctggcagaacccccggaaccacttcagatgccaggtgcagttctacggcctgagcgagaacgacgagtggacccaggacagagccaagcccgtgacccagatcgtgtctgccgaagcctggggcagagccgattgcgacgtgaagctggtggaaaagagcttcgagacagacaccaacctgaacttccagaacctgagcgtgatcggcttcagaatcctgctgctgaaagtggccggctttaacctgctgatgaccctgcggctgtggtccagcagggccaagcgatctggatctggagcaacaaacttctcactactcaaacaagcaggtgacgtggaggagaatcccgggcctactagtatggactggatttggcgcatccttttccttgtcggcgctgctaccggcgcgcattccttcgaacaagttcagctggttcagagcggagccgaagtgaagaaacctggggcctctgtgaaggtgtcctgcaaggcttccggctataccttcaccagcttttggctgaactgggtccgacaggcccctggacaaggactggaatggatgggcaacatctaccccagcgacagctacaccgtgtacaaccagaaattcaaggaccgcgtgaccatgaccagggacaccagcacaagcacagtgtacatggaactgagcagcctgcggagcgaggataccgccgtgtattattgcgccagaacctggcggggcaacagcttcgattattggggccagggaaccaccgtgaccgtgtcatctacgcgtatccagaaccctgatcctgccgtgtaccagctgcgggatagcaagagcagcgacaagagcgtgtgtctgttcaccgacttcgacagccagaccaacgtgtcccagagcaaggactccgacgtgtacatcaccgataagtgcgtgctggacatgcggagcatggacttcaagagcaactccgccgtggcctggtccaacaagtccgatttcgcctgcgccaacgccttcaacaacagcattatccccgaggacacattcttcccaagccccgagagcagctgcggctttaccagcgagagctaccagcagggcgtgctgagcgccaccatcctgtacgagatcctgctgggcaaggccaccctgtacgccgtgctggtgtctgccctggtgctgatggctatggtcaagcggaaggacagccgggga

SEQ ID NO: 37689 - DNA, 2313 bp, synthetic construct
  source 1..2313: mol_type = other DNA
atggccttaccagtgaccgccttgctcctgccgctggccttgctgctccacgccgccaggccggaagtgcaactggtggaatctggaggctctctggtgcagccagggggaagcctgagactgtcttgtgccgcttccggcttcaccttcgacgactacgccatgagctgggtgcgccaggtgccaggcaaaggcctggaatgggtgtccagcatcaactggagcggcacccacaccgattacgccgactccgtgaaaggcagattcacaatcagcagaaacaacgccaacaataccctgtacctgcagatgaactccctgaagtctgaggatacagcagtgtattattgcgccaagaactggcgggacgccggcaccacttggtttgagaaaagcggctctgccggacagggaacccaagtgacagtgtcctccggtaccggcggaggcggatctggcggcggaggtagcggtggcggaggatctgaattcgacatcgtgatgacacagagccctgatagcctggccgtgtctctgggagagagagccaccatcaactgcaagagcagccagagcctgctgaacagcggcaacaacaagaactacgtgacatggtatcagcagaagcccggccagcctcctaagctgctgatctactggggcagcaccagatccacaggcgtgcccgatagattttctggctctggcagcggcaccgacttcaccctgacaatttctagcctgcaagccgaggacgtggccgtgtactactgccagaacgactacacataccccttcaccttcggccagggcaccaagctggaaatcaaactcgagatccagaaccctgatcctgccgtgtaccagctgcgggatagcaagagcagcgacaagagcgtgtgtctgttcaccgacttcgacagccagaccaacgtgtcccagagcaaggactccgacgtgtacatcaccgataagtgcgtgctggacatgcggagcatggacttcaagagcaactccgccgtggcctggtccaacaagtccgatttcgcctgcgccaacgccttcaacaacagcattatccccgaggacacattcttcccaagccccgagagcagctgcggctttaccagcgagagctaccagcagggcgtgctgagcgccaccatcctgtacgagatcctgctgggcaaggccaccctgtacgccgtgctggtgtctgccctggtgctgatggctatggtcaagcggaaggacagccggggacgcgccaagagaagcggatctggcgtgaagcagaccctgaatttcgacctgctgaagctggctggcgacgtggaatccaacccaggccctactagtatggactggatttggcgcatccttttccttgtcggcgctgctaccggcgcgcattccttcgaacaagttcagctggttcagagcggagccgaagtgaagaaacctggggcctctgtgaaggtgtcctgcaaggcttccggctataccttcaccagcttttggctgaactgggtccgacaggcccctggacaaggactggaatggatgggcaacatctaccccagcgacagctacaccgtgtacaaccagaaattcaaggaccgcgtgaccatgaccagggacaccagcacaagcacagtgtacatggaactgagcagcctgcggagcgaggataccgccgtgtattattgcgccagaacctggcggggcaacagcttcgattattggggccagggaaccaccgtgaccgtgtcatctacgcgtgaggacctgaagaacgtgttcccacctgaggtggccgtgttcgagcctagcgaggccgagatcagccacacccagaaagccaccctcgtgtgcctggctaccggcttctaccccgaccatgtggaactgtcttggtgggtcaacggcaaagaggtgcacagcggcgtgtgtaccgacccccagccactgaaagaacagcccgccctgaacgacagccggtactgcctgagcagcagactgagagtgtccgccaccttctggcagaacccccggaaccacttcagatgccaggtgcagttctacggcctgagcgagaacgacgagtggacccaggacagagccaagcccgtgacccagatcgtgtctgccgaagcctggggcagagccgattgcgacgtgaagctggtggaaaagagcttcgagacagacaccaacctgaacttccagaacctgagcgtgatcggcttcagaatcctgctgctgaaagtggccggctttaacctgctgatgaccctgcggctgtggtccagc

SEQ ID NO: 37690 - DNA, 2295 bp, synthetic construct
  source 1..2295: mol_type = other DNA
atggccttaccagtgaccgccttgctcctgccgctggccttgctgctccacgccgccaggccggaagttcagctgcttgagtctggcggaggactggttcaacctggcggaagcctgagactgtcttgtgccgccagcggcttcatcttcagcagctacgccatgagctgggtccgacaggctcctggaaagggccaagaatgggtttccggcgttagcggcacaggcgtgaacacctactacgccgatagcgtgaagggcagattcaccatcagccgggacaacagcaagaacaccctgtacctccagatgaacagcctgagagccgaggacaccgccgtgtactattgtgcctctggcaaaggctgggacagcggctcttggtacgaggactatagaggccagggcaccctggtcacagtttcttcaggtaccggcggaggcggatctggcggcggaggtagcggtggcggaggatctgaattcgacatcgtgatgacacagagccctgatagcctggccgtgtctctgggagagagagccaccatcaactgcaagagcagccagagcctgctgaacagcggcaacaacaagaactacgtgacatggtatcagcagaagcccggccagcctcctaagctgctgatctactggggcagcaccagatccacaggcgtgcccgatagattttctggctctggcagcggcaccgacttcaccctgacaatttctagcctgcaagccgaggacgtggccgtgtactactgccagaacgactacacataccccttcaccttcggccagggcaccaagctggaaatcaaactcgaggacctgaagaacgtgttcccacctgaggtggccgtgttcgagcctagcgaggccgagatcagccacacccagaaagccaccctcgtgtgcctggctaccggcttctaccccgaccatgtggaactgtcttggtgggtcaacggcaaagaggtgcacagcggcgtgtgtaccgacccccagccactgaaagaacagcccgccctgaacgacagccggtactgcctgagcagcagactgagagtgtccgccaccttctggcagaacccccggaaccacttcagatgccaggtgcagttctacggcctgagcgagaacgacgagtggacccaggacagagccaagcccgtgacccagatcgtgtctgccgaagcctggggcagagccgattgcgacgtgaagctggtggaaaagagcttcgagacagacaccaacctgaacttccagaacctgagcgtgatcggcttcagaatcctgctgctgaaagtggccggctttaacctgctgatgaccctgcggctgtggtccagcagggccaagcgatctggatctggagcaacaaacttctcactactcaaacaagcaggtgacgtggaggagaatcccgggcctactagtatggactggatttggcgcatccttttccttgtcggcgctgctaccggcgcgcattccttcgaacaagttcagctggttcagagcggagccgaagtgaagaaacctggggcctctgtgaaggtgtcctgcaaggcttccggctataccttcaccagcttttggctgaactgggtccgacaggcccctggacaaggactggaatggatgggcaacatctaccccagcgacagctacaccgtgtacaaccagaaattcaaggaccgcgtgaccatgaccagggacaccagcacaagcacagtgtacatggaactgagcagcctgcggagcgaggataccgccgtgtattattgcgccagaacctggcggggcaacagcttcgattattggggccagggaaccaccgtgaccgtgtcatctacgcgtatccagaaccctgatcctgccgtgtaccagctgcgggatagcaagagcagcgacaagagcgtgtgtctgttcaccgacttcgacagccagaccaacgtgtcccagagcaaggactccgacgtgtacatcaccgataagtgcgtgctggacatgcggagcatggacttcaagagcaactccgccgtggcctggtccaacaagtccgatttcgcctgcgccaacgccttcaacaacagcattatccccgaggacacattcttcccaagccccgagagcagctgcggctttaccagcgagagctaccagcagggcgtgctgagcgccaccatcctgtacgagatcctgctgggcaaggccaccctgtacgccgtgctggtgtctgccctggtgctgatggctatggtcaagcggaaggacagccgggga

SEQ ID NO: 37691 - DNA, 2307 bp, synthetic construct
  source 1..2307: mol_type = other DNA
atggccttaccagtgaccgccttgctcctgccgctggccttgctgctccacgccgccaggccggaagttcagctgcttgagtctggcggaggactggttcaacctggcggaagcctgagactgtcttgtgccgccagcggcttcatcttcagcagctacgccatgagctgggtccgacaggctcctggaaagggccaagaatgggtttccggcgttagcggcacaggcgtgaacacctactacgccgatagcgtgaagggcagattcaccatcagccgggacaacagcaagaacaccctgtacctccagatgaacagcctgagagccgaggacaccgccgtgtactattgtgcctctggcaaaggctgggacagcggctcttggtacgaggactatagaggccagggcaccctggtcacagtttcttcaggtaccggcggaggcggatctggcggcggaggtagcggtggcggaggatctgaattcgacatcgtgatgacacagagccctgatagcctggccgtgtctctgggagagagagccaccatcaactgcaagagcagccagagcctgctgaacagcggcaacaacaagaactacgtgacatggtatcagcagaagcccggccagcctcctaagctgctgatctactggggcagcaccagatccacaggcgtgcccgatagattttctggctctggcagcggcaccgacttcaccctgacaatttctagcctgcaagccgaggacgtggccgtgtactactgccagaacgactacacataccccttcaccttcggccagggcaccaagctggaaatcaaactcgagatccagaaccctgatcctgccgtgtaccagctgcgggatagcaagagcagcgacaagagcgtgtgtctgttcaccgacttcgacagccagaccaacgtgtcccagagcaaggactccgacgtgtacatcaccgataagtgcgtgctggacatgcggagcatggacttcaagagcaactccgccgtggcctggtccaacaagtccgatttcgcctgcgccaacgccttcaacaacagcattatccccgaggacacattcttcccaagccccgagagcagctgcggctttaccagcgagagctaccagcagggcgtgctgagcgccaccatcctgtacgagatcctgctgggcaaggccaccctgtacgccgtgctggtgtctgccctggtgctgatggctatggtcaagcggaaggacagccggggacgcgccaagagaagcggatctggcgtgaagcagaccctgaatttcgacctgctgaagctggctggcgacgtggaatccaacccaggccctactagtatggactggatttggcgcatccttttccttgtcggcgctgctaccggcgcgcattccttcgaacaagttcagctggttcagagcggagccgaagtgaagaaacctggggcctctgtgaaggtgtcctgcaaggcttccggctataccttcaccagcttttggctgaactgggtccgacaggcccctggacaaggactggaatggatgggcaacatctaccccagcgacagctacaccgtgtacaaccagaaattcaaggaccgcgtgaccatgaccagggacaccagcacaagcacagtgtacatggaactgagcagcctgcggagcgaggataccgccgtgtattattgcgccagaacctggcggggcaacagcttcgattattggggccagggaaccaccgtgaccgtgtcatctacgcgtgaggacctgaagaacgtgttcccacctgaggtggccgtgttcgagcctagcgaggccgagatcagccacacccagaaagccaccctcgtgtgcctggctaccggcttctaccccgaccatgtggaactgtcttggtgggtcaacggcaaagaggtgcacagcggcgtgtgtaccgacccccagccactgaaagaacagcccgccctgaacgacagccggtactgcctgagcagcagactgagagtgtccgccaccttctggcagaacccccggaaccacttcagatgccaggtgcagttctacggcctgagcgagaacgacgagtggacccaggacagagccaagcccgtgacccagatcgtgtctgccgaagcctggggcagagccgattgcgacgtgaagctggtggaaaagagcttcgagacagacaccaacctgaacttccagaacctgagcgtgatcggcttcagaatcctgctgctgaaagtggccggctttaacctgctgatgaccctgcggctgtggtccagc

SEQ ID NO: 37692 - DNA, 2199 bp, synthetic construct
  source 1..2199: mol_type = other DNA
atggccttaccagtgaccgccttgctcctgccgctggccttgctgctccacgccgccaggccgatgctgcccgctcctaagaatctggtggtgtccagaatcaccgaggacagcgccagactgtcttggacagctcctgatgccgccttcgacagcttccccatccggtacatcgagacactgatctggggcgaagccatctggctggatgtgcctggaagcgagagaagctacgacctgaccggactgaagcctggcacagagtatgccgtggtcatcaccggcgtgaaaggcggcagattctctagccctctggtggcctctttcaccaccggtaccggcggaggcggatctggcggcggaggtagcggtggcggaggatctgaattcgacatcgtgatgacacagagccctgatagcctggccgtgtctctgggagagagagccaccatcaactgcaagagcagccagagcctgctgaacagcggcaacaacaagaactacgtgacatggtatcagcagaagcccggccagcctcctaagctgctgatctactggggcagcaccagatccacaggcgtgcccgatagattttctggctctggcagcggcaccgacttcaccctgacaatttctagcctgcaagccgaggacgtggccgtgtactactgccagaacgactacacataccccttcaccttcggccagggcaccaagctggaaatcaaactcgaggacctgaagaacgtgttcccacctgaggtggccgtgttcgagcctagcgaggccgagatcagccacacccagaaagccaccctcgtgtgcctggctaccggcttctaccccgaccatgtggaactgtcttggtgggtcaacggcaaagaggtgcacagcggcgtgtgtaccgacccccagccactgaaagaacagcccgccctgaacgacagccggtactgcctgagcagcagactgagagtgtccgccaccttctggcagaacccccggaaccacttcagatgccaggtgcagttctacggcctgagcgagaacgacgagtggacccaggacagagccaagcccgtgacccagatcgtgtctgccgaagcctggggcagagccgattgcgacgtgaagctggtggaaaagagcttcgagacagacaccaacctgaacttccagaacctgagcgtgatcggcttcagaatcctgctgctgaaagtggccggctttaacctgctgatgaccctgcggctgtggtccagcagggccaagcgatctggatctggagcaacaaacttctcactactcaaacaagcaggtgacgtggaggagaatcccgggcctactagtatggactggatttggcgcatccttttccttgtcggcgctgctaccggcgcgcattccttcgaacaagttcagctggttcagagcggagccgaagtgaagaaacctggggcctctgtgaaggtgtcctgcaaggcttccggctataccttcaccagcttttggctgaactgggtccgacaggcccctggacaaggactggaatggatgggcaacatctaccccagcgacagctacaccgtgtacaaccagaaattcaaggaccgcgtgaccatgaccagggacaccagcacaagcacagtgtacatggaactgagcagcctgcggagcgaggataccgccgtgtattattgcgccagaacctggcggggcaacagcttcgattattggggccagggaaccaccgtgaccgtgtcatctacgcgtatccagaaccctgatcctgccgtgtaccagctgcgggatagcaagagcagcgacaagagcgtgtgtctgttcaccgacttcgacagccagaccaacgtgtcccagagcaaggactccgacgtgtacatcaccgataagtgcgtgctggacatgcggagcatggacttcaagagcaactccgccgtggcctggtccaacaagtccgatttcgcctgcgccaacgccttcaacaacagcattatccccgaggacacattcttcccaagccccgagagcagctgcggctttaccagcgagagctaccagcagggcgtgctgagcgccaccatcctgtacgagatcctgctgggcaaggccaccctgtacgccgtgctggtgtctgccctggtgctgatggctatggtcaagcggaaggacagccgggga

SEQ ID NO: 37693 - DNA, 2211 bp, synthetic construct
  source 1..2211: mol_type = other DNA
atggccttaccagtgaccgccttgctcctgccgctggccttgctgctccacgccgccaggccgatgctgcccgctcctaagaatctggtggtgtccagaatcaccgaggacagcgccagactgtcttggacagctcctgatgccgccttcgacagcttccccatccggtacatcgagacactgatctggggcgaagccatctggctggatgtgcctggaagcgagagaagctacgacctgaccggactgaagcctggcacagagtatgccgtggtcatcaccggcgtgaaaggcggcagattctctagccctctggtggcctctttcaccaccggtaccggcggaggcggatctggcggcggaggtagcggtggcggaggatctgaattcgacatcgtgatgacacagagccctgatagcctggccgtgtctctgggagagagagccaccatcaactgcaagagcagccagagcctgctgaacagcggcaacaacaagaactacgtgacatggtatcagcagaagcccggccagcctcctaagctgctgatctactggggcagcaccagatccacaggcgtgcccgatagattttctggctctggcagcggcaccgacttcaccctgacaatttctagcctgcaagccgaggacgtggccgtgtactactgccagaacgactacacataccccttcaccttcggccagggcaccaagctggaaatcaaactcgagatccagaaccctgatcctgccgtgtaccagctgcgggatagcaagagcagcgacaagagcgtgtgtctgttcaccgacttcgacagccagaccaacgtgtcccagagcaaggactccgacgtgtacatcaccgataagtgcgtgctggacatgcggagcatggacttcaagagcaactccgccgtggcctggtccaacaagtccgatttcgcctgcgccaacgccttcaacaacagcattatccccgaggacacattcttcccaagccccgagagcagctgcggctttaccagcgagagctaccagcagggcgtgctgagcgccaccatcctgtacgagatcctgctgggcaaggccaccctgtacgccgtgctggtgtctgccctggtgctgatggctatggtcaagcggaaggacagccggggacgcgccaagagaagcggatctggcgtgaagcagaccctgaatttcgacctgctgaagctggctggcgacgtggaatccaacccaggccctactagtatggactggatttggcgcatccttttccttgtcggcgctgctaccggcgcgcattccttcgaacaagttcagctggttcagagcggagccgaagtgaagaaacctggggcctctgtgaaggtgtcctgcaaggcttccggctataccttcaccagcttttggctgaactgggtccgacaggcccctggacaaggactggaatggatgggcaacatctaccccagcgacagctacaccgtgtacaaccagaaattcaaggaccgcgtgaccatgaccagggacaccagcacaagcacagtgtacatggaactgagcagcctgcggagcgaggataccgccgtgtattattgcgccagaacctggcggggcaacagcttcgattattggggccagggaaccaccgtgaccgtgtcatctacgcgtgaggacctgaagaacgtgttcccacctgaggtggccgtgttcgagcctagcgaggccgagatcagccacacccagaaagccaccctcgtgtgcctggctaccggcttctaccccgaccatgtggaactgtcttggtgggtcaacggcaaagaggtgcacagcggcgtgtgtaccgacccccagccactgaaagaacagcccgccctgaacgacagccggtactgcctgagcagcagactgagagtgtccgccaccttctggcagaacccccggaaccacttcagatgccaggtgcagttctacggcctgagcgagaacgacgagtggacccaggacagagccaagcccgtgacccagatcgtgtctgccgaagcctggggcagagccgattgcgacgtgaagctggtggaaaagagcttcgagacagacaccaacctgaacttccagaacctgagcgtgatcggcttcagaatcctgctgctgaaagtggccggctttaacctgctgatgaccctgcggctgtggtccagc

SEQ ID NO: 37694 - DNA, 2286 bp, synthetic construct
  source 1..2286: mol_type = other DNA
atggccttaccagtgaccgccttgctcctgccgctggccttgctgctccacgccgccaggccggaggtgcagctggttgaatctggcggaggactggttcagcctggcggatctctgagactgtcttgtgccgccagcggcttcaacatcaaggatacctgtatcggctgggttcgcagagcccctggcaaagaggaagaactggtcgccaaaatctgcaagtacagcggccacaccagatacgccgacagcgtgaagggcagattcaccatcagcgccgacaccagcaagaacaccgcctacctccagatgaacagcctgagagccgaggacaccgccgtgtactattgtgccgctgtgtccgtcagagatgggcactacaattactggggccagggcaccaccgtgaccgtttcttcaggtaccggcggaggcggatctggcggcggaggtagcggtggcggaggatctgaattcgacatcgtgatgacacagagccctgatagcctggccgtgtctctgggagagagagccaccatcaactgcaagagcagccagagcctgctgaacagcggcaacaacaagaactacgtgacatggtatcagcagaagcccggccagcctcctaagctgctgatctactggggcagcaccagatccacaggcgtgcccgatagattttctggctctggcagcggcaccgacttcaccctgacaatttctagcctgcaagccgaggacgtggccgtgtactactgccagaacgactacacataccccttcaccttcggccagggcaccaagctggaaatcaaactcgaggacctgaagaacgtgttcccacctgaggtggccgtgttcgagcctagcgaggccgagatcagccacacccagaaagccaccctcgtgtgcctggctaccggcttctaccccgaccatgtggaactgtcttggtgggtcaacggcaaagaggtgcacagcggcgtgtgtaccgacccccagccactgaaagaacagcccgccctgaacgacagccggtactgcctgagcagcagactgagagtgtccgccaccttctggcagaacccccggaaccacttcagatgccaggtgcagttctacggcctgagcgagaacgacgagtggacccaggacagagccaagcccgtgacccagatcgtgtctgccgaagcctggggcagagccgattgcgacgtgaagctggtggaaaagagcttcgagacagacaccaacctgaacttccagaacctgagcgtgatcggcttcagaatcctgctgctgaaagtggccggctttaacctgctgatgaccctgcggctgtggtccagcagggccaagcgatctggatctggagcaacaaacttctcactactcaaacaagcaggtgacgtggaggagaatcccgggcctactagtatggactggatttggcgcatccttttccttgtcggcgctgctaccggcgcgcattccttcgaacaagttcagctggttcagagcggagccgaagtgaagaaacctggggcctctgtgaaggtgtcctgcaaggcttccggctataccttcaccagcttttggctgaactgggtccgacaggcccctggacaaggactggaatggatgggcaacatctaccccagcgacagctacaccgtgtacaaccagaaattcaaggaccgcgtgaccatgaccagggacaccagcacaagcacagtgtacatggaactgagcagcctgcggagcgaggataccgccgtgtattattgcgccagaacctggcggggcaacagcttcgattattggggccagggaaccaccgtgaccgtgtcatctacgcgtatccagaaccctgatcctgccgtgtaccagctgcgggatagcaagagcagcgacaagagcgtgtgtctgttcaccgacttcgacagccagaccaacgtgtcccagagcaaggactccgacgtgtacatcaccgataagtgcgtgctggacatgcggagcatggacttcaagagcaactccgccgtggcctggtccaacaagtccgatttcgcctgcgccaacgccttcaacaacagcattatccccgaggacacattcttcccaagccccgagagcagctgcggctttaccagcgagagctaccagcagggcgtgctgagcgccaccatcctgtacgagatcctgctgggcaaggccaccctgtacgccgtgctggtgtctgccctggtgctgatggctatggtcaagcggaaggacagccgggga

SEQ ID NO: 37695 - DNA, 2298 bp, synthetic construct
  source 1..2298: mol_type = other DNA
atggccttaccagtgaccgccttgctcctgccgctggccttgctgctccacgccgccaggccggaggtgcagctggttgaatctggcggaggactggttcagcctggcggatctctgagactgtcttgtgccgccagcggcttcaacatcaaggatacctgtatcggctgggttcgcagagcccctggcaaagaggaagaactggtcgccaaaatctgcaagtacagcggccacaccagatacgccgacagcgtgaagggcagattcaccatcagcgccgacaccagcaagaacaccgcctacctccagatgaacagcctgagagccgaggacaccgccgtgtactattgtgccgctgtgtccgtcagagatgggcactacaattactggggccagggcaccaccgtgaccgtttcttcaggtaccggcggaggcggatctggcggcggaggtagcggtggcggaggatctgaattcgacatcgtgatgacacagagccctgatagcctggccgtgtctctgggagagagagccaccatcaactgcaagagcagccagagcctgctgaacagcggcaacaacaagaactacgtgacatggtatcagcagaagcccggccagcctcctaagctgctgatctactggggcagcaccagatccacaggcgtgcccgatagattttctggctctggcagcggcaccgacttcaccctgacaatttctagcctgcaagccgaggacgtggccgtgtactactgccagaacgactacacataccccttcaccttcggccagggcaccaagctggaaatcaaactcgagatccagaaccctgatcctgccgtgtaccagctgcgggatagcaagagcagcgacaagagcgtgtgtctgttcaccgacttcgacagccagaccaacgtgtcccagagcaaggactccgacgtgtacatcaccgataagtgcgtgctggacatgcggagcatggacttcaagagcaactccgccgtggcctggtccaacaagtccgatttcgcctgcgccaacgccttcaacaacagcattatccccgaggacacattcttcccaagccccgagagcagctgcggctttaccagcgagagctaccagcagggcgtgctgagcgccaccatcctgtacgagatcctgctgggcaaggccaccctgtacgccgtgctggtgtctgccctggtgctgatggctatggtcaagcggaaggacagccggggacgcgccaagagaagcggatctggcgtgaagcagaccctgaatttcgacctgctgaagctggctggcgacgtggaatccaacccaggccctactagtatggactggatttggcgcatccttttccttgtcggcgctgctaccggcgcgcattccttcgaacaagttcagctggttcagagcggagccgaagtgaagaaacctggggcctctgtgaaggtgtcctgcaaggcttccggctataccttcaccagcttttggctgaactgggtccgacaggcccctggacaaggactggaatggatgggcaacatctaccccagcgacagctacaccgtgtacaaccagaaattcaaggaccgcgtgaccatgaccagggacaccagcacaagcacagtgtacatggaactgagcagcctgcggagcgaggataccgccgtgtattattgcgccagaacctggcggggcaacagcttcgattattggggccagggaaccaccgtgaccgtgtcatctacgcgtgaggacctgaagaacgtgttcccacctgaggtggccgtgttcgagcctagcgaggccgagatcagccacacccagaaagccaccctcgtgtgcctggctaccggcttctaccccgaccatgtggaactgtcttggtgggtcaacggcaaagaggtgcacagcggcgtgtgtaccgacccccagccactgaaagaacagcccgccctgaacgacagccggtactgcctgagcagcagactgagagtgtccgccaccttctggcagaacccccggaaccacttcagatgccaggtgcagttctacggcctgagcgagaacgacgagtggacccaggacagagccaagcccgtgacccagatcgtgtctgccgaagcctggggcagagccgattgcgacgtgaagctggtggaaaagagcttcgagacagacaccaacctgaacttccagaacctgagcgtgatcggcttcagaatcctgctgctgaaagtggccggctttaacctgctgatgaccctgcggctgtggtccagc

SEQ ID NO: 37696 - DNA, 3402 bp, synthetic construct
  source 1..3402: mol_type = other DNA
atggccttaccagtgaccgccttgctcctgccgctggccttgctgctccacgccgccaggccggaagtgcagctggttgaatctggcggaggactggttcaggctggcggatctctgagactgtcttgtgccgccagcggcagaacctttagcatgggctggtttagacaggcccctggcaaagagagagagttcgtcgccgccatcacatactctggcggcagcccttactacgccgactctgtgaagggcagattcaccatcagccgggacaacgccaagaacaccgtgtacctccagatgaacagcctgaagcctgaggacaccgccgtgtactactgcgccgccaatccaacatacggcagcgactggaacgccgagaattggggccagggaacccaagtgacagtgtctagcggtaccggcggaggcggatctggcggcggaggtagcggtggcggaggatctgaattcgacatcgtgatgacacagagccctgatagcctggccgtgtctctgggagagagagccaccatcaactgcaagagcagccagagcctgctgaacagcggcaacaacaagaactacgtgacatggtatcagcagaagcccggccagcctcctaagctgctgatctactggggcagcaccagatccacaggcgtgcccgatagattttctggctctggcagcggcaccgacttcaccctgacaatttctagcctgcaagccgaggacgtggccgtgtactactgccagaacgactacacataccccttcaccttcggccagggcaccaagctggaaatcaaactcgaggacctgaagaacgtgttcccacctgaggtggccgtgttcgagcctagcgaggccgagatcagccacacccagaaagccaccctcgtgtgcctggctaccggcttctaccccgaccatgtggaactgtcttggtgggtcaacggcaaagaggtgcacagcggcgtgtgtaccgacccccagccactgaaagaacagcccgccctgaacgacagccggtactgcctgagcagcagactgagagtgtccgccaccttctggcagaacccccggaaccacttcagatgccaggtgcagttctacggcctgagcgagaacgacgagtggacccaggacagagccaagcccgtgacccagatcgtgtctgccgaagcctggggcagagccgattgcgacgtgaagctggtggaaaagagcttcgagacagacaccaacctgaacttccagaacctgagcgtgatcggcttcagaatcctgctgctgaaagtggccggctttaacctgctgatgaccctgcggctgtggtccagcagggccaagcgatctggatctggagcaacaaacttctcactactcaaacaagcaggtgacgtggaggagaatcccgggcctactagtgccaccatggactggatttggcgcatccttttccttgtcggcgctgctaccggcgcccattccgggcccgaagtgcaactggttgaatccggtggcggcctggtgcaagcaggcggatctctcagacttagctgtgccgcctccggcagaaccttcacaatgggatggtttaggcaggctccagggaaagagagagagttcgtcgccgccatctctctgtctcccacactggcctactacgccgactctgtgaaaggccggttcaccatctccagagataatgccaagaacaccgtggtgctgcaaatgaactctctgaaacccgaggatacagccctgtactattgtgccgctgaccggaagtccgtgatgagcatcagacccgattactggggacagggcacacaagtcacagtgtcctctggatccggcggcggaggatctggcggaggcggatctgggggcggaggctctttcgaacaagttcagctggttcagagcggagccgaagtgaagaaacctggggcctctgtgaaggtgtcctgcaaggcttccggctataccttcaccagcttttggctgaactgggtccgacaggcccctggacaaggactggaatggatgggcaacatctaccccagcgacagctacaccgtgtacaaccagaaattcaaggaccgcgtgaccatgaccagggacaccagcacaagcacagtgtacatggaactgagcagcctgcggagcgaggataccgccgtgtattattgcgccagaacctggcggggcaacagcttcgattattggggccagggaaccaccgtgaccgtgtcatctacgcgtatccagaaccctgatcctgccgtgtaccagctgcgggatagcaagagcagcgacaagagcgtgtgtctgttcaccgacttcgacagccagaccaacgtgtcccagagcaaggactccgacgtgtacatcaccgataagtgcgtgctggacatgcggagcatggacttcaagagcaactccgccgtggcctggtccaacaagtccgatttcgcctgcgccaacgccttcaacaacagcattatccccgaggacacattcttcccaagccccgagagcagctgcggctttaccagcgagagctaccagcagggcgtgctgagcgccaccatcctgtacgagatcctgctgggcaaggccaccctgtacgccgtgctggtgtctgccctggtgctgatggctatggtcaagcggaaggacagccggggacgcgccaagagaagcggatctggcgtgaagcagaccctgaatttcgacctgctgaagctggctggcgacgtggaatccaacccaggcccttctagaggccatatgaccgagtacaagcccacggtgcgcctcgccacccgcgacgacgtccccagggccgtacgcaccctcgccgccgcgttcgccgactaccccgccacgcgccacaccgtcgatccggaccgccacatcgagcgggtcaccgagctgcaagaactcttcctcacgcgcgtcgggctcgacatcggcaaggtgtgggtcgcggacgacggcgccgcggtggcggtctggaccacgccggagagcgtcgaagcgggggcggtgttcgccgagatcggcccgcgcatggccgagttgagcggttcccggctggccgcgcagcaacagatggaaggcctcctggcgccgcaccggcccaaggagcccgcgtggttcctggccaccgtcggcgtctcgcccgaccaccagggcaagggtctgggcagcgccgtcgtgctccccggagtggaggcggccgagcgcgccggggtgcccgccttcctggagacctccgcgccccgcaacctccccttctacgagcggctcggcttcaccgtcaccgccgacgtcgaggtgcccgaaggaccgcgcacctggtgcatgacccgcaagcccggtgcctga

SEQ ID NO: 37697 - DNA, 2316 bp, synthetic construct
  source 1..2316: mol_type = other DNA
atggccttaccagtgaccgccttgctcctgccgctggccttgctgctccacgccgccaggccggaagtgcagctggttgaatctggcggaggactggttcagcctggcggatctctgagactgtcttgtgccgcctctggcttcgccagcgactactatatcatcggctggttcagacaggcccctggcaaagagagagagggcgtcagctgtatcagcagcagatacgccaacaccaactacgccgacagcgtgaagggcagattcaccatcagccgggacaacgccaagaacaccgtgtacctccagatgaacagcctgaagcctgaggacaccgccgtgtactactgtgccgccgacaccagaagatacacctgtcctgacattgccaccatgcaccggaacttcgattcttggggccagggcacactggtcaccgtttcttctggtaccggcggaggcggatctggcggcggaggtagcggtggcggaggatctgaattcgacatcgtgatgacacagagccctgatagcctggccgtgtctctgggagagagagccaccatcaactgcaagagcagccagagcctgctgaacagcggcaacaacaagaactacgtgacatggtatcagcagaagcccggccagcctcctaagctgctgatctactggggcagcaccagatccacaggcgtgcccgatagattttctggctctggcagcggcaccgacttcaccctgacaatttctagcctgcaagccgaggacgtggccgtgtactactgccagaacgactacacataccccttcaccttcggccagggcaccaagctggaaatcaaactcgaggacctgaagaacgtgttcccacctgaggtggccgtgttcgagcctagcgaggccgagatcagccacacccagaaagccaccctcgtgtgcctggctaccggcttctaccccgaccatgtggaactgtcttggtgggtcaacggcaaagaggtgcacagcggcgtgtgtaccgacccccagccactgaaagaacagcccgccctgaacgacagccggtactgcctgagcagcagactgagagtgtccgccaccttctggcagaacccccggaaccacttcagatgccaggtgcagttctacggcctgagcgagaacgacgagtggacccaggacagagccaagcccgtgacccagatcgtgtctgccgaagcctggggcagagccgattgcgacgtgaagctggtggaaaagagcttcgagacagacaccaacctgaacttccagaacctgagcgtgatcggcttcagaatcctgctgctgaaagtggccggctttaacctgctgatgaccctgcggctgtggtccagcagggccaagcgatctggatctggagcaacaaacttctcactactcaaacaagcaggtgacgtggaggagaatcccgggcctactagtatggactggatttggcgcatccttttccttgtcggcgctgctaccggcgcgcattccttcgaacaagttcagctggttcagagcggagccgaagtgaagaaacctggggcctctgtgaaggtgtcctgcaaggcttccggctataccttcaccagcttttggctgaactgggtccgacaggcccctggacaaggactggaatggatgggcaacatctaccccagcgacagctacaccgtgtacaaccagaaattcaaggaccgcgtgaccatgaccagggacaccagcacaagcacagtgtacatggaactgagcagcctgcggagcgaggataccgccgtgtattattgcgccagaacctggcggggcaacagcttcgattattggggccagggaaccaccgtgaccgtgtcatctacgcgtatccagaaccctgatcctgccgtgtaccagctgcgggatagcaagagcagcgacaagagcgtgtgtctgttcaccgacttcgacagccagaccaacgtgtcccagagcaaggactccgacgtgtacatcaccgataagtgcgtgctggacatgcggagcatggacttcaagagcaactccgccgtggcctggtccaacaagtccgatttcgcctgcgccaacgccttcaacaacagcattatccccgaggacacattcttcccaagccccgagagcagctgcggctttaccagcgagagctaccagcagggcgtgctgagcgccaccatcctgtacgagatcctgctgggcaaggccaccctgtacgccgtgctggtgtctgccctggtgctgatggctatggtcaagcggaaggacagccggggataa

SEQ ID NO: 37698 - DNA, 2316 bp, synthetic construct
  source 1..2316: mol_type = other DNA
atggccttaccagtgaccgccttgctcctgccgctggccttgctgctccacgccgccaggccggaagtgcagctggttgaatctggcggaggactggttcagcctggcggatctctgagactgagctgtgaagccagcggcttcgccagcgacgattacatcatcggctggttcagacaggcccctggcaaagagagagagggcgtcagctgcatcagctctaagtacgccaacaccgtgtacaccgacagcgtgaagggcagattcagactgagcagaggcaccgccaagaataccgtgtacctccagatgagcgccctgaagcctgaggataccgccgtgtactactgcgctatggacagccgcagagtgacatgccctgagatcagcaccatgcaccggaacttcgattcttggggccagggcacactggtcacagtgtcatctggtaccggcggaggcggatctggcggcggaggtagcggtggcggaggatctgaattcgacatcgtgatgacacagagccctgatagcctggccgtgtctctgggagagagagccaccatcaactgcaagagcagccagagcctgctgaacagcggcaacaacaagaactacgtgacatggtatcagcagaagcccggccagcctcctaagctgctgatctactggggcagcaccagatccacaggcgtgcccgatagattttctggctctggcagcggcaccgacttcaccctgacaatttctagcctgcaagccgaggacgtggccgtgtactactgccagaacgactacacataccccttcaccttcggccagggcaccaagctggaaatcaaactcgaggacctgaagaacgtgttcccacctgaggtggccgtgttcgagcctagcgaggccgagatcagccacacccagaaagccaccctcgtgtgcctggctaccggcttctaccccgaccatgtggaactgtcttggtgggtcaacggcaaagaggtgcacagcggcgtgtgtaccgacccccagccactgaaagaacagcccgccctgaacgacagccggtactgcctgagcagcagactgagagtgtccgccaccttctggcagaacccccggaaccacttcagatgccaggtgcagttctacggcctgagcgagaacgacgagtggacccaggacagagccaagcccgtgacccagatcgtgtctgccgaagcctggggcagagccgattgcgacgtgaagctggtggaaaagagcttcgagacagacaccaacctgaacttccagaacctgagcgtgatcggcttcagaatcctgctgctgaaagtggccggctttaacctgctgatgaccctgcggctgtggtccagcagggccaagcgatctggatctggagcaacaaacttctcactactcaaacaagcaggtgacgtggaggagaatcccgggcctactagtatggactggatttggcgcatccttttccttgtcggcgctgctaccggcgcgcattccttcgaacaagttcagctggttcagagcggagccgaagtgaagaaacctggggcctctgtgaaggtgtcctgcaaggcttccggctataccttcaccagcttttggctgaactgggtccgacaggcccctggacaaggactggaatggatgggcaacatctaccccagcgacagctacaccgtgtacaaccagaaattcaaggaccgcgtgaccatgaccagggacaccagcacaagcacagtgtacatggaactgagcagcctgcggagcgaggataccgccgtgtattattgcgccagaacctggcggggcaacagcttcgattattggggccagggaaccaccgtgaccgtgtcatctacgcgtatccagaaccctgatcctgccgtgtaccagctgcgggatagcaagagcagcgacaagagcgtgtgtctgttcaccgacttcgacagccagaccaacgtgtcccagagcaaggactccgacgtgtacatcaccgataagtgcgtgctggacatgcggagcatggacttcaagagcaactccgccgtggcctggtccaacaagtccgatttcgcctgcgccaacgccttcaacaacagcattatccccgaggacacattcttcccaagccccgagagcagctgcggctttaccagcgagagctaccagcagggcgtgctgagcgccaccatcctgtacgagatcctgctgggcaaggccaccctgtacgccgtgctggtgtctgccctggtgctgatggctatggtcaagcggaaggacagccggggataa

SEQ ID NO: 37699 - DNA, 2313 bp, synthetic construct
  source 1..2313: mol_type = other DNA
atggccttaccagtgaccgccttgctcctgccgctggccttgctgctccacgccgccaggccggaagtgcagctggttgaatctggcggaggactggttcagcctggcggatctctgagactgtcttgtgccgcctctggcttcgccagcgactactatatcatcggctggttcagacaggcccctggcaaagagagagagggcgtcagctgtatcagcagcagatacgccaacaccaactacgccgacagcgtgaagggcagattcaccatcagccgggacaacgccaagaacaccgtgtacctccagatgaacagcctgaagcctgaggacaccgccgtgtactactgtgccgccgacaccagaagatacacctgtcctgacattgccaccatgcaccggaacttcgattcttggggccagggcacactggtcaccgtttcttctggtaccggcggaggcggatctggcggcggaggtagcggtggcggaggatctgaattcgacatcgtgatgacacagagccctgatagcctggccgtgtctctgggagagagagccaccatcaactgcaagagcagccagagcctgctgaacagcggcaacaacaagaactacgtgacatggtatcagcagaagcccggccagcctcctaagctgctgatctactggggcagcaccagatccacaggcgtgcccgatagattttctggctctggcagcggcaccgacttcaccctgacaatttctagcctgcaagccgaggacgtggccgtgtactactgccagaacgactacacataccccttcaccttcggccagggcaccaagctggaaatcaaactcgagatccagaaccctgatcctgccgtgtaccagctgcgggatagcaagagcagcgacaagagcgtgtgtctgttcaccgacttcgacagccagaccaacgtgtcccagagcaaggactccgacgtgtacatcaccgataagtgcgtgctggacatgcggagcatggacttcaagagcaactccgccgtggcctggtccaacaagtccgatttcgcctgcgccaacgccttcaacaacagcattatccccgaggacacattcttcccaagccccgagagcagctgcggctttaccagcgagagctaccagcagggcgtgctgagcgccaccatcctgtacgagatcctgctgggcaaggccaccctgtacgccgtgctggtgtctgccctggtgctgatggctatggtcaagcggaaggacagccggggaagggccaagcgatctggatctggagcaacaaacttctcactactcaaacaagcaggtgacgtggaggagaatcccgggcctactagtatggactggatttggcgcatccttttccttgtcggcgctgctaccggcgcgcattccttcgaacaagttcagctggttcagagcggagccgaagtgaagaaacctggggcctctgtgaaggtgtcctgcaaggcttccggctataccttcaccagcttttggctgaactgggtccgacaggcccctggacaaggactggaatggatgggcaacatctaccccagcgacagctacaccgtgtacaaccagaaattcaaggaccgcgtgaccatgaccagggacaccagcacaagcacagtgtacatggaactgagcagcctgcggagcgaggataccgccgtgtattattgcgccagaacctggcggggcaacagcttcgattattggggccagggaaccaccgtgaccgtgtcatctacgcgtgacctgaagaacgtgttcccacctgaggtggccgtgttcgagcctagcgaggccgagatcagccacacccagaaagccaccctcgtgtgcctggctaccggcttctaccccgaccatgtggaactgtcttggtgggtcaacggcaaagaggtgcacagcggcgtgtgtaccgacccccagccactgaaagaacagcccgccctgaacgacagccggtactgcctgagcagcagactgagagtgtccgccaccttctggcagaacccccggaaccacttcagatgccaggtgcagttctacggcctgagcgagaacgacgagtggacccaggacagagccaagcccgtgacccagatcgtgtctgccgaagcctggggcagagccgattgcgacgtgaagctggtggaaaagagcttcgagacagacaccaacctgaacttccagaacctgagcgtgatcggcttcagaatcctgctgctgaaagtggccggctttaacctgctgatgaccctgcggctgtggtccagc

SEQ ID NO: 37700 - DNA, 2313 bp, synthetic construct
  source 1..2313: mol_type = other DNA
atggccttaccagtgaccgccttgctcctgccgctggccttgctgctccacgccgccaggccggaagtgcagctggttgaatctggcggaggactggttcagcctggcggatctctgagactgagctgtgaagccagcggcttcgccagcgacgattacatcatcggctggttcagacaggcccctggcaaagagagagagggcgtcagctgcatcagctctaagtacgccaacaccgtgtacaccgacagcgtgaagggcagattcagactgagcagaggcaccgccaagaataccgtgtacctccagatgagcgccctgaagcctgaggataccgccgtgtactactgcgctatggacagccgcagagtgacatgccctgagatcagcaccatgcaccggaacttcgattcttggggccagggcacactggtcacagtgtcatctggtaccggcggaggcggatctggcggcggaggtagcggtggcggaggatctgaattcgacatcgtgatgacacagagccctgatagcctggccgtgtctctgggagagagagccaccatcaactgcaagagcagccagagcctgctgaacagcggcaacaacaagaactacgtgacatggtatcagcagaagcccggccagcctcctaagctgctgatctactggggcagcaccagatccacaggcgtgcccgatagattttctggctctggcagcggcaccgacttcaccctgacaatttctagcctgcaagccgaggacgtggccgtgtactactgccagaacgactacacataccccttcaccttcggccagggcaccaagctggaaatcaaactcgagatccagaaccctgatcctgccgtgtaccagctgcgggatagcaagagcagcgacaagagcgtgtgtctgttcaccgacttcgacagccagaccaacgtgtcccagagcaaggactccgacgtgtacatcaccgataagtgcgtgctggacatgcggagcatggacttcaagagcaactccgccgtggcctggtccaacaagtccgatttcgcctgcgccaacgccttcaacaacagcattatccccgaggacacattcttcccaagccccgagagcagctgcggctttaccagcgagagctaccagcagggcgtgctgagcgccaccatcctgtacgagatcctgctgggcaaggccaccctgtacgccgtgctggtgtctgccctggtgctgatggctatggtcaagcggaaggacagccggggaagggccaagcgatctggatctggagcaacaaacttctcactactcaaacaagcaggtgacgtggaggagaatcccgggcctactagtatggactggatttggcgcatccttttccttgtcggcgctgctaccggcgcgcattccttcgaacaagttcagctggttcagagcggagccgaagtgaagaaacctggggcctctgtgaaggtgtcctgcaaggcttccggctataccttcaccagcttttggctgaactgggtccgacaggcccctggacaaggactggaatggatgggcaacatctaccccagcgacagctacaccgtgtacaaccagaaattcaaggaccgcgtgaccatgaccagggacaccagcacaagcacagtgtacatggaactgagcagcctgcggagcgaggataccgccgtgtattattgcgccagaacctggcggggcaacagcttcgattattggggccagggaaccaccgtgaccgtgtcatctacgcgtgacctgaagaacgtgttcccacctgaggtggccgtgttcgagcctagcgaggccgagatcagccacacccagaaagccaccctcgtgtgcctggctaccggcttctaccccgaccatgtggaactgtcttggtgggtcaacggcaaagaggtgcacagcggcgtgtgtaccgacccccagccactgaaagaacagcccgccctgaacgacagccggtactgcctgagcagcagactgagagtgtccgccaccttctggcagaacccccggaaccacttcagatgccaggtgcagttctacggcctgagcgagaacgacgagtggacccaggacagagccaagcccgtgacccagatcgtgtctgccgaagcctggggcagagccgattgcgacgtgaagctggtggaaaagagcttcgagacagacaccaacctgaacttccagaacctgagcgtgatcggcttcagaatcctgctgctgaaagtggccggctttaacctgctgatgaccctgcggctgtggtccagc

SEQ ID NO: 37701 - DNA, 2286 bp, synthetic construct
  source 1..2286: mol_type = other DNA
atggccttaccagtgaccgccttgctcctgccgctggccttgctgctccacgccgccaggccgcaagtcaaactggaagaaagcggtggcggcctggtgcaacctggcgaatctctgagactgagctgtagcgccagcggctccatcttcaaggtgttcagagtgttcgccatgagctggtacaggcaaggccctggcaagcagagagagctggtcgcctctatcagcagcggcgagacaaccacatacgccgaatctgtgaaaggccggttcaccatcagccgggataatgccaagaataccgcctatctccagatggactccctgaagcctgaagatacagctgtgtactactgcaacgccgaccataccttcaccggcgatttttggggccagggaacccaagtgaccgtgtctagtggtaccggcggaggcggatctggcggcggaggtagcggtggcggaggatctgaattcgacatcgtgatgacacagagccctgatagcctggccgtgtctctgggagagagagccaccatcaactgcaagagcagccagagcctgctgaacagcggcaacaacaagaactacgtgacatggtatcagcagaagcccggccagcctcctaagctgctgatctactggggcagcaccagatccacaggcgtgcccgatagattttctggctctggcagcggcaccgacttcaccctgacaatttctagcctgcaagccgaggacgtggccgtgtactactgccagaacgactacacataccccttcaccttcggccagggcaccaagctggaaatcaaactcgagatccagaaccctgatcctgccgtgtaccagctgcgggatagcaagagcagcgacaagagcgtgtgtctgttcaccgacttcgacagccagaccaacgtgtcccagagcaaggactccgacgtgtacatcaccgataagtgcgtgctggacatgcggagcatggacttcaagagcaactccgccgtggcctggtccaacaagtccgatttcgcctgcgccaacgccttcaacaacagcattatccccgaggacacattcttcccaagccccgagagcagctgcggctttaccagcgagagctaccagcagggcgtgctgagcgccaccatcctgtacgagatcctgctgggcaaggccaccctgtacgccgtgctggtgtctgccctggtgctgatggctatggtcaagcggaaggacagccggggaagggccaagcgatctggatctggagcaacaaacttctcactactcaaacaagcaggtgacgtggaggagaatcccgggcctactagtatggactggatttggcgcatccttttccttgtcggcgctgctaccggcgcgcattccttcgaacaagttcagctggttcagagcggagccgaagtgaagaaacctggggcctctgtgaaggtgtcctgcaaggcttccggctataccttcaccagcttttggctgaactgggtccgacaggcccctggacaaggactggaatggatgggcaacatctaccccagcgacagctacaccgtgtacaaccagaaattcaaggaccgcgtgaccatgaccagggacaccagcacaagcacagtgtacatggaactgagcagcctgcggagcgaggataccgccgtgtattattgcgccagaacctggcggggcaacagcttcgattattggggccagggaaccaccgtgaccgtgtcatctacgcgtgacctgaagaacgtgttcccacctgaggtggccgtgttcgagcctagcgaggccgagatcagccacacccagaaagccaccctcgtgtgcctggctaccggcttctaccccgaccatgtggaactgtcttggtgggtcaacggcaaagaggtgcacagcggcgtgtgtaccgacccccagccactgaaagaacagcccgccctgaacgacagccggtactgcctgagcagcagactgagagtgtccgccaccttctggcagaacccccggaaccacttcagatgccaggtgcagttctacggcctgagcgagaacgacgagtggacccaggacagagccaagcccgtgacccagatcgtgtctgccgaagcctggggcagagccgattgcgacgtgaagctggtggaaaagagcttcgagacagacaccaacctgaacttccagaacctgagcgtgatcggcttcagaatcctgctgctgaaagtggccggctttaacctgctgatgaccctgcggctgtggtccagc

SEQ ID NO: 37702 - DNA, 2292 bp, synthetic construct
  source 1..2292: mol_type = other DNA
atggccttaccagtgaccgccttgctcctgccgctggccttgctgctccacgccgccaggccggacatcgtgatgacacagagccctgatagcctggccgtgtctctgggagagagagccaccatcaactgcaagagcagccagagcctgctgaacagcggcaacaacaagaactacgtgacatggtatcagcagaagcccggccagcctcctaagctgctgatctactggggcagcaccagatccacaggcgtgcccgatagattttctggctctggcagcggcaccgacttcaccctgacaatttctagcctgcaagccgaggacgtggccgtgtactactgccagaacgactacacataccccttcaccttcggccagggcaccaagctggaaatcaaactcgaggacctgaagaacgtgttcccacctgaggtggccgtgttcgagcctagcgaggccgagatcagccacacccagaaagccaccctcgtgtgcctggctaccggcttctaccccgaccatgtggaactgtcttggtgggtcaacggcaaagaggtgcacagcggcgtgtgtaccgacccccagccactgaaagaacagcccgccctgaacgacagccggtactgcctgagcagcagactgagagtgtccgccaccttctggcagaacccccggaaccacttcagatgccaggtgcagttctacggcctgagcgagaacgacgagtggacccaggacagagccaagcccgtgacccagatcgtgtctgccgaagcctggggcagagccgattgcgacgtgaagctggtggaaaagagcttcgagacagacaccaacctgaacttccagaacctgagcgtgatcggcttcagaatcctgctgctgaaagtggccggctttaacctgctgatgaccctgcggctgtggtccagcagggccaagcgatctggatctggagcaacaaacttctcactactcaaacaagcaggtgacgtggaggagaatcccgggcctactagtgccaccatggactggatttggcgcatccttttccttgtcggcgctgctaccggcgcccattccgggcccgaagtgcagctggttgaatctggcggaggactggttcaggctggcggatctctgagactgtcttgtgccgccagcggcagaacctttagcatgggctggtttagacaggcccctggcaaagagagagagttcgtcgccgccatcacatactctggcggcagcccttactacgccgactctgtgaagggcagattcaccatcagccgggacaacgccaagaacaccgtgtacctccagatgaacagcctgaagcctgaggacaccgccgtgtactactgcgccgccaatccaacatacggcagcgactggaacgccgagaattggggccagggaacccaagtgacagtgtctagcggatccggcggcggaggatctggcggaggcggatctgggggcggaggctctttcgaacaagttcagctggttcagagcggagccgaagtgaagaaacctggggcctctgtgaaggtgtcctgcaaggcttccggctataccttcaccagcttttggctgaactgggtccgacaggcccctggacaaggactggaatggatgggcaacatctaccccagcgacagctacaccgtgtacaaccagaaattcaaggaccgcgtgaccatgaccagggacaccagcacaagcacagtgtacatggaactgagcagcctgcggagcgaggataccgccgtgtattattgcgccagaacctggcggggcaacagcttcgattattggggccagggaaccaccgtgaccgtgtcatctacgcgtatccagaaccctgatcctgccgtgtaccagctgcgggatagcaagagcagcgacaagagcgtgtgtctgttcaccgacttcgacagccagaccaacgtgtcccagagcaaggactccgacgtgtacatcaccgataagtgcgtgctggacatgcggagcatggacttcaagagcaactccgccgtggcctggtccaacaagtccgatttcgcctgcgccaacgccttcaacaacagcattatccccgaggacacattcttcccaagccccgagagcagctgcggctttaccagcgagagctaccagcagggcgtgctgagcgccaccatcctgtacgagatcctgctgggcaaggccaccctgtacgccgtgctggtgtctgccctggtgctgatggctatggtcaagcggaaggacagccggggataa

SEQ ID NO: 37703 - DNA, 2295 bp, synthetic construct
  source 1..2295: mol_type = other DNA
atggccttaccagtgaccgccttgctcctgccgctggccttgctgctccacgccgccaggccggacatcgtgatgacacagagccctgatagcctggccgtgtctctgggagagagagccaccatcaactgcaagagcagccagagcctgctgaacagcggcaacaacaagaactacgtgacatggtatcagcagaagcccggccagcctcctaagctgctgatctactggggcagcaccagatccacaggcgtgcccgatagattttctggctctggcagcggcaccgacttcaccctgacaatttctagcctgcaagccgaggacgtggccgtgtactactgccagaacgactacacataccccttcaccttcggccagggcaccaagctggaaatcaaactcgaggacctgaagaacgtgttcccacctgaggtggccgtgttcgagcctagcgaggccgagatcagccacacccagaaagccaccctcgtgtgcctggctaccggcttctaccccgaccatgtggaactgtcttggtgggtcaacggcaaagaggtgcacagcggcgtgtgtaccgacccccagccactgaaagaacagcccgccctgaacgacagccggtactgcctgagcagcagactgagagtgtccgccaccttctggcagaacccccggaaccacttcagatgccaggtgcagttctacggcctgagcgagaacgacgagtggacccaggacagagccaagcccgtgacccagatcgtgtctgccgaagcctggggcagagccgattgcgacgtgaagctggtggaaaagagcttcgagacagacaccaacctgaacttccagaacctgagcgtgatcggcttcagaatcctgctgctgaaagtggccggctttaacctgctgatgaccctgcggctgtggtccagcagggccaagcgatctggatctggagcaacaaacttctcactactcaaacaagcaggtgacgtggaggagaatcccgggcctactagtgccaccatggactggatttggcgcatccttttccttgtcggcgctgctaccggcgcccattccgggcccgaagtgcaactggtggaatctgggggcggactggtgcagccaggcggaagtctgaggctgtcttgtgccgcctccggcagcatcttcggcttcaacgacatggcctggtatcggcaggctcccggaaaacagcgcgagctggtggctctgattagcagagtgggcgtgaccagcagcgccgactctgtgaagggcagattcacaatctccagagtgaacgccaaggatacagtgtacctccagatgaactctctgaaacctgaggatacagcagtgtactattgctacatggaccagcggctggacggcagcacactggcctactggggacagggaactcaagtgacagtgtctagcggatccggcggcggaggatctggcggaggcggatctgggggcggaggctctttcgaacaagttcagctggttcagagcggagccgaagtgaagaaacctggggcctctgtgaaggtgtcctgcaaggcttccggctataccttcaccagcttttggctgaactgggtccgacaggcccctggacaaggactggaatggatgggcaacatctaccccagcgacagctacaccgtgtacaaccagaaattcaaggaccgcgtgaccatgaccagggacaccagcacaagcacagtgtacatggaactgagcagcctgcggagcgaggataccgccgtgtattattgcgccagaacctggcggggcaacagcttcgattattggggccagggaaccaccgtgaccgtgtcatctacgcgtatccagaaccctgatcctgccgtgtaccagctgcgggatagcaagagcagcgacaagagcgtgtgtctgttcaccgacttcgacagccagaccaacgtgtcccagagcaaggactccgacgtgtacatcaccgataagtgcgtgctggacatgcggagcatggacttcaagagcaactccgccgtggcctggtccaacaagtccgatttcgcctgcgccaacgccttcaacaacagcattatccccgaggacacattcttcccaagccccgagagcagctgcggctttaccagcgagagctaccagcagggcgtgctgagcgccaccatcctgtacgagatcctgctgggcaaggccaccctgtacgccgtgctggtgtctgccctggtgctgatggctatggtcaagcggaaggacagccggggataa

SEQ ID NO: 37704 - DNA, 2283 bp, synthetic construct
  source 1..2283: mol_type = other DNA
atggccttaccagtgaccgccttgctcctgccgctggccttgctgctccacgccgccaggccggacatcgtgatgacacagagccctgatagcctggccgtgtctctgggagagagagccaccatcaactgcaagagcagccagagcctgctgaacagcggcaacaacaagaactacgtgacatggtatcagcagaagcccggccagcctcctaagctgctgatctactggggcagcaccagatccacaggcgtgcccgatagattttctggctctggcagcggcaccgacttcaccctgacaatttctagcctgcaagccgaggacgtggccgtgtactactgccagaacgactacacataccccttcaccttcggccagggcaccaagctggaaatcaaactcgaggacctgaagaacgtgttcccacctgaggtggccgtgttcgagcctagcgaggccgagatcagccacacccagaaagccaccctcgtgtgcctggctaccggcttctaccccgaccatgtggaactgtcttggtgggtcaacggcaaagaggtgcacagcggcgtgtgtaccgacccccagccactgaaagaacagcccgccctgaacgacagccggtactgcctgagcagcagactgagagtgtccgccaccttctggcagaacccccggaaccacttcagatgccaggtgcagttctacggcctgagcgagaacgacgagtggacccaggacagagccaagcccgtgacccagatcgtgtctgccgaagcctggggcagagccgattgcgacgtgaagctggtggaaaagagcttcgagacagacaccaacctgaacttccagaacctgagcgtgatcggcttcagaatcctgctgctgaaagtggccggctttaacctgctgatgaccctgcggctgtggtccagcagggccaagcgatctggatctggagcaacaaacttctcactactcaaacaagcaggtgacgtggaggagaatcccgggcctactagtgccaccatggactggatttggcgcatccttttccttgtcggcgctgctaccggcgcccattccgggcccgaggtgcagctggttgaatctggcggaggactggttcaggctggcggatctctgagactgtcttgtgccgccagcggctctgtgttcagcggcaatgtgatgggctggtacagacaggcccctggcaaagaaagagagtgggttgccgccattgccagcggcggcagcatctactacagagactctgtgaagggcagattcaccatcagccgggacaacgccaagaacaccgtgtacctccagatgaacagcctgaagcctgaggacaccgccgtgtactactgcaactctcaccctcctacactgccctattggggcctgggaacccaagtgacagtgtcctctggatccggcggcggaggatctggcggaggcggatctgggggcggaggctctttcgaacaagttcagctggttcagagcggagccgaagtgaagaaacctggggcctctgtgaaggtgtcctgcaaggcttccggctataccttcaccagcttttggctgaactgggtccgacaggcccctggacaaggactggaatggatgggcaacatctaccccagcgacagctacaccgtgtacaaccagaaattcaaggaccgcgtgaccatgaccagggacaccagcacaagcacagtgtacatggaactgagcagcctgcggagcgaggataccgccgtgtattattgcgccagaacctggcggggcaacagcttcgattattggggccagggaaccaccgtgaccgtgtcatctacgcgtatccagaaccctgatcctgccgtgtaccagctgcgggatagcaagagcagcgacaagagcgtgtgtctgttcaccgacttcgacagccagaccaacgtgtcccagagcaaggactccgacgtgtacatcaccgataagtgcgtgctggacatgcggagcatggacttcaagagcaactccgccgtggcctggtccaacaagtccgatttcgcctgcgccaacgccttcaacaacagcattatccccgaggacacattcttcccaagccccgagagcagctgcggctttaccagcgagagctaccagcagggcgtgctgagcgccaccatcctgtacgagatcctgctgggcaaggccaccctgtacgccgtgctggtgtctgccctggtgctgatggctatggtcaagcggaaggacagccggggataa

SEQ ID NO: 37705 - DNA, 2277 bp, synthetic construct
  source 1..2277: mol_type = other DNA
atggccttaccagtgaccgccttgctcctgccgctggccttgctgctccacgccgccaggccggacatcgtgatgacacagagccctgatagcctggccgtgtctctgggagagagagccaccatcaactgcaagagcagccagagcctgctgaacagcggcaacaacaagaactacgtgacatggtatcagcagaagcccggccagcctcctaagctgctgatctactggggcagcaccagatccacaggcgtgcccgatagattttctggctctggcagcggcaccgacttcaccctgacaatttctagcctgcaagccgaggacgtggccgtgtactactgccagaacgactacacataccccttcaccttcggccagggcaccaagctggaaatcaaactcgaggacctgaagaacgtgttcccacctgaggtggccgtgttcgagcctagcgaggccgagatcagccacacccagaaagccaccctcgtgtgcctggctaccggcttctaccccgaccatgtggaactgtcttggtgggtcaacggcaaagaggtgcacagcggcgtgtgtaccgacccccagccactgaaagaacagcccgccctgaacgacagccggtactgcctgagcagcagactgagagtgtccgccaccttctggcagaacccccggaaccacttcagatgccaggtgcagttctacggcctgagcgagaacgacgagtggacccaggacagagccaagcccgtgacccagatcgtgtctgccgaagcctggggcagagccgattgcgacgtgaagctggtggaaaagagcttcgagacagacaccaacctgaacttccagaacctgagcgtgatcggcttcagaatcctgctgctgaaagtggccggctttaacctgctgatgaccctgcggctgtggtccagcagggccaagcgatctggatctggagcaacaaacttctcactactcaaacaagcaggtgacgtggaggagaatcccgggcctactagtgccaccatggactggatttggcgcatccttttccttgtcggcgctgctaccggcgcccattccgggcccgaagttcagctgctggaatctggcggaggactcgttcaacctggcggctctctgagactgagctgtgccgcttctggcttcagcttctctagctacgccctgagctgggttcgacaagctcccggaaagggccttgaatgggtgtccagcatcggcgagaatgacggcaccacagactatgccgatgccgtgaaaggccggtttaccatcagcagagacaattccaagaacacgctctatctgcaaatgaactccctgcgcgtggaagatacagccgtgtattattgcgtgaaggacggcatccactggggacagggaaccctggttacagtgtctagcggatccggcggcggaggatctggcggaggcggatctgggggcggaggctctttcgaacaagttcagctggttcagagcggagccgaagtgaagaaacctggggcctctgtgaaggtgtcctgcaaggcttccggctataccttcaccagcttttggctgaactgggtccgacaggcccctggacaaggactggaatggatgggcaacatctaccccagcgacagctacaccgtgtacaaccagaaattcaaggaccgcgtgaccatgaccagggacaccagcacaagcacagtgtacatggaactgagcagcctgcggagcgaggataccgccgtgtattattgcgccagaacctggcggggcaacagcttcgattattggggccagggaaccaccgtgaccgtgtcatctacgcgtatccagaaccctgatcctgccgtgtaccagctgcgggatagcaagagcagcgacaagagcgtgtgtctgttcaccgacttcgacagccagaccaacgtgtcccagagcaaggactccgacgtgtacatcaccgataagtgcgtgctggacatgcggagcatggacttcaagagcaactccgccgtggcctggtccaacaagtccgatttcgcctgcgccaacgccttcaacaacagcattatccccgaggacacattcttcccaagccccgagagcagctgcggctttaccagcgagagctaccagcagggcgtgctgagcgccaccatcctgtacgagatcctgctgggcaaggccaccctgtacgccgtgctggtgtctgccctggtgctgatggctatggtcaagcggaaggacagccggggataa

SEQ ID NO: 37706 - DNA, 3384 bp, synthetic construct
  source 1..3384: mol_type = other DNA
atgggacccagactgctgttttgggctctgctgtgtctgctcggcacaggacctgttgaagctggcgtgacacagagccccacacacctgattaagaccagaggccagcaggccacactgagatgcagccctatcagcggccacaccagcgtgtactggtatcagcaggctctcggactgggcctccagttcctgctttggtacgacgagggcgaagagagaaaccggggcaacttccctcctcggttttccggcagacagttccccaactacagcagcgagctgaacgtgaacgccctggaactggaagatagcgccctgtacctgtgtgcctcttctcttggtggacctcgcggactggctggactgagaggggatgagcagtttttcggccctggcaccagactgaccgtgctggaaggtaccggcggaggcggatctggcggcggagaattcgacatcgtgatgacacagagccctgatagcctggccgtgtctctgggagagagagccaccatcaactgcaagagcagccagagcctgctgaacagcggcaacaacaagaactacgtgacatggtatcagcagaagcccggccagcctcctaagctgctgatctactggggcagcaccagatccacaggcgtgcccgatagattttctggctctggcagcggcaccgacttcaccctgacaatttctagcctgcaagccgaggacgtggccgtgtactactgccagaacgactacacataccccttcaccttcggccagggcaccaagctggaaatcaaactcgaggacctgaagaacgtgttcccacctgaggtggccgtgttcgagcctagcgaggccgagatcagccacacccagaaagccaccctcgtgtgcctggctaccggcttctaccccgaccatgtggaactgtcttggtgggtcaacggcaaagaggtgcacagcggcgtgtgtaccgacccccagccactgaaagaacagcccgccctgaacgacagccggtactgcctgagcagcagactgagagtgtccgccaccttctggcagaacccccggaaccacttcagatgccaggtgcagttctacggcctgagcgagaacgacgagtggacccaggacagagccaagcccgtgacccagatcgtgtctgccgaagcctggggcagagccgattgcgacgtgaagctggtggaaaagagcttcgagacagacaccaacctgaacttccagaacctgagcgtgatcggcttcagaatcctgctgctgaaagtggccggctttaacctgctgatgaccctgcggctgtggtccagcagggccaagcgatctggatctggagcaacaaacttctcactactcaaacaagcaggtgacgtggaggagaatcccgggcctactagtgccaccatggactggatttggcgcatccttttccttgtcggcgctgctaccggcgcccattccgggcccgaagtgcagctggttgaatctggcggaggactggttcaggctggcggatctctgagactgtcttgtgccgccagcggcagaacctttagcatgggctggtttagacaggcccctggcaaagagagagagttcgtcgccgccatcacatactctggcggcagcccttactacgccgactctgtgaagggcagattcaccatcagccgggacaacgccaagaacaccgtgtacctccagatgaacagcctgaagcctgaggacaccgccgtgtactactgcgccgccaatccaacatacggcagcgactggaacgccgagaattggggccagggaacccaagtgacagtgtctagcggatccggcggcggaggatctggcggaggcggatctgggggcggaggctctttcgaacaagttcagctggttcagagcggagccgaagtgaagaaacctggggcctctgtgaaggtgtcctgcaaggcttccggctataccttcaccagcttttggctgaactgggtccgacaggcccctggacaaggactggaatggatgggcaacatctaccccagcgacagctacaccgtgtacaaccagaaattcaaggaccgcgtgaccatgaccagggacaccagcacaagcacagtgtacatggaactgagcagcctgcggagcgaggataccgccgtgtattattgcgccagaacctggcggggcaacagcttcgattattggggccagggaaccaccgtgaccgtgtcatctacgcgtatccagaaccctgatcctgccgtgtaccagctgcgggatagcaagagcagcgacaagagcgtgtgtctgttcaccgacttcgacagccagaccaacgtgtcccagagcaaggactccgacgtgtacatcaccgataagtgcgtgctggacatgcggagcatggacttcaagagcaactccgccgtggcctggtccaacaagtccgatttcgcctgcgccaacgccttcaacaacagcattatccccgaggacacattcttcccaagccccgagagcagctgcggctttaccagcgagagctaccagcagggcgtgctgagcgccaccatcctgtacgagatcctgctgggcaaggccaccctgtacgccgtgctggtgtctgccctggtgctgatggctatggtcaagcggaaggacagccggggacgcgccaagagaagcggatctggcgtgaagcagaccctgaatttcgacctgctgaagctggctggcgacgtggaatccaacccaggcccttctagaggccatatgaccgagtacaagcccacggtgcgcctcgccacccgcgacgacgtccccagggccgtacgcaccctcgccgccgcgttcgccgactaccccgccacgcgccacaccgtcgatccggaccgccacatcgagcgggtcaccgagctgcaagaactcttcctcacgcgcgtcgggctcgacatcggcaaggtgtgggtcgcggacgacggcgccgcggtggcggtctggaccacgccggagagcgtcgaagcgggggcggtgttcgccgagatcggcccgcgcatggccgagttgagcggttcccggctggccgcgcagcaacagatggaaggcctcctggcgccgcaccggcccaaggagcccgcgtggttcctggccaccgtcggcgtctcgcccgaccaccagggcaagggtctgggcagcgccgtcgtgctccccggagtggaggcggccgagcgcgccggggtgcccgccttcctggagacctccgcgccccgcaacctccccttctacgagcggctcggcttcaccgtcaccgccgacgtcgaggtgcccgaaggaccgcgcacctggtgcatgacccgcaagcccggtgcctga

SEQ ID NO: 37707 - DNA, 3381 bp, synthetic construct
  source 1..3381: mol_type = other DNA
atgggacccagactgctgttttgggctctgctgtgtctgctcggcacaggacctgttgaagctggcgtgacacagagccccacacacctgattaagaccagaggccagcaggccacactgagatgcagccctatcagcggccacaccagcgtgtactggtatcagcaggctctcggactgggcctccagttcctgctttggtacgacgagggcgaagagagaaaccggggcaacttccctcctcggttttccggcagacagttccccaactacagcagcgagctgaacgtgaacgccctggaactggaagatagcgccctgtacctgtgtgccagctctctcggcggagatgaactgggagccgatggcaacgagcagttctttggccctggcaccagactgaccgtgctggaaggtaccggcggaggcggatctggcggcggaagcgaattcgacatcgtgatgacacagagccctgatagcctggccgtgtctctgggagagagagccaccatcaactgcaagagcagccagagcctgctgaacagcggcaacaacaagaactacgtgacatggtatcagcagaagcccggccagcctcctaagctgctgatctactggggcagcaccagatccacaggcgtgcccgatagattttctggctctggcagcggcaccgacttcaccctgacaatttctagcctgcaagccgaggacgtggccgtgtactactgccagaacgactacacataccccttcaccttcggccagggcaccaagctggaaatcaaactcgaggacctgaagaacgtgttcccacctgaggtggccgtgttcgagcctagcgaggccgagatcagccacacccagaaagccaccctcgtgtgcctggctaccggcttctaccccgaccatgtggaactgtcttggtgggtcaacggcaaagaggtgcacagcggcgtgtgtaccgacccccagccactgaaagaacagcccgccctgaacgacagccggtactgcctgagcagcagactgagagtgtccgccaccttctggcagaacccccggaaccacttcagatgccaggtgcagttctacggcctgagcgagaacgacgagtggacccaggacagagccaagcccgtgacccagatcgtgtctgccgaagcctggggcagagccgattgcgacgtgaagctggtggaaaagagcttcgagacagacaccaacctgaacttccagaacctgagcgtgatcggcttcagaatcctgctgctgaaagtggccggctttaacctgctgatgaccctgcggctgtggtccagcagggccaagcgatctggatctggagcaacaaacttctcactactcaaacaagcaggtgacgtggaggagaatcccgggcctactagtgccaccatggactggatttggcgcatccttttccttgtcggcgctgctaccggcgcccattccgggcccgaagtgcagctggttgaatctggcggaggactggttcaggctggcggatctctgagactgtcttgtgccgccagcggcagaacctttagcatgggctggtttagacaggcccctggcaaagagagagagttcgtcgccgccatcacatactctggcggcagcccttactacgccgactctgtgaagggcagattcaccatcagccgggacaacgccaagaacaccgtgtacctccagatgaacagcctgaagcctgaggacaccgccgtgtactactgcgccgccaatccaacatacggcagcgactggaacgccgagaattggggccagggaacccaagtgacagtgtctagcggatccggcggcggaggatctggcggaggcggatctgggggcggaggctctttcgaacaagttcagctggttcagagcggagccgaagtgaagaaacctggggcctctgtgaaggtgtcctgcaaggcttccggctataccttcaccagcttttggctgaactgggtccgacaggcccctggacaaggactggaatggatgggcaacatctaccccagcgacagctacaccgtgtacaaccagaaattcaaggaccgcgtgaccatgaccagggacaccagcacaagcacagtgtacatggaactgagcagcctgcggagcgaggataccgccgtgtattattgcgccagaacctggcggggcaacagcttcgattattggggccagggaaccaccgtgaccgtgtcatctacgcgtatccagaaccctgatcctgccgtgtaccagctgcgggatagcaagagcagcgacaagagcgtgtgtctgttcaccgacttcgacagccagaccaacgtgtcccagagcaaggactccgacgtgtacatcaccgataagtgcgtgctggacatgcggagcatggacttcaagagcaactccgccgtggcctggtccaacaagtccgatttcgcctgcgccaacgccttcaacaacagcattatccccgaggacacattcttcccaagccccgagagcagctgcggctttaccagcgagagctaccagcagggcgtgctgagcgccaccatcctgtacgagatcctgctgggcaaggccaccctgtacgccgtgctggtgtctgccctggtgctgatggctatggtcaagcggaaggacagccggggacgcgccaagagaagcggatctggcgtgaagcagaccctgaatttcgacctgctgaagctggctggcgacgtggaatccaacccaggcccttctagaggccatatgaccgagtacaagcccacggtgcgcctcgccacccgcgacgacgtccccagggccgtacgcaccctcgccgccgcgttcgccgactaccccgccacgcgccacaccgtcgatccggaccgccacatcgagcgggtcaccgagctgcaagaactcttcctcacgcgcgtcgggctcgacatcggcaaggtgtgggtcgcggacgacggcgccgcggtggcggtctggaccacgccggagagcgtcgaagcgggggcggtgttcgccgagatcggcccgcgcatggccgagttgagcggttcccggctggccgcgcagcaacagatggaaggcctcctggcgccgcaccggcccaaggagcccgcgtggttcctggccaccgtcggcgtctcgcccgaccaccagggcaagggtctgggcagcgccgtcgtgctccccggagtggaggcggccgagcgcgccggggtgcccgccttcctggagacctccgcgccccgcaacctccccttctacgagcggctcggcttcaccgtcaccgccgacgtcgaggtgcccgaaggaccgcgcacctggtgcatgacccgcaagcccggtgcctga

SEQ ID NO: 37708 - DNA, 2856 bp, synthetic construct
  source 1..2856: mol_type = other DNA
atggccttaccagtgaccgccttgctcctgccgctggccttgctgctccacgccgccaggccggacatcgtgatgacacagagccctgatagcctggccgtgtctctgggagagagagccaccatcaactgcaagagcagccagagcctgctgaacagcggcaacaacaagaactacgtgacatggtatcagcagaagcccggccagcctcctaagctgctgatctactggggcagcaccagatccacaggcgtgcccgatagattttctggctctggcagcggcaccgacttcaccctgacaatttctagcctgcaagccgaggacgtggccgtgtactactgccagaacgactacacataccccttcaccttcggccagggcaccaagctggaaatcaaactcgaggacctgaagaacgtgttcccacctgaggtggccgtgttcgagcctagcgaggccgagatcagccacacccagaaagccaccctcgtgtgcctggctaccggcttctaccccgaccatgtggaactgtcttggtgggtcaacggcaaagaggtgcacagcggcgtgtgtaccgacccccagccactgaaagaacagcccgccctgaacgacagccggtactgcctgagcagcagactgagagtgtccgccaccttctggcagaacccccggaaccacttcagatgccaggtgcagttctacggcctgagcgagaacgacgagtggacccaggacagagccaagcccgtgacccagatcgtgtctgccgaagcctggggcagagccgattgcgacgtgaagctggtggaaaagagcttcgagacagacaccaacctgaacttccagaacctgagcgtgatcggcttcagaatcctgctgctgaaagtggccggctttaacctgctgatgaccctgcggctgtggtccagcagggccaagcgatctggatctggagcaacaaacttctcactactcaaacaagcaggtgacgtggaggagaatcccgggcctactagtgccaccatggactggatttggcgcatccttttccttgtcggcgctgctaccggcgcccattccgggcccatgggaagctggcttgagttctaccacagactcaacgccattgacagcaggctgtgggcacttggcggaagcgaagctgaactcgccgcttttgaaaaagaaattgccgctttcgagtccgagcttcaggcttacaaaggcaaagggaatcctgaggtcgagagcctgagagatcacgctgcccacattagagagtggttgcaggcataccggcacaatggatccggcggcggaggatctggcggaggcggatctgggggcggaggctctttcgaacaagttcagctggttcagagcggagccgaagtgaagaaacctggggcctctgtgaaggtgtcctgcaaggcttccggctataccttcaccagcttttggctgaactgggtccgacaggcccctggacaaggactggaatggatgggcaacatctaccccagcgacagctacaccgtgtacaaccagaaattcaaggaccgcgtgaccatgaccagggacaccagcacaagcacagtgtacatggaactgagcagcctgcggagcgaggataccgccgtgtattattgcgccagaacctggcggggcaacagcttcgattattggggccagggaaccaccgtgaccgtgtcatctacgcgtatccagaaccctgatcctgccgtgtaccagctgcgggatagcaagagcagcgacaagagcgtgtgtctgttcaccgacttcgacagccagaccaacgtgtcccagagcaaggactccgacgtgtacatcaccgataagtgcgtgctggacatgcggagcatggacttcaagagcaactccgccgtggcctggtccaacaagtccgatttcgcctgcgccaacgccttcaacaacagcattatccccgaggacacattcttcccaagccccgagagcagctgcggctttaccagcgagagctaccagcagggcgtgctgagcgccaccatcctgtacgagatcctgctgggcaaggccaccctgtacgccgtgctggtgtctgccctggtgctgatggctatggtcaagcggaaggacagccggggacgcgccaagagaagcggatctggcgtgaagcagaccctgaatttcgacctgctgaagctggctggcgacgtggaatccaacccaggcccttctagaggccatatgaccgagtacaagcccacggtgcgcctcgccacccgcgacgacgtccccagggccgtacgcaccctcgccgccgcgttcgccgactaccccgccacgcgccacaccgtcgatccggaccgccacatcgagcgggtcaccgagctgcaagaactcttcctcacgcgcgtcgggctcgacatcggcaaggtgtgggtcgcggacgacggcgccgcggtggcggtctggaccacgccggagagcgtcgaagcgggggcggtgttcgccgagatcggcccgcgcatggccgagttgagcggttcccggctggccgcgcagcaacagatggaaggcctcctggcgccgcaccggcccaaggagcccgcgtggttcctggccaccgtcggcgtctcgcccgaccaccagggcaagggtctgggcagcgccgtcgtgctccccggagtggaggcggccgagcgcgccggggtgcccgccttcctggagacctccgcgccccgcaacctccccttctacgagcggctcggcttcaccgtcaccgccgacgtcgaggtgcccgaaggaccgcgcacctggtgcatgacccgcaagcccggtgcctga

SEQ ID NO: 37709 - DNA, 2856 bp, synthetic construct
  source 1..2856: mol_type = other DNA
atggccttaccagtgaccgccttgctcctgccgctggccttgctgctccacgccgccaggccggcatgcatgggcagttggttcgagttctacgaccggctgaatgccatcgacgccagactgtgggctctcggaggatctgaagctgagctggccgccttcgagaaagagatcgccgcctttgagagcgagctgcaagcctacaaaggcaagggcaaccccgaggtggaaaacctgagagtgcacgccgctgccatcagagaatggctccaggcttacagacacaacggtaccggcggaggcggatctggcggcggaggtagcggtggcggaggatctgaattcgacatcgtgatgacacagagccctgatagcctggccgtgtctctgggagagagagccaccatcaactgcaagagcagccagagcctgctgaacagcggcaacaacaagaactacgtgacatggtatcagcagaagcccggccagcctcctaagctgctgatctactggggcagcaccagatccacaggcgtgcccgatagattttctggctctggcagcggcaccgacttcaccctgacaatttctagcctgcaagccgaggacgtggccgtgtactactgccagaacgactacacataccccttcaccttcggccagggcaccaagctggaaatcaaactcgaggacctgaagaacgtgttcccacctgaggtggccgtgttcgagcctagcgaggccgagatcagccacacccagaaagccaccctcgtgtgcctggctaccggcttctaccccgaccatgtggaactgtcttggtgggtcaacggcaaagaggtgcacagcggcgtgtgtaccgacccccagccactgaaagaacagcccgccctgaacgacagccggtactgcctgagcagcagactgagagtgtccgccaccttctggcagaacccccggaaccacttcagatgccaggtgcagttctacggcctgagcgagaacgacgagtggacccaggacagagccaagcccgtgacccagatcgtgtctgccgaagcctggggcagagccgattgcgacgtgaagctggtggaaaagagcttcgagacagacaccaacctgaacttccagaacctgagcgtgatcggcttcagaatcctgctgctgaaagtggccggctttaacctgctgatgaccctgcggctgtggtccagcagggccaagcgatctggatctggagcaacaaacttctcactactcaaacaagcaggtgacgtggaggagaatcccgggcctactagtatggactggatttggcgcatccttttccttgtcggcgctgctaccggcgcgcattccttcgaacaagttcagctggttcagagcggagccgaagtgaagaaacctggggcctctgtgaaggtgtcctgcaaggcttccggctataccttcaccagcttttggctgaactgggtccgacaggcccctggacaaggactggaatggatgggcaacatctaccccagcgacagctacaccgtgtacaaccagaaattcaaggaccgcgtgaccatgaccagggacaccagcacaagcacagtgtacatggaactgagcagcctgcggagcgaggataccgccgtgtattattgcgccagaacctggcggggcaacagcttcgattattggggccagggaaccaccgtgaccgtgtcatctacgcgtatccagaaccctgatcctgccgtgtaccagctgcgggatagcaagagcagcgacaagagcgtgtgtctgttcaccgacttcgacagccagaccaacgtgtcccagagcaaggactccgacgtgtacatcaccgataagtgcgtgctggacatgcggagcatggacttcaagagcaactccgccgtggcctggtccaacaagtccgatttcgcctgcgccaacgccttcaacaacagcattatccccgaggacacattcttcccaagccccgagagcagctgcggctttaccagcgagagctaccagcagggcgtgctgagcgccaccatcctgtacgagatcctgctgggcaaggccaccctgtacgccgtgctggtgtctgccctggtgctgatggctatggtcaagcggaaggacagccggggacgcgccaagagaagcggatctggcgtgaagcagaccctgaatttcgacctgctgaagctggctggcgacgtggaatccaacccaggcccttctagaggccatatgaccgagtacaagcccacggtgcgcctcgccacccgcgacgacgtccccagggccgtacgcaccctcgccgccgcgttcgccgactaccccgccacgcgccacaccgtcgatccggaccgccacatcgagcgggtcaccgagctgcaagaactcttcctcacgcgcgtcgggctcgacatcggcaaggtgtgggtcgcggacgacggcgccgcggtggcggtctggaccacgccggagagcgtcgaagcgggggcggtgttcgccgagatcggcccgcgcatggccgagttgagcggttcccggctggccgcgcagcaacagatggaaggcctcctggcgccgcaccggcccaaggagcccgcgtggttcctggccaccgtcggcgtctcgcccgaccaccagggcaagggtctgggcagcgccgtcgtgctccccggagtggaggcggccgagcgcgccggggtgcccgccttcctggagacctccgcgccccgcaacctccccttctacgagcggctcggcttcaccgtcaccgccgacgtcgaggtgcccgaaggaccgcgcacctggtgcatgacccgcaagcccggtgcctga

SEQ ID NO: 37710 - DNA, 3207 bp, synthetic construct
  source 1..3207: mol_type = other DNA
atggccttaccagtgaccgccttgctcctgccgctggccttgctgctccacgccgccaggccggcatgcatggaccccgacctggaaatcagagccgccttcctgcggcagagaaacacagccctgagaacagaggtggccgagctggaacaagaggtgcagcggctggaaaacgaggtgtcccagtacgagacaagatacggccctctcggaggcggaaaaggtaccggcggaggcggatctggcggcggaggtagcggtggcggaggatctgaattcgacatcgtgatgacacagagccctgatagcctggccgtgtctctgggagagagagccaccatcaactgcaagagcagccagagcctgctgaacagcggcaacaacaagaactacgtgacatggtatcagcagaagcccggccagcctcctaagctgctgatctactggggcagcaccagatccacaggcgtgcccgatagattttctggctctggcagcggcaccgacttcaccctgacaatttctagcctgcaagccgaggacgtggccgtgtactactgccagaacgactacacataccccttcaccttcggccagggcaccaagctggaaatcaaactcgaggacctgaagaacgtgttcccacctgaggtggccgtgttcgagcctagcgaggccgagatcagccacacccagaaagccaccctcgtgtgcctggctaccggcttctaccccgaccatgtggaactgtcttggtgggtcaacggcaaagaggtgcacagcggcgtgtgtaccgacccccagccactgaaagaacagcccgccctgaacgacagccggtactgcctgagcagcagactgagagtgtccgccaccttctggcagaacccccggaaccacttcagatgccaggtgcagttctacggcctgagcgagaacgacgagtggacccaggacagagccaagcccgtgacccagatcgtgtctgccgaagcctggggcagagccgattgcgacgtgaagctggtggaaaagagcttcgagacagacaccaacctgaacttccagaacctgagcgtgatcggcttcagaatcctgctgctgaaagtggccggctttaacctgctgatgaccctgcggctgtggtccagcagggccaagcgatctggatctggagcaacaaacttctcactactcaaacaagcaggtgacgtggaggagaatcccgggcctactagtgccaccatggactggatttggcgcatccttttccttgtcggcgctgctaccggcgcccattccgggcccgaagtgcagctggttgaatctggcggaggactggttcaggctggcggatctctgagactgtcttgtgccgccagcggcagaacctttagcatgggctggtttagacaggcccctggcaaagagagagagttcgtcgccgccatcacatactctggcggcagcccttactacgccgactctgtgaagggcagattcaccatcagccgggacaacgccaagaacaccgtgtacctccagatgaacagcctgaagcctgaggacaccgccgtgtactactgcgccgccaatccaacatacggcagcgactggaacgccgagaattggggccagggaacccaagtgacagtgtctagcggatccggcggcggaggatctggcggaggcggatctgggggcggaggctctttcgaacaagttcagctggttcagagcggagccgaagtgaagaaacctggggcctctgtgaaggtgtcctgcaaggcttccggctataccttcaccagcttttggctgaactgggtccgacaggcccctggacaaggactggaatggatgggcaacatctaccccagcgacagctacaccgtgtacaaccagaaattcaaggaccgcgtgaccatgaccagggacaccagcacaagcacagtgtacatggaactgagcagcctgcggagcgaggataccgccgtgtattattgcgccagaacctggcggggcaacagcttcgattattggggccagggaaccaccgtgaccgtgtcatctacgcgtatccagaaccctgatcctgccgtgtaccagctgcgggatagcaagagcagcgacaagagcgtgtgtctgttcaccgacttcgacagccagaccaacgtgtcccagagcaaggactccgacgtgtacatcaccgataagtgcgtgctggacatgcggagcatggacttcaagagcaactccgccgtggcctggtccaacaagtccgatttcgcctgcgccaacgccttcaacaacagcattatccccgaggacacattcttcccaagccccgagagcagctgcggctttaccagcgagagctaccagcagggcgtgctgagcgccaccatcctgtacgagatcctgctgggcaaggccaccctgtacgccgtgctggtgtctgccctggtgctgatggctatggtcaagcggaaggacagccggggacgcgccaagagaagcggatctggcgtgaagcagaccctgaatttcgacctgctgaagctggctggcgacgtggaatccaacccaggcccttctagaggccatatgaccgagtacaagcccacggtgcgcctcgccacccgcgacgacgtccccagggccgtacgcaccctcgccgccgcgttcgccgactaccccgccacgcgccacaccgtcgatccggaccgccacatcgagcgggtcaccgagctgcaagaactcttcctcacgcgcgtcgggctcgacatcggcaaggtgtgggtcgcggacgacggcgccgcggtggcggtctggaccacgccggagagcgtcgaagcgggggcggtgttcgccgagatcggcccgcgcatggccgagttgagcggttcccggctggccgcgcagcaacagatggaaggcctcctggcgccgcaccggcccaaggagcccgcgtggttcctggccaccgtcggcgtctcgcccgaccaccagggcaagggtctgggcagcgccgtcgtgctccccggagtggaggcggccgagcgcgccggggtgcccgccttcctggagacctccgcgccccgcaacctccccttctacgagcggctcggcttcaccgtcaccgccgacgtcgaggtgcccgaaggaccgcgcacctggtgcatgacccgcaagcccggtgcctga

SEQ ID NO: 37711 - DNA, 2856 bp, synthetic construct
  source 1..2856: mol_type = other DNA
atggccttaccagtgaccgccttgctcctgccgctggccttgctgctccacgccgccaggccggacatcgtgatgacacagagccctgatagcctggccgtgtctctgggagagagagccaccatcaactgcaagagcagccagagcctgctgaacagcggcaacaacaagaactacgtgacatggtatcagcagaagcccggccagcctcctaagctgctgatctactggggcagcaccagatccacaggcgtgcccgatagattttctggctctggcagcggcaccgacttcaccctgacaatttctagcctgcaagccgaggacgtggccgtgtactactgccagaacgactacacataccccttcaccttcggccagggcaccaagctggaaatcaaactcgaggacctgaagaacgtgttcccacctgaggtggccgtgttcgagcctagcgaggccgagatcagccacacccagaaagccaccctcgtgtgcctggctaccggcttctaccccgaccatgtggaactgtcttggtgggtcaacggcaaagaggtgcacagcggcgtgtgtaccgacccccagccactgaaagaacagcccgccctgaacgacagccggtactgcctgagcagcagactgagagtgtccgccaccttctggcagaacccccggaaccacttcagatgccaggtgcagttctacggcctgagcgagaacgacgagtggacccaggacagagccaagcccgtgacccagatcgtgtctgccgaagcctggggcagagccgattgcgacgtgaagctggtggaaaagagcttcgagacagacaccaacctgaacttccagaacctgagcgtgatcggcttcagaatcctgctgctgaaagtggccggctttaacctgctgatgaccctgcggctgtggtccagcagggccaagcgatctggatctggagcaacaaacttctcactactcaaacaagcaggtgacgtggaggagaatcccgggcctactagtgccaccatggactggatttggcgcatccttttccttgtcggcgctgctaccggcgcccattccgggcccatgggatcttggagcgagttttacgatcggctgcacgccattcaccaccggctgtatgctctcggaggaagcgaagctgagctggccgcttttgaaaaagaaattgccgctttcgagtccgagcttcaggcttacaaaggcaaagggaatcctgaggtcgaggccctgagagataccgccgccttcatcagaacccggttgcaggcataccggcacaacggatccggcggcggaggatctggcggaggcggatctgggggcggaggctctttcgaacaagttcagctggttcagagcggagccgaagtgaagaaacctggggcctctgtgaaggtgtcctgcaaggcttccggctataccttcaccagcttttggctgaactgggtccgacaggcccctggacaaggactggaatggatgggcaacatctaccccagcgacagctacaccgtgtacaaccagaaattcaaggaccgcgtgaccatgaccagggacaccagcacaagcacagtgtacatggaactgagcagcctgcggagcgaggataccgccgtgtattattgcgccagaacctggcggggcaacagcttcgattattggggccagggaaccaccgtgaccgtgtcatctacgcgtatccagaaccctgatcctgccgtgtaccagctgcgggatagcaagagcagcgacaagagcgtgtgtctgttcaccgacttcgacagccagaccaacgtgtcccagagcaaggactccgacgtgtacatcaccgataagtgcgtgctggacatgcggagcatggacttcaagagcaactccgccgtggcctggtccaacaagtccgatttcgcctgcgccaacgccttcaacaacagcattatccccgaggacacattcttcccaagccccgagagcagctgcggctttaccagcgagagctaccagcagggcgtgctgagcgccaccatcctgtacgagatcctgctgggcaaggccaccctgtacgccgtgctggtgtctgccctggtgctgatggctatggtcaagcggaaggacagccggggacgcgccaagagaagcggatctggcgtgaagcagaccctgaatttcgacctgctgaagctggctggcgacgtggaatccaacccaggcccttctagaggccatatgaccgagtacaagcccacggtgcgcctcgccacccgcgacgacgtccccagggccgtacgcaccctcgccgccgcgttcgccgactaccccgccacgcgccacaccgtcgatccggaccgccacatcgagcgggtcaccgagctgcaagaactcttcctcacgcgcgtcgggctcgacatcggcaaggtgtgggtcgcggacgacggcgccgcggtggcggtctggaccacgccggagagcgtcgaagcgggggcggtgttcgccgagatcggcccgcgcatggccgagttgagcggttcccggctggccgcgcagcaacagatggaaggcctcctggcgccgcaccggcccaaggagcccgcgtggttcctggccaccgtcggcgtctcgcccgaccaccagggcaagggtctgggcagcgccgtcgtgctccccggagtggaggcggccgagcgcgccggggtgcccgccttcctggagacctccgcgccccgcaacctccccttctacgagcggctcggcttcaccgtcaccgccgacgtcgaggtgcccgaaggaccgcgcacctggtgcatgacccgcaagcccggtgcctga

SEQ ID NO: 37712 - DNA, 3486 bp, synthetic construct
  source 1..3486: mol_type = other DNA
atggccttaccagtgaccgccttgctcctgccgctggccttgctgctccacgccgccaggccggacatcgtgatgacacagagccctgatagcctggccgtgtctctgggagagagagccaccatcaactgcaagagcagccagagcctgctgaacagcggcaacaacaagaactacgtgacatggtatcagcagaagcccggccagcctcctaagctgctgatctactggggcagcaccagatccacaggcgtgcccgatagattttctggctctggcagcggcaccgacttcaccctgacaatttctagcctgcaagccgaggacgtggccgtgtactactgccagaacgactacacataccccttcaccttcggccagggcaccaagctggaaatcaaactcgaggacctgaagaacgtgttcccacctgaggtggccgtgttcgagcctagcgaggccgagatcagccacacccagaaagccaccctcgtgtgcctggctaccggcttctaccccgaccatgtggaactgtcttggtgggtcaacggcaaagaggtgcacagcggcgtgtgtaccgacccccagccactgaaagaacagcccgccctgaacgacagccggtactgcctgagcagcagactgagagtgtccgccaccttctggcagaacccccggaaccacttcagatgccaggtgcagttctacggcctgagcgagaacgacgagtggacccaggacagagccaagcccgtgacccagatcgtgtctgccgaagcctggggcagagccgattgcgacgtgaagctggtggaaaagagcttcgagacagacaccaacctgaacttccagaacctgagcgtgatcggcttcagaatcctgctgctgaaagtggccggctttaacctgctgatgaccctgcggctgtggtccagcagggccaagcgatctggatctggagcaacaaacttctcactactcaaacaagcaggtgacgtggaggagaatcccgggcctactagtaccatggactggatttggcgcatccttttccttgtcggcgctgctaccggcgcccattccctgttcaatcaagaggtgcagatccctctgaccgagagctactgtggcccctgtcctaagaactggatctgctacaagaacaactgctaccagttcttcgacgagagcaagaattggtacgagagccaggccagctgcatgagccagaatgccagcctgctgaaggtgtacagcaaagaggaccaggacctgctgaaactggtcaagagcgcccactggatgggccttgtgcacatccccaccaatggctcttggcagtgggaggacggcagcattctgagccctaacctgctgaccatcatcgagatgcagaagggcgactgcgccctgtacgccagcagctttaagggctacatcgagaattgcagcaccccgaacacctacatctgtatgcagagaaccgtttctggcggaggcggctctggaggaggcggaagtggcggcggaggcgacctctttaatcaagaagtccagattccactcaccgaatcctactgcggaccttgtccaaaaaattggatttgttataagaacaactgttatcaattctttgatgagtctaaaaattggtatgagtcccaggcttcctgcatgtctcagaacgcttctctgctgaaagtctactctaaagaagatcaggatctcctgaagctcgtcaagtctgcccattggatggggctcgtccacattcctaccaacggaagctggcaatgggaagatggctccatcctgtctccaaatctgctcacgattattgaaatgcagaaaggggattgtgctctctacgccagctccttcaagggatatattgagaactgtagcacgcccaatacttatatctgtatgcaacggaccgtgggatccggcggcggaggatctggcggaggcggatctgggggcggaggctctttcgaacaagttcagctggttcagagcggagccgaagtgaagaaacctggggcctctgtgaaggtgtcctgcaaggcttccggctataccttcaccagcttttggctgaactgggtccgacaggcccctggacaaggactggaatggatgggcaacatctaccccagcgacagctacaccgtgtacaaccagaaattcaaggaccgcgtgaccatgaccagggacaccagcacaagcacagtgtacatggaactgagcagcctgcggagcgaggataccgccgtgtattattgcgccagaacctggcggggcaacagcttcgattattggggccagggaaccaccgtgaccgtgtcatctacgcgtatccagaaccctgatcctgccgtgtaccagctgcgggatagcaagagcagcgacaagagcgtgtgtctgttcaccgacttcgacagccagaccaacgtgtcccagagcaaggactccgacgtgtacatcaccgataagtgcgtgctggacatgcggagcatggacttcaagagcaactccgccgtggcctggtccaacaagtccgatttcgcctgcgccaacgccttcaacaacagcattatccccgaggacacattcttcccaagccccgagagcagctgcggctttaccagcgagagctaccagcagggcgtgctgagcgccaccatcctgtacgagatcctgctgggcaaggccaccctgtacgccgtgctggtgtctgccctggtgctgatggctatggtcaagcggaaggacagccggggacgcgccaagagaagcggatctggcgtgaagcagaccctgaatttcgacctgctgaagctggctggcgacgtggaatccaacccaggcccttctagaggccatatgaccgagtacaagcccacggtgcgcctcgccacccgcgacgacgtccccagggccgtacgcaccctcgccgccgcgttcgccgactaccccgccacgcgccacaccgtcgatccggaccgccacatcgagcgggtcaccgagctgcaagaactcttcctcacgcgcgtcgggctcgacatcggcaaggtgtgggtcgcggacgacggcgccgcggtggcggtctggaccacgccggagagcgtcgaagcgggggcggtgttcgccgagatcggcccgcgcatggccgagttgagcggttcccggctggccgcgcagcaacagatggaaggcctcctggcgccgcaccggcccaaggagcccgcgtggttcctggccaccgtcggcgtctcgcccgaccaccagggcaagggtctgggcagcgccgtcgtgctccccggagtggaggcggccgagcgcgccggggtgcccgccttcctggagacctccgcgccccgcaacctccccttctacgagcggctcggcttcaccgtcaccgccgacgtcgaggtgcccgaaggaccgcgcacctggtgcatgacccgcaagcccggtgcctga

SEQ ID NO: 37713 - DNA, 1872 bp, synthetic construct
  source 1..1872: mol_type = other DNA
atggccttaccagtgaccgccttgctcctgccgctggccttgctgctccacgccgccaggccggacatcgtgatgacacagagccctgatagcctggccgtgtctctgggagagagagccaccatcaactgcaagagcagccagagcctgctgaacagcggcaacaacaagaactacgtgacatggtatcagcagaagcccggccagcctcctaagctgctgatctactggggcagcaccagatccacaggcgtgcccgatagattttctggctctggcagcggcaccgacttcaccctgacaatttctagcctgcaagccgaggacgtggccgtgtactactgccagaacgactacacataccccttcaccttcggccagggcaccaagctggaaatcaaactcgaggacctgaagaacgtgttcccacctgaggtggccgtgttcgagcctagcgaggccgagatcagccacacccagaaagccaccctcgtgtgcctggctaccggcttctaccccgaccatgtggaactgtcttggtgggtcaacggcaaagaggtgcacagcggcgtgtgtaccgacccccagccactgaaagaacagcccgccctgaacgacagccggtactgcctgagcagcagactgagagtgtccgccaccttctggcagaacccccggaaccacttcagatgccaggtgcagttctacggcctgagcgagaacgacgagtggacccaggacagagccaagcccgtgacccagatcgtgtctgccgaagcctggggcagagccgattgcggctttaccagcgagagctaccagcagggcgtgctgagcgccaccaacctgagcgtgatcggcttcagaatcctgctgctgaaagtggccggctttaacctgctgatgaccctgcggctgtggtccagcagggccaagcgatctggatctggagcaacaaacttctcactactcaaacaagcaggtgacgtggaggagaatcccgggcctactagtatggactggatttggcgcatccttttccttgtcggcgctgctaccggcgcgcattccttcgaacaagttcagctggttcagagcggagccgaagtgaagaaacctggggcctctgtgaaggtgtcctgcaaggcttccggctataccttcaccagcttttggctgaactgggtccgacaggcccctggacaaggactggaatggatgggcaacatctaccccagcgacagctacaccgtgtacaaccagaaattcaaggaccgcgtgaccatgaccagggacaccagcacaagcacagtgtacatggaactgagcagcctgcggagcgaggataccgccgtgtattattgcgccagaacctggcggggcaacagcttcgattattggggccagggaaccaccgtgaccgtgtcatctacgcgtatccagaaccctgatcctgccgtgtaccagctgcgggatagcaagagcagcgacaagagcgtgtgtctgttcaccgacttcgacagccagaccaacgtgtcccagagcaaggactccgacgtgtacatcaccgataagtgcgtgctggacatgcggagcatggacttcaagagcaactccgccgtggcctggtccaacaagtccgatttcgcctgcgccaacgccttcaacaacagcattatccccgaggacacattcttcccaagccccgagagcagctgcgacgtgaagctggtggaaaagagcttcgagacagacaccaacctgaacttccagatcctgtacgagatcctgctgggcaaggccaccctgtacgccgtgctggtgtctgccctggtgctgatggctatggtcaagcggaaggacagccgggga

SEQ ID NO: 37714 - DNA, 1884 bp, synthetic construct
  source 1..1884: mol_type = other DNA
atggccttaccagtgaccgccttgctcctgccgctggccttgctgctccacgccgccaggccggacatcgtgatgacacagagccctgatagcctggccgtgtctctgggagagagagccaccatcaactgcaagagcagccagagcctgctgaacagcggcaacaacaagaactacgtgacatggtatcagcagaagcccggccagcctcctaagctgctgatctactggggcagcaccagatccacaggcgtgcccgatagattttctggctctggcagcggcaccgacttcaccctgacaatttctagcctgcaagccgaggacgtggccgtgtactactgccagaacgactacacataccccttcaccttcggccagggcaccaagctggaaatcaaactcgagatccagaaccctgatcctgccgtgtaccagctgcgggatagcaagagcagcgacaagagcgtgtgtctgttcaccgacttcgacagccagaccaacgtgtcccagagcaaggactccgacgtgtacatcaccgataagtgcgtgctggacatgcggagcatggacttcaagagcaactccgccgtggcctggtccaacaagtccgatttcgcctgcgccaacgccttcaacaacagcattatccccgaggacacattcttcccaagccccgagagcagctgcgacgtgaagctggtggaaaagagcttcgagacagacaccaacctgaacttccagatcctgtacgagatcctgctgggcaaggccaccctgtacgccgtgctggtgtctgccctggtgctgatggctatggtcaagcggaaggacagccggggacgcgccaagagaagcggatctggcgtgaagcagaccctgaatttcgacctgctgaagctggctggcgacgtggaatccaacccaggccctactagtatggactggatttggcgcatccttttccttgtcggcgctgctaccggcgcgcattccttcgaacaagttcagctggttcagagcggagccgaagtgaagaaacctggggcctctgtgaaggtgtcctgcaaggcttccggctataccttcaccagcttttggctgaactgggtccgacaggcccctggacaaggactggaatggatgggcaacatctaccccagcgacagctacaccgtgtacaaccagaaattcaaggaccgcgtgaccatgaccagggacaccagcacaagcacagtgtacatggaactgagcagcctgcggagcgaggataccgccgtgtattattgcgccagaacctggcggggcaacagcttcgattattggggccagggaaccaccgtgaccgtgtcatctacgcgtgaggacctgaagaacgtgttcccacctgaggtggccgtgttcgagcctagcgaggccgagatcagccacacccagaaagccaccctcgtgtgcctggctaccggcttctaccccgaccatgtggaactgtcttggtgggtcaacggcaaagaggtgcacagcggcgtgtgtaccgacccccagccactgaaagaacagcccgccctgaacgacagccggtactgcctgagcagcagactgagagtgtccgccaccttctggcagaacccccggaaccacttcagatgccaggtgcagttctacggcctgagcgagaacgacgagtggacccaggacagagccaagcccgtgacccagatcgtgtctgccgaagcctggggcagagccgattgcggctttaccagcgagagctaccagcagggcgtgctgagcgccaccaacctgagcgtgatcggcttcagaatcctgctgctgaaagtggccggctttaacctgctgatgaccctgcggctgtggtccagc

SEQ ID NO: 37715 - DNA, 2277 bp, synthetic construct
  source 1..2277: mol_type = other DNA
atggccttaccagtgaccgccttgctcctgccgctggccttgctgctccacgccgccaggccggaagtgcagctggttgaatctggcggaggactggttcagcctggcggatctctgagactgtcttgtgccgccagcggcttcagcttcagcgacttttggatgagctgggtccgacaggcccctggcaaaggacttgaatgggtcgccacaatcagccaggccggcagcgagaaggactacgtggactctgtgaagggcagattcaccatcagccgggacaacgccaagaagtccctgtacctccagatgaacagcctgagagccgaggacaccgccgtgtactattgtgcctctggcgtgtacagcttcgactacagaggccagggcaccctggtcacagtctcttctggtaccggcggaggcggatctggcggcggaggtagcggtggcggaggatctgaattcgacatcgtgatgacacagagccctgatagcctggccgtgtctctgggagagagagccaccatcaactgcaagagcagccagagcctgctgaacagcggcaacaacaagaactacgtgacatggtatcagcagaagcccggccagcctcctaagctgctgatctactggggcagcaccagatccacaggcgtgcccgatagattttctggctctggcagcggcaccgacttcaccctgacaatttctagcctgcaagccgaggacgtggccgtgtactactgccagaacgactacacataccccttcaccttcggccagggcaccaagctggaaatcaaactcgaggacctgaagaacgtgttcccacctgaggtggccgtgttcgagcctagcgaggccgagatcagccacacccagaaagccaccctcgtgtgcctggctaccggcttctaccccgaccatgtggaactgtcttggtgggtcaacggcaaagaggtgcacagcggcgtgtgtaccgacccccagccactgaaagaacagcccgccctgaacgacagccggtactgcctgagcagcagactgagagtgtccgccaccttctggcagaacccccggaaccacttcagatgccaggtgcagttctacggcctgagcgagaacgacgagtggacccaggacagagccaagcccgtgacccagatcgtgtctgccgaagcctggggcagagccgattgcggctttaccagcgagagctaccagcagggcgtgctgagcgccaccaacctgagcgtgatcggcttcagaatcctgctgctgaaagtggccggctttaacctgctgatgaccctgcggctgtggtccagcagggccaagcgatctggatctggagcaacaaacttctcactactcaaacaagcaggtgacgtggaggagaatcccgggcctactagtatggactggatttggcgcatccttttccttgtcggcgctgctaccggcgcgcattccttcgaacaagttcagctggttcagagcggagccgaagtgaagaaacctggggcctctgtgaaggtgtcctgcaaggcttccggctataccttcaccagcttttggctgaactgggtccgacaggcccctggacaaggactggaatggatgggcaacatctaccccagcgacagctacaccgtgtacaaccagaaattcaaggaccgcgtgaccatgaccagggacaccagcacaagcacagtgtacatggaactgagcagcctgcggagcgaggataccgccgtgtattattgcgccagaacctggcggggcaacagcttcgattattggggccagggaaccaccgtgaccgtgtcatctacgcgtatccagaaccctgatcctgccgtgtaccagctgcgggatagcaagagcagcgacaagagcgtgtgtctgttcaccgacttcgacagccagaccaacgtgtcccagagcaaggactccgacgtgtacatcaccgataagtgcgtgctggacatgcggagcatggacttcaagagcaactccgccgtggcctggtccaacaagtccgatttcgcctgcgccaacgccttcaacaacagcattatccccgaggacacattcttcccaagccccgagagcagctgcgacgtgaagctggtggaaaagagcttcgagacagacaccaacctgaacttccagatcctgtacgagatcctgctgggcaaggccaccctgtacgccgtgctggtgtctgccctggtgctgatggctatggtcaagcggaaggacagccgggga

SEQ ID NO: 37716 - DNA, 2289 bp, synthetic construct
  source 1..2289: mol_type = other DNA
atggccttaccagtgaccgccttgctcctgccgctggccttgctgctccacgccgccaggccggaagtgcagctggttgaatctggcggaggactggttcagcctggcggatctctgagactgtcttgtgccgccagcggcttcagcttcagcgacttttggatgagctgggtccgacaggcccctggcaaaggacttgaatgggtcgccacaatcagccaggccggcagcgagaaggactacgtggactctgtgaagggcagattcaccatcagccgggacaacgccaagaagtccctgtacctccagatgaacagcctgagagccgaggacaccgccgtgtactattgtgcctctggcgtgtacagcttcgactacagaggccagggcaccctggtcacagtctcttctggtaccggcggaggcggatctggcggcggaggtagcggtggcggaggatctgaattcgacatcgtgatgacacagagccctgatagcctggccgtgtctctgggagagagagccaccatcaactgcaagagcagccagagcctgctgaacagcggcaacaacaagaactacgtgacatggtatcagcagaagcccggccagcctcctaagctgctgatctactggggcagcaccagatccacaggcgtgcccgatagattttctggctctggcagcggcaccgacttcaccctgacaatttctagcctgcaagccgaggacgtggccgtgtactactgccagaacgactacacataccccttcaccttcggccagggcaccaagctggaaatcaaactcgagatccagaaccctgatcctgccgtgtaccagctgcgggatagcaagagcagcgacaagagcgtgtgtctgttcaccgacttcgacagccagaccaacgtgtcccagagcaaggactccgacgtgtacatcaccgataagtgcgtgctggacatgcggagcatggacttcaagagcaactccgccgtggcctggtccaacaagtccgatttcgcctgcgccaacgccttcaacaacagcattatccccgaggacacattcttcccaagccccgagagcagctgcgacgtgaagctggtggaaaagagcttcgagacagacaccaacctgaacttccagatcctgtacgagatcctgctgggcaaggccaccctgtacgccgtgctggtgtctgccctggtgctgatggctatggtcaagcggaaggacagccggggacgcgccaagagaagcggatctggcgtgaagcagaccctgaatttcgacctgctgaagctggctggcgacgtggaatccaacccaggccctactagtatggactggatttggcgcatccttttccttgtcggcgctgctaccggcgcgcattccttcgaacaagttcagctggttcagagcggagccgaagtgaagaaacctggggcctctgtgaaggtgtcctgcaaggcttccggctataccttcaccagcttttggctgaactgggtccgacaggcccctggacaaggactggaatggatgggcaacatctaccccagcgacagctacaccgtgtacaaccagaaattcaaggaccgcgtgaccatgaccagggacaccagcacaagcacagtgtacatggaactgagcagcctgcggagcgaggataccgccgtgtattattgcgccagaacctggcggggcaacagcttcgattattggggccagggaaccaccgtgaccgtgtcatctacgcgtgaggacctgaagaacgtgttcccacctgaggtggccgtgttcgagcctagcgaggccgagatcagccacacccagaaagccaccctcgtgtgcctggctaccggcttctaccccgaccatgtggaactgtcttggtgggtcaacggcaaagaggtgcacagcggcgtgtgtaccgacccccagccactgaaagaacagcccgccctgaacgacagccggtactgcctgagcagcagactgagagtgtccgccaccttctggcagaacccccggaaccacttcagatgccaggtgcagttctacggcctgagcgagaacgacgagtggacccaggacagagccaagcccgtgacccagatcgtgtctgccgaagcctggggcagagccgattgcggctttaccagcgagagctaccagcagggcgtgctgagcgccaccaacctgagcgtgatcggcttcagaatcctgctgctgaaagtggccggctttaacctgctgatgaccctgcggctgtggtccagc

SEQ ID NO: 37717 - DNA, 2688 bp, synthetic construct
  source 1..2688: mol_type = other DNA
atggccttaccagtgaccgccttgctcctgccgctggccttgctgctccacgccgccaggccggaagtgcagctggttgaatctggcggaggactggttcagcctggcggatctctgagactgtcttgtgccgccagcggcttcagcttcagcgacttttggatgagctgggtccgacaggcccctggcaaaggacttgaatgggtcgccacaatcagccaggccggcagcgagaaggactacgtggactctgtgaagggcagattcaccatcagccgggacaacgccaagaagtccctgtacctccagatgaacagcctgagagccgaggacaccgccgtgtactattgtgcctctggcgtgtacagcttcgactacagaggccagggcaccctggtcacagtctcttctggtaccggcggaggcggatctggcggcggaggtagcggtggcggaggatctgaattcgacatcgtgatgacacagagccctgatagcctggccgtgtctctgggagagagagccaccatcaactgcaagagcagccagagcctgctgaacagcggcaacaacaagaactacgtgacatggtatcagcagaagcccggccagcctcctaagctgctgatctactggggcagcaccagatccacaggcgtgcccgatagattttctggctctggcagcggcaccgacttcaccctgacaatttctagcctgcaagccgaggacgtggccgtgtactactgccagaacgactacacataccccttcaccttcggccagggcaccaagctggaaatcaaactcgaggacctgaagaacgtgttcccacctgaggtggccgtgttcgagcctagcgaggccgagatcagccacacccagaaagccaccctcgtgtgcctggctaccggcttctaccccgaccatgtggaactgtcttggtgggtcaacggcaaagaggtgcacagcggcgtgtgtaccgacccccagccactgaaagaacagcccgccctgaacgacagccggtactgcctgagcagcagactgagagtgtccgccaccttctggcagaacccccggaaccacttcagatgccaggtgcagttctacggcctgagcgagaacgacgagtggacccaggacagagccaagcccgtgacccagatcgtgtctgccgaagcctggggcagagccgattgcggctttaccagcgagagctaccagcagggcgtgctgagcgccaccaacctgagcgtgatcggcttcagaatcctgctgctgaaagtggccggctttaacctgctgatgaccctgcggctgtggtccagcagggccaagcgatctggatctggagcaacaaacttctcactactcaaacaagcaggtgacgtggaggagaatcccgggcctactagtatggactggatttggcgcatccttttccttgtcggcgctgctaccggcgcgcattccgggccccagctccagctgcaagagtctggacctggcctggtcaagcctagcgagacactgagcctgacctgtaccgtgtccggcgatagcatcagcagcggcgattactactggggctggatcagacagcctcctggcaaaggactggaatggatcggccacatctactacagcggcgtgacctactacaaccccagcctgaagtccagagtgaccatcagcgtggacaccagccggaaccagttctccctgaagctgtctagcgtgacagccgccgataccgccgtgtactactgcaccagagaggacagcagcaactggcggagtagaggccagggaacactggtcacagttagctctggatccggcggaggcggaagtggaggcggaggatctggcggcggaggctctttcgaacaagttcagctggttcagagcggagccgaagtgaagaaacctggggcctctgtgaaggtgtcctgcaaggcttccggctataccttcaccagcttttggctgaactgggtccgacaggcccctggacaaggactggaatggatgggcaacatctaccccagcgacagctacaccgtgtacaaccagaaattcaaggaccgcgtgaccatgaccagggacaccagcacaagcacagtgtacatggaactgagcagcctgcggagcgaggataccgccgtgtattattgcgccagaacctggcggggcaacagcttcgattattggggccagggaaccaccgtgaccgtgtcatctacgcgtatccagaaccctgatcctgccgtgtaccagctgcgggatagcaagagcagcgacaagagcgtgtgtctgttcaccgacttcgacagccagaccaacgtgtcccagagcaaggactccgacgtgtacatcaccgataagtgcgtgctggacatgcggagcatggacttcaagagcaactccgccgtggcctggtccaacaagtccgatttcgcctgcgccaacgccttcaacaacagcattatccccgaggacacattcttcccaagccccgagagcagctgcgacgtgaagctggtggaaaagagcttcgagacagacaccaacctgaacttccagatcctgtacgagatcctgctgggcaaggccaccctgtacgccgtgctggtgtctgccctggtgctgatggctatggtcaagcggaaggacagccgggga

SEQ ID NO: 37718 - DNA, 2700 bp, synthetic construct
  source 1..2700: mol_type = other DNA
atggccttaccagtgaccgccttgctcctgccgctggccttgctgctccacgccgccaggccggaagtgcagctggttgaatctggcggaggactggttcagcctggcggatctctgagactgtcttgtgccgccagcggcttcagcttcagcgacttttggatgagctgggtccgacaggcccctggcaaaggacttgaatgggtcgccacaatcagccaggccggcagcgagaaggactacgtggactctgtgaagggcagattcaccatcagccgggacaacgccaagaagtccctgtacctccagatgaacagcctgagagccgaggacaccgccgtgtactattgtgcctctggcgtgtacagcttcgactacagaggccagggcaccctggtcacagtctcttctggtaccggcggaggcggatctggcggcggaggtagcggtggcggaggatctgaattcgacatcgtgatgacacagagccctgatagcctggccgtgtctctgggagagagagccaccatcaactgcaagagcagccagagcctgctgaacagcggcaacaacaagaactacgtgacatggtatcagcagaagcccggccagcctcctaagctgctgatctactggggcagcaccagatccacaggcgtgcccgatagattttctggctctggcagcggcaccgacttcaccctgacaatttctagcctgcaagccgaggacgtggccgtgtactactgccagaacgactacacataccccttcaccttcggccagggcaccaagctggaaatcaaactcgagatccagaaccctgatcctgccgtgtaccagctgcgggatagcaagagcagcgacaagagcgtgtgtctgttcaccgacttcgacagccagaccaacgtgtcccagagcaaggactccgacgtgtacatcaccgataagtgcgtgctggacatgcggagcatggacttcaagagcaactccgccgtggcctggtccaacaagtccgatttcgcctgcgccaacgccttcaacaacagcattatccccgaggacacattcttcccaagccccgagagcagctgcgacgtgaagctggtggaaaagagcttcgagacagacaccaacctgaacttccagatcctgtacgagatcctgctgggcaaggccaccctgtacgccgtgctggtgtctgccctggtgctgatggctatggtcaagcggaaggacagccggggacgcgccaagagaagcggatctggcgtgaagcagaccctgaatttcgacctgctgaagctggctggcgacgtggaatccaacccaggccctactagtatggactggatttggcgcatccttttccttgtcggcgctgctaccggcgcgcattccgggccccagctccagctgcaagagtctggacctggcctggtcaagcctagcgagacactgagcctgacctgtaccgtgtccggcgatagcatcagcagcggcgattactactggggctggatcagacagcctcctggcaaaggactggaatggatcggccacatctactacagcggcgtgacctactacaaccccagcctgaagtccagagtgaccatcagcgtggacaccagccggaaccagttctccctgaagctgtctagcgtgacagccgccgataccgccgtgtactactgcaccagagaggacagcagcaactggcggagtagaggccagggaacactggtcacagttagctctggatccggcggaggcggaagtggaggcggaggatctggcggcggaggctctttcgaacaagttcagctggttcagagcggagccgaagtgaagaaacctggggcctctgtgaaggtgtcctgcaaggcttccggctataccttcaccagcttttggctgaactgggtccgacaggcccctggacaaggactggaatggatgggcaacatctaccccagcgacagctacaccgtgtacaaccagaaattcaaggaccgcgtgaccatgaccagggacaccagcacaagcacagtgtacatggaactgagcagcctgcggagcgaggataccgccgtgtattattgcgccagaacctggcggggcaacagcttcgattattggggccagggaaccaccgtgaccgtgtcatctacgcgtgaggacctgaagaacgtgttcccacctgaggtggccgtgttcgagcctagcgaggccgagatcagccacacccagaaagccaccctcgtgtgcctggctaccggcttctaccccgaccatgtggaactgtcttggtgggtcaacggcaaagaggtgcacagcggcgtgtgtaccgacccccagccactgaaagaacagcccgccctgaacgacagccggtactgcctgagcagcagactgagagtgtccgccaccttctggcagaacccccggaaccacttcagatgccaggtgcagttctacggcctgagcgagaacgacgagtggacccaggacagagccaagcccgtgacccagatcgtgtctgccgaagcctggggcagagccgattgcggctttaccagcgagagctaccagcagggcgtgctgagcgccaccaacctgagcgtgatcggcttcagaatcctgctgctgaaagtggccggctttaacctgctgatgaccctgcggctgtggtccagc

SEQ ID NO: 37719 - DNA, 2184 bp, synthetic construct
  source 1..2184: mol_type = other DNA
atggccttaccagtgaccgccttgctcctgccgctggccttgctgctccacgccgccaggccggacatcgtgatgacacagagccctgatagcctggccgtgtctctgggagagagagccaccatcaactgcaagagcagccagagcctgctgaacagcggcaacaacaagaactacgtgacatggtatcagcagaagcccggccagcctcctaagctgctgatctactggggcagcaccagatccacaggcgtgcccgatagattttctggctctggcagcggcaccgacttcaccctgacaatttctagcctgcaagccgaggacgtggccgtgtactactgccagaacgactacacataccccttcaccttcggccagggcaccaagctggaaatcaaactcgaggacctgaagaacgtgttcccacctgaggtggccgtgttcgagcctagcgaggccgagatcagccacacccagaaagccaccctcgtgtgcctggctaccggcttctaccccgaccatgtggaactgtcttggtgggtcaacggcaaagaggtgcacagcggcgtgtgtaccgacccccagccactgaaagaacagcccgccctgaacgacagccggtactgcctgagcagcagactgagagtgtccgccaccttctggcagaacccccggaaccacttcagatgccaggtgcagttctacggcctgagcgagaacgacgagtggacccaggacagagccaagcccgtgacccagatcgtgtctgccgaagcctggggcagagccgatgatgtgattaagatccactggcaggaaaagaagtccaacaccatcctgggcagccaggaaggcaacaccatgaagaccaacgacacctacatgaagttcagctggctgaccgtgcccgagaagtccctggacaaagaacacagatgcatcgtgcggcacgaaaacaacaagaacggcgtggaccaggaaatcatcttcccacccatcaagaccgatgtgattacaatggaccccaaggacaactgctccaaggacgccaacgataccctgctgctccagctgaccaacaccagcgcctactacatgtacttgttgctgctgctgaagtccgtggtgtacttcgccatcatcacatgctgcctgctgatggctatggtcaagcggaaggacagccggggaagggccaagcgatctggatctggagcaacaaacttctcactactcaaacaagcaggtgacgtggaggagaatcccgggcctactagtatggactggatttggcgcatccttttccttgtcggcgctgctaccggcgcgcattccttcgaacaagttcagctggttcagagcggagccgaagtgaagaaacctggggcctctgtgaaggtgtcctgcaaggcttccggctataccttcaccagcttttggctgaactgggtccgacaggcccctggacaaggactggaatggatgggcaacatctaccccagcgacagctacaccgtgtacaaccagaaattcaaggaccgcgtgaccatgaccagggacaccagcacaagcacagtgtacatggaactgagcagcctgcggagcgaggataccgccgtgtattattgcgccagaacctggcggggcaacagcttcgattattggggccagggaaccaccgtgaccgtgtcatctacgcgtatccagaaccctgatcctgccgtgtaccagctgcgggatagcaagagcagcgacaagagcgtgtgtctgttcaccgacttcgacagccagaccaacgtgtcccagagcaaggactccgacgtgtacatcaccgataagtgcgtgctggacatgcggagcatggacttcaagagcaactccgccgtggcctggtccaacaagtccgatttcgcctgcgccaacgccttcaacaacagcattatccccgaggacacattcttcccaagccccgagagcagcgactccaccgaccacgtgaagcccaaagagacagagaacaccaagcagcccagcaagagctgccacaagcccaaggccatcgtgcacaccgagaaagtgaacatgatgagcctgaccgtgctgggcctgcggatgctgttcgccaaaaccgtggccgtgaacttcctgctgaccgccaagctgttcttcctcctcaccgcc

SEQ ID NO: 37720 - DNA, 2196 bp, synthetic construct
  source 1..2196: mol_type = other DNA
atggccttaccagtgaccgccttgctcctgccgctggccttgctgctccacgccgccaggccggacatcgtgatgacacagagccctgatagcctggccgtgtctctgggagagagagccaccatcaactgcaagagcagccagagcctgctgaacagcggcaacaacaagaactacgtgacatggtatcagcagaagcccggccagcctcctaagctgctgatctactggggcagcaccagatccacaggcgtgcccgatagattttctggctctggcagcggcaccgacttcaccctgacaatttctagcctgcaagccgaggacgtggccgtgtactactgccagaacgactacacataccccttcaccttcggccagggcaccaagctggaaatcaaactcgagatccagaaccctgatcctgccgtgtaccagctgcgggatagcaagagcagcgacaagagcgtgtgtctgttcaccgacttcgacagccagaccaacgtgtcccagagcaaggactccgacgtgtacatcaccgataagtgcgtgctggacatgcggagcatggacttcaagagcaactccgccgtggcctggtccaacaagtccgatttcgcctgcgccaacgccttcaacaacagcattatccccgaggacacattcttcccaagccccgagagcagcgactccaccgaccacgtgaagcccaaagagacagagaacaccaagcagcccagcaagagctgccacaagcccaaggccatcgtgcacaccgagaaagtgaacatgatgagcctgaccgtgctgggcctgcggatgctgttcgccaaaaccgtggccgtgaacttcctgctgaccgccaagctgttcttcctcctcaccgcccgcgccaagagaagcggatctggcgtgaagcagaccctgaatttcgacctgctgaagctggctggcgacgtggaatccaacccaggccctactagtatggactggatttggcgcatccttttccttgtcggcgctgctaccggcgcgcattccttcgaacaagttcagctggttcagagcggagccgaagtgaagaaacctggggcctctgtgaaggtgtcctgcaaggcttccggctataccttcaccagcttttggctgaactgggtccgacaggcccctggacaaggactggaatggatgggcaacatctaccccagcgacagctacaccgtgtacaaccagaaattcaaggaccgcgtgaccatgaccagggacaccagcacaagcacagtgtacatggaactgagcagcctgcggagcgaggataccgccgtgtattattgcgccagaacctggcggggcaacagcttcgattattggggccagggaaccaccgtgaccgtgtcatctacgcgtgaggacctgaagaacgtgttcccacctgaggtggccgtgttcgagcctagcgaggccgagatcagccacacccagaaagccaccctcgtgtgcctggctaccggcttctaccccgaccatgtggaactgtcttggtgggtcaacggcaaagaggtgcacagcggcgtgtgtaccgacccccagccactgaaagaacagcccgccctgaacgacagccggtactgcctgagcagcagactgagagtgtccgccaccttctggcagaacccccggaaccacttcagatgccaggtgcagttctacggcctgagcgagaacgacgagtggacccaggacagagccaagcccgtgacccagatcgtgtctgccgaagcctggggcagagccgatgatgtgattaagatccactggcaggaaaagaagtccaacaccatcctgggcagccaggaaggcaacaccatgaagaccaacgacacctacatgaagttcagctggctgaccgtgcccgagaagtccctggacaaagaacacagatgcatcgtgcggcacgaaaacaacaagaacggcgtggaccaggaaatcatcttcccacccatcaagaccgatgtgattacaatggaccccaaggacaactgctccaaggacgccaacgataccctgctgctccagctgaccaacaccagcgcctactacatgtacttgttgctgctgctgaagtccgtggtgtacttcgccatcatcacatgctgcctgctgatggctatggtcaagcggaaggacagccgggga

SEQ ID NO: 37721 - DNA, 2589 bp, synthetic construct
  source 1..2589: mol_type = other DNA
atggccttaccagtgaccgccttgctcctgccgctggccttgctgctccacgccgccaggccggaagtgcagctggttgaatctggcggaggactggttcagcctggcggatctctgagactgtcttgtgccgccagcggcttcagcttcagcgacttttggatgagctgggtccgacaggcccctggcaaaggacttgaatgggtcgccacaatcagccaggccggcagcgagaaggactacgtggactctgtgaagggcagattcaccatcagccgggacaacgccaagaagtccctgtacctccagatgaacagcctgagagccgaggacaccgccgtgtactattgtgcctctggcgtgtacagcttcgactacagaggccagggcaccctggtcacagtctcttctggtaccggcggaggcggatctggcggcggaggtagcggtggcggaggatctgaattcgacatcgtgatgacacagagccctgatagcctggccgtgtctctgggagagagagccaccatcaactgcaagagcagccagagcctgctgaacagcggcaacaacaagaactacgtgacatggtatcagcagaagcccggccagcctcctaagctgctgatctactggggcagcaccagatccacaggcgtgcccgatagattttctggctctggcagcggcaccgacttcaccctgacaatttctagcctgcaagccgaggacgtggccgtgtactactgccagaacgactacacataccccttcaccttcggccagggcaccaagctggaaatcaaactcgaggacctgaagaacgtgttcccacctgaggtggccgtgttcgagcctagcgaggccgagatcagccacacccagaaagccaccctcgtgtgcctggctaccggcttctaccccgaccatgtggaactgtcttggtgggtcaacggcaaagaggtgcacagcggcgtgtgtaccgacccccagccactgaaagaacagcccgccctgaacgacagccggtactgcctgagcagcagactgagagtgtccgccaccttctggcagaacccccggaaccacttcagatgccaggtgcagttctacggcctgagcgagaacgacgagtggacccaggacagagccaagcccgtgacccagatcgtgtctgccgaagcctggggcagagccgatgatgtgattaagatccactggcaggaaaagaagtccaacaccatcctgggcagccaggaaggcaacaccatgaagaccaacgacacctacatgaagttcagctggctgaccgtgcccgagaagtccctggacaaagaacacagatgcatcgtgcggcacgaaaacaacaagaacggcgtggaccaggaaatcatcttcccacccatcaagaccgatgtgattacaatggaccccaaggacaactgctccaaggacgccaacgataccctgctgctccagctgaccaacaccagcgcctactacatgtacttgttgctgctgctgaagtccgtggtgtacttcgccatcatcacatgctgcctgctgatggctatggtcaagcggaaggacagccggggaagggccaagcgatctggatctggagcaacaaacttctcactactcaaacaagcaggtgacgtggaggagaatcccgggcctactagtatggactggatttggcgcatccttttccttgtcggcgctgctaccggcgcgcattccttcgaacaagttcagctggttcagagcggagccgaagtgaagaaacctggggcctctgtgaaggtgtcctgcaaggcttccggctataccttcaccagcttttggctgaactgggtccgacaggcccctggacaaggactggaatggatgggcaacatctaccccagcgacagctacaccgtgtacaaccagaaattcaaggaccgcgtgaccatgaccagggacaccagcacaagcacagtgtacatggaactgagcagcctgcggagcgaggataccgccgtgtattattgcgccagaacctggcggggcaacagcttcgattattggggccagggaaccaccgtgaccgtgtcatctacgcgtatccagaaccctgatcctgccgtgtaccagctgcgggatagcaagagcagcgacaagagcgtgtgtctgttcaccgacttcgacagccagaccaacgtgtcccagagcaaggactccgacgtgtacatcaccgataagtgcgtgctggacatgcggagcatggacttcaagagcaactccgccgtggcctggtccaacaagtccgatttcgcctgcgccaacgccttcaacaacagcattatccccgaggacacattcttcccaagccccgagagcagcgactccaccgaccacgtgaagcccaaagagacagagaacaccaagcagcccagcaagagctgccacaagcccaaggccatcgtgcacaccgagaaagtgaacatgatgagcctgaccgtgctgggcctgcggatgctgttcgccaaaaccgtggccgtgaacttcctgctgaccgccaagctgttcttcctcctcaccgcc

SEQ ID NO: 37722 - DNA, 2601 bp, synthetic construct
  source 1..2601: mol_type = other DNA
atggccttaccagtgaccgccttgctcctgccgctggccttgctgctccacgccgccaggccggaagtgcagctggttgaatctggcggaggactggttcagcctggcggatctctgagactgtcttgtgccgccagcggcttcagcttcagcgacttttggatgagctgggtccgacaggcccctggcaaaggacttgaatgggtcgccacaatcagccaggccggcagcgagaaggactacgtggactctgtgaagggcagattcaccatcagccgggacaacgccaagaagtccctgtacctccagatgaacagcctgagagccgaggacaccgccgtgtactattgtgcctctggcgtgtacagcttcgactacagaggccagggcaccctggtcacagtctcttctggtaccggcggaggcggatctggcggcggaggtagcggtggcggaggatctgaattcgacatcgtgatgacacagagccctgatagcctggccgtgtctctgggagagagagccaccatcaactgcaagagcagccagagcctgctgaacagcggcaacaacaagaactacgtgacatggtatcagcagaagcccggccagcctcctaagctgctgatctactggggcagcaccagatccacaggcgtgcccgatagattttctggctctggcagcggcaccgacttcaccctgacaatttctagcctgcaagccgaggacgtggccgtgtactactgccagaacgactacacataccccttcaccttcggccagggcaccaagctggaaatcaaactcgagatccagaaccctgatcctgccgtgtaccagctgcgggatagcaagagcagcgacaagagcgtgtgtctgttcaccgacttcgacagccagaccaacgtgtcccagagcaaggactccgacgtgtacatcaccgataagtgcgtgctggacatgcggagcatggacttcaagagcaactccgccgtggcctggtccaacaagtccgatttcgcctgcgccaacgccttcaacaacagcattatccccgaggacacattcttcccaagccccgagagcagcgactccaccgaccacgtgaagcccaaagagacagagaacaccaagcagcccagcaagagctgccacaagcccaaggccatcgtgcacaccgagaaagtgaacatgatgagcctgaccgtgctgggcctgcggatgctgttcgccaaaaccgtggccgtgaacttcctgctgaccgccaagctgttcttcctcctcaccgcccgcgccaagagaagcggatctggcgtgaagcagaccctgaatttcgacctgctgaagctggctggcgacgtggaatccaacccaggccctactagtatggactggatttggcgcatccttttccttgtcggcgctgctaccggcgcgcattccttcgaacaagttcagctggttcagagcggagccgaagtgaagaaacctggggcctctgtgaaggtgtcctgcaaggcttccggctataccttcaccagcttttggctgaactgggtccgacaggcccctggacaaggactggaatggatgggcaacatctaccccagcgacagctacaccgtgtacaaccagaaattcaaggaccgcgtgaccatgaccagggacaccagcacaagcacagtgtacatggaactgagcagcctgcggagcgaggataccgccgtgtattattgcgccagaacctggcggggcaacagcttcgattattggggccagggaaccaccgtgaccgtgtcatctacgcgtgaggacctgaagaacgtgttcccacctgaggtggccgtgttcgagcctagcgaggccgagatcagccacacccagaaagccaccctcgtgtgcctggctaccggcttctaccccgaccatgtggaactgtcttggtgggtcaacggcaaagaggtgcacagcggcgtgtgtaccgacccccagccactgaaagaacagcccgccctgaacgacagccggtactgcctgagcagcagactgagagtgtccgccaccttctggcagaacccccggaaccacttcagatgccaggtgcagttctacggcctgagcgagaacgacgagtggacccaggacagagccaagcccgtgacccagatcgtgtctgccgaagcctggggcagagccgatgatgtgattaagatccactggcaggaaaagaagtccaacaccatcctgggcagccaggaaggcaacaccatgaagaccaacgacacctacatgaagttcagctggctgaccgtgcccgagaagtccctggacaaagaacacagatgcatcgtgcggcacgaaaacaacaagaacggcgtggaccaggaaatcatcttcccacccatcaagaccgatgtgattacaatggaccccaaggacaactgctccaaggacgccaacgataccctgctgctccagctgaccaacaccagcgcctactacatgtacttgttgctgctgctgaagtccgtggtgtacttcgccatcatcacatgctgcctgctgatggctatggtcaagcggaaggacagccgggga

SEQ ID NO: 37723 - DNA, 3000 bp, synthetic construct
  source 1..3000: mol_type = other DNA
atggccttaccagtgaccgccttgctcctgccgctggccttgctgctccacgccgccaggccggaagtgcagctggttgaatctggcggaggactggttcagcctggcggatctctgagactgtcttgtgccgccagcggcttcagcttcagcgacttttggatgagctgggtccgacaggcccctggcaaaggacttgaatgggtcgccacaatcagccaggccggcagcgagaaggactacgtggactctgtgaagggcagattcaccatcagccgggacaacgccaagaagtccctgtacctccagatgaacagcctgagagccgaggacaccgccgtgtactattgtgcctctggcgtgtacagcttcgactacagaggccagggcaccctggtcacagtctcttctggtaccggcggaggcggatctggcggcggaggtagcggtggcggaggatctgaattcgacatcgtgatgacacagagccctgatagcctggccgtgtctctgggagagagagccaccatcaactgcaagagcagccagagcctgctgaacagcggcaacaacaagaactacgtgacatggtatcagcagaagcccggccagcctcctaagctgctgatctactggggcagcaccagatccacaggcgtgcccgatagattttctggctctggcagcggcaccgacttcaccctgacaatttctagcctgcaagccgaggacgtggccgtgtactactgccagaacgactacacataccccttcaccttcggccagggcaccaagctggaaatcaaactcgaggacctgaagaacgtgttcccacctgaggtggccgtgttcgagcctagcgaggccgagatcagccacacccagaaagccaccctcgtgtgcctggctaccggcttctaccccgaccatgtggaactgtcttggtgggtcaacggcaaagaggtgcacagcggcgtgtgtaccgacccccagccactgaaagaacagcccgccctgaacgacagccggtactgcctgagcagcagactgagagtgtccgccaccttctggcagaacccccggaaccacttcagatgccaggtgcagttctacggcctgagcgagaacgacgagtggacccaggacagagccaagcccgtgacccagatcgtgtctgccgaagcctggggcagagccgatgatgtgattaagatccactggcaggaaaagaagtccaacaccatcctgggcagccaggaaggcaacaccatgaagaccaacgacacctacatgaagttcagctggctgaccgtgcccgagaagtccctggacaaagaacacagatgcatcgtgcggcacgaaaacaacaagaacggcgtggaccaggaaatcatcttcccacccatcaagaccgatgtgattacaatggaccccaaggacaactgctccaaggacgccaacgataccctgctgctccagctgaccaacaccagcgcctactacatgtacttgttgctgctgctgaagtccgtggtgtacttcgccatcatcacatgctgcctgctgatggctatggtcaagcggaaggacagccggggaagggccaagcgatctggatctggagcaacaaacttctcactactcaaacaagcaggtgacgtggaggagaatcccgggcctactagtatggactggatttggcgcatccttttccttgtcggcgctgctaccggcgcgcattccgggccccagctccagctgcaagagtctggacctggcctggtcaagcctagcgagacactgagcctgacctgtaccgtgtccggcgatagcatcagcagcggcgattactactggggctggatcagacagcctcctggcaaaggactggaatggatcggccacatctactacagcggcgtgacctactacaaccccagcctgaagtccagagtgaccatcagcgtggacaccagccggaaccagttctccctgaagctgtctagcgtgacagccgccgataccgccgtgtactactgcaccagagaggacagcagcaactggcggagtagaggccagggaacactggtcacagttagctctggatccggcggaggcggaagtggaggcggaggatctggcggcggaggctctttcgaacaagttcagctggttcagagcggagccgaagtgaagaaacctggggcctctgtgaaggtgtcctgcaaggcttccggctataccttcaccagcttttggctgaactgggtccgacaggcccctggacaaggactggaatggatgggcaacatctaccccagcgacagctacaccgtgtacaaccagaaattcaaggaccgcgtgaccatgaccagggacaccagcacaagcacagtgtacatggaactgagcagcctgcggagcgaggataccgccgtgtattattgcgccagaacctggcggggcaacagcttcgattattggggccagggaaccaccgtgaccgtgtcatctacgcgtatccagaaccctgatcctgccgtgtaccagctgcgggatagcaagagcagcgacaagagcgtgtgtctgttcaccgacttcgacagccagaccaacgtgtcccagagcaaggactccgacgtgtacatcaccgataagtgcgtgctggacatgcggagcatggacttcaagagcaactccgccgtggcctggtccaacaagtccgatttcgcctgcgccaacgccttcaacaacagcattatccccgaggacacattcttcccaagccccgagagcagcgactccaccgaccacgtgaagcccaaagagacagagaacaccaagcagcccagcaagagctgccacaagcccaaggccatcgtgcacaccgagaaagtgaacatgatgagcctgaccgtgctgggcctgcggatgctgttcgccaaaaccgtggccgtgaacttcctgctgaccgccaagctgttcttcctcctcaccgcc

SEQ ID NO: 37724 - DNA, 3012 bp, synthetic construct
  source 1..3012: mol_type = other DNA
atggccttaccagtgaccgccttgctcctgccgctggccttgctgctccacgccgccaggccggaagtgcagctggttgaatctggcggaggactggttcagcctggcggatctctgagactgtcttgtgccgccagcggcttcagcttcagcgacttttggatgagctgggtccgacaggcccctggcaaaggacttgaatgggtcgccacaatcagccaggccggcagcgagaaggactacgtggactctgtgaagggcagattcaccatcagccgggacaacgccaagaagtccctgtacctccagatgaacagcctgagagccgaggacaccgccgtgtactattgtgcctctggcgtgtacagcttcgactacagaggccagggcaccctggtcacagtctcttctggtaccggcggaggcggatctggcggcggaggtagcggtggcggaggatctgaattcgacatcgtgatgacacagagccctgatagcctggccgtgtctctgggagagagagccaccatcaactgcaagagcagccagagcctgctgaacagcggcaacaacaagaactacgtgacatggtatcagcagaagcccggccagcctcctaagctgctgatctactggggcagcaccagatccacaggcgtgcccgatagattttctggctctggcagcggcaccgacttcaccctgacaatttctagcctgcaagccgaggacgtggccgtgtactactgccagaacgactacacataccccttcaccttcggccagggcaccaagctggaaatcaaactcgagatccagaaccctgatcctgccgtgtaccagctgcgggatagcaagagcagcgacaagagcgtgtgtctgttcaccgacttcgacagccagaccaacgtgtcccagagcaaggactccgacgtgtacatcaccgataagtgcgtgctggacatgcggagcatggacttcaagagcaactccgccgtggcctggtccaacaagtccgatttcgcctgcgccaacgccttcaacaacagcattatccccgaggacacattcttcccaagccccgagagcagcgactccaccgaccacgtgaagcccaaagagacagagaacaccaagcagcccagcaagagctgccacaagcccaaggccatcgtgcacaccgagaaagtgaacatgatgagcctgaccgtgctgggcctgcggatgctgttcgccaaaaccgtggccgtgaacttcctgctgaccgccaagctgttcttcctcctcaccgcccgcgccaagagaagcggatctggcgtgaagcagaccctgaatttcgacctgctgaagctggctggcgacgtggaatccaacccaggccctactagtatggactggatttggcgcatccttttccttgtcggcgctgctaccggcgcgcattccgggccccagctccagctgcaagagtctggacctggcctggtcaagcctagcgagacactgagcctgacctgtaccgtgtccggcgatagcatcagcagcggcgattactactggggctggatcagacagcctcctggcaaaggactggaatggatcggccacatctactacagcggcgtgacctactacaaccccagcctgaagtccagagtgaccatcagcgtggacaccagccggaaccagttctccctgaagctgtctagcgtgacagccgccgataccgccgtgtactactgcaccagagaggacagcagcaactggcggagtagaggccagggaacactggtcacagttagctctggatccggcggaggcggaagtggaggcggaggatctggcggcggaggctctttcgaacaagttcagctggttcagagcggagccgaagtgaagaaacctggggcctctgtgaaggtgtcctgcaaggcttccggctataccttcaccagcttttggctgaactgggtccgacaggcccctggacaaggactggaatggatgggcaacatctaccccagcgacagctacaccgtgtacaaccagaaattcaaggaccgcgtgaccatgaccagggacaccagcacaagcacagtgtacatggaactgagcagcctgcggagcgaggataccgccgtgtattattgcgccagaacctggcggggcaacagcttcgattattggggccagggaaccaccgtgaccgtgtcatctacgcgtgaggacctgaagaacgtgttcccacctgaggtggccgtgttcgagcctagcgaggccgagatcagccacacccagaaagccaccctcgtgtgcctggctaccggcttctaccccgaccatgtggaactgtcttggtgggtcaacggcaaagaggtgcacagcggcgtgtgtaccgacccccagccactgaaagaacagcccgccctgaacgacagccggtactgcctgagcagcagactgagagtgtccgccaccttctggcagaacccccggaaccacttcagatgccaggtgcagttctacggcctgagcgagaacgacgagtggacccaggacagagccaagcccgtgacccagatcgtgtctgccgaagcctggggcagagccgatgatgtgattaagatccactggcaggaaaagaagtccaacaccatcctgggcagccaggaaggcaacaccatgaagaccaacgacacctacatgaagttcagctggctgaccgtgcccgagaagtccctggacaaagaacacagatgcatcgtgcggcacgaaaacaacaagaacggcgtggaccaggaaatcatcttcccacccatcaagaccgatgtgattacaatggaccccaaggacaactgctccaaggacgccaacgataccctgctgctccagctgaccaacaccagcgcctactacatgtacttgttgctgctgctgaagtccgtggtgtacttcgccatcatcacatgctgcctgctgatggctatggtcaagcggaaggacagccgggga

SEQ ID NO: 37725 - DNA, 2178 bp, synthetic construct
  source 1..2178: mol_type = other DNA
atggccttaccagtgaccgccttgctcctgccgctggccttgctgctccacgccgccaggccggacatcgtgatgacacagagccctgatagcctggccgtgtctctgggagagagagccaccatcaactgcaagagcagccagagcctgctgaacagcggcaacaacaagaactacgtgacatggtatcagcagaagcccggccagcctcctaagctgctgatctactggggcagcaccagatccacaggcgtgcccgatagattttctggctctggcagcggcaccgacttcaccctgacaatttctagcctgcaagccgaggacgtggccgtgtactactgccagaacgactacacataccccttcaccttcggccagggcaccaagctggaaatcaaactcgaggacctgaagaacgtgttcccacctgaggtggccgtgttcgagcctagcgaggccgagatcagccacacccagaaagccaccctcgtgtgcctggctaccggcttctaccccgaccatgtggaactgtcttggtgggtcaacggcaaagaggtgcacagcggcgtgtgtaccgacccccagccactgaaagaacagcccgccctgaacgacagccggtactgcctgagcagcagactgagagtgtccgccaccttctggcagaacccccggaaccacttcagatgccaggtgcagttctacggcctgagcgagaacgacgagtggacccaggacagagccaagcccgtgacccagatcgtgtctgccgaagcctggggcagagccgatgatgtgattaagatccactggcaggaaaagaagtccaacaccatcctgggcagccaggaaggcaacaccatgaagaccaacgacacctacatgaagttcagctggctgaccgtgcccgagaagtccctggacaaagaacacagatgcatcgtgcggcacgaaaacaacaagaacggcgtggaccaggaaatcatcttcccacccatcaagaccgatgtgattacaatggaccccaaggacaactgctccaaggacgccaacgataccctgctgctccagctgaccaacaccagcgcctactacatgtacttgttgctgctgctgaagtccgtggtgtacttcgccatcatcacatgctgcctgctgcggagaaccgccttctgctgcaacggcgagaagtctagggccaagcgatctggatctggagcaacaaacttctcactactcaaacaagcaggtgacgtggaggagaatcccgggcctactagtatggactggatttggcgcatccttttccttgtcggcgctgctaccggcgcgcattccttcgaacaagttcagctggttcagagcggagccgaagtgaagaaacctggggcctctgtgaaggtgtcctgcaaggcttccggctataccttcaccagcttttggctgaactgggtccgacaggcccctggacaaggactggaatggatgggcaacatctaccccagcgacagctacaccgtgtacaaccagaaattcaaggaccgcgtgaccatgaccagggacaccagcacaagcacagtgtacatggaactgagcagcctgcggagcgaggataccgccgtgtattattgcgccagaacctggcggggcaacagcttcgattattggggccagggaaccaccgtgaccgtgtcatctacgcgtatccagaaccctgatcctgccgtgtaccagctgcgggatagcaagagcagcgacaagagcgtgtgtctgttcaccgacttcgacagccagaccaacgtgtcccagagcaaggactccgacgtgtacatcaccgataagtgcgtgctggacatgcggagcatggacttcaagagcaactccgccgtggcctggtccaacaagtccgatttcgcctgcgccaacgccttcaacaacagcattatccccgaggacacattcttcccaagccccgagagcagcgactccaccgaccacgtgaagcccaaagagacagagaacaccaagcagcccagcaagagctgccacaagcccaaggccatcgtgcacaccgagaaagtgaacatgatgagcctgaccgtgctgggcctgcggatgctgttcgccaaaaccgtggccgtgaacttcctgctgaccgccaagctgttcttcctc

SEQ ID NO: 37726 - DNA, 2190 bp, synthetic construct
  source 1..2190: mol_type = other DNA
atggccttaccagtgaccgccttgctcctgccgctggccttgctgctccacgccgccaggccggacatcgtgatgacacagagccctgatagcctggccgtgtctctgggagagagagccaccatcaactgcaagagcagccagagcctgctgaacagcggcaacaacaagaactacgtgacatggtatcagcagaagcccggccagcctcctaagctgctgatctactggggcagcaccagatccacaggcgtgcccgatagattttctggctctggcagcggcaccgacttcaccctgacaatttctagcctgcaagccgaggacgtggccgtgtactactgccagaacgactacacataccccttcaccttcggccagggcaccaagctggaaatcaaactcgagatccagaaccctgatcctgccgtgtaccagctgcgggatagcaagagcagcgacaagagcgtgtgtctgttcaccgacttcgacagccagaccaacgtgtcccagagcaaggactccgacgtgtacatcaccgataagtgcgtgctggacatgcggagcatggacttcaagagcaactccgccgtggcctggtccaacaagtccgatttcgcctgcgccaacgccttcaacaacagcattatccccgaggacacattcttcccaagccccgagagcagcgactccaccgaccacgtgaagcccaaagagacagagaacaccaagcagcccagcaagagctgccacaagcccaaggccatcgtgcacaccgagaaagtgaacatgatgagcctgaccgtgctgggcctgcggatgctgttcgccaaaaccgtggccgtgaacttcctgctgaccgccaagctgttcttcctccgcgccaagagaagcggatctggcgtgaagcagaccctgaatttcgacctgctgaagctggctggcgacgtggaatccaacccaggccctactagtatggactggatttggcgcatccttttccttgtcggcgctgctaccggcgcgcattccttcgaacaagttcagctggttcagagcggagccgaagtgaagaaacctggggcctctgtgaaggtgtcctgcaaggcttccggctataccttcaccagcttttggctgaactgggtccgacaggcccctggacaaggactggaatggatgggcaacatctaccccagcgacagctacaccgtgtacaaccagaaattcaaggaccgcgtgaccatgaccagggacaccagcacaagcacagtgtacatggaactgagcagcctgcggagcgaggataccgccgtgtattattgcgccagaacctggcggggcaacagcttcgattattggggccagggaaccaccgtgaccgtgtcatctacgcgtgaggacctgaagaacgtgttcccacctgaggtggccgtgttcgagcctagcgaggccgagatcagccacacccagaaagccaccctcgtgtgcctggctaccggcttctaccccgaccatgtggaactgtcttggtgggtcaacggcaaagaggtgcacagcggcgtgtgtaccgacccccagccactgaaagaacagcccgccctgaacgacagccggtactgcctgagcagcagactgagagtgtccgccaccttctggcagaacccccggaaccacttcagatgccaggtgcagttctacggcctgagcgagaacgacgagtggacccaggacagagccaagcccgtgacccagatcgtgtctgccgaagcctggggcagagccgatgatgtgattaagatccactggcaggaaaagaagtccaacaccatcctgggcagccaggaaggcaacaccatgaagaccaacgacacctacatgaagttcagctggctgaccgtgcccgagaagtccctggacaaagaacacagatgcatcgtgcggcacgaaaacaacaagaacggcgtggaccaggaaatcatcttcccacccatcaagaccgatgtgattacaatggaccccaaggacaactgctccaaggacgccaacgataccctgctgctccagctgaccaacaccagcgcctactacatgtacttgttgctgctgctgaagtccgtggtgtacttcgccatcatcacatgctgcctgctgcggagaaccgccttctgctgcaacggcgagaagtct

SEQ ID NO: 37727 - DNA, 2583 bp, synthetic construct
  source 1..2583: mol_type = other DNA
atggccttaccagtgaccgccttgctcctgccgctggccttgctgctccacgccgccaggccggaagtgcagctggttgaatctggcggaggactggttcagcctggcggatctctgagactgtcttgtgccgccagcggcttcagcttcagcgacttttggatgagctgggtccgacaggcccctggcaaaggacttgaatgggtcgccacaatcagccaggccggcagcgagaaggactacgtggactctgtgaagggcagattcaccatcagccgggacaacgccaagaagtccctgtacctccagatgaacagcctgagagccgaggacaccgccgtgtactattgtgcctctggcgtgtacagcttcgactacagaggccagggcaccctggtcacagtctcttctggtaccggcggaggcggatctggcggcggaggtagcggtggcggaggatctgaattcgacatcgtgatgacacagagccctgatagcctggccgtgtctctgggagagagagccaccatcaactgcaagagcagccagagcctgctgaacagcggcaacaacaagaactacgtgacatggtatcagcagaagcccggccagcctcctaagctgctgatctactggggcagcaccagatccacaggcgtgcccgatagattttctggctctggcagcggcaccgacttcaccctgacaatttctagcctgcaagccgaggacgtggccgtgtactactgccagaacgactacacataccccttcaccttcggccagggcaccaagctggaaatcaaactcgaggacctgaagaacgtgttcccacctgaggtggccgtgttcgagcctagcgaggccgagatcagccacacccagaaagccaccctcgtgtgcctggctaccggcttctaccccgaccatgtggaactgtcttggtgggtcaacggcaaagaggtgcacagcggcgtgtgtaccgacccccagccactgaaagaacagcccgccctgaacgacagccggtactgcctgagcagcagactgagagtgtccgccaccttctggcagaacccccggaaccacttcagatgccaggtgcagttctacggcctgagcgagaacgacgagtggacccaggacagagccaagcccgtgacccagatcgtgtctgccgaagcctggggcagagccgatgatgtgattaagatccactggcaggaaaagaagtccaacaccatcctgggcagccaggaaggcaacaccatgaagaccaacgacacctacatgaagttcagctggctgaccgtgcccgagaagtccctggacaaagaacacagatgcatcgtgcggcacgaaaacaacaagaacggcgtggaccaggaaatcatcttcccacccatcaagaccgatgtgattacaatggaccccaaggacaactgctccaaggacgccaacgataccctgctgctccagctgaccaacaccagcgcctactacatgtacttgttgctgctgctgaagtccgtggtgtacttcgccatcatcacatgctgcctgctgcggagaaccgccttctgctgcaacggcgagaagtctagggccaagcgatctggatctggagcaacaaacttctcactactcaaacaagcaggtgacgtggaggagaatcccgggcctactagtatggactggatttggcgcatccttttccttgtcggcgctgctaccggcgcgcattccttcgaacaagttcagctggttcagagcggagccgaagtgaagaaacctggggcctctgtgaaggtgtcctgcaaggcttccggctataccttcaccagcttttggctgaactgggtccgacaggcccctggacaaggactggaatggatgggcaacatctaccccagcgacagctacaccgtgtacaaccagaaattcaaggaccgcgtgaccatgaccagggacaccagcacaagcacagtgtacatggaactgagcagcctgcggagcgaggataccgccgtgtattattgcgccagaacctggcggggcaacagcttcgattattggggccagggaaccaccgtgaccgtgtcatctacgcgtatccagaaccctgatcctgccgtgtaccagctgcgggatagcaagagcagcgacaagagcgtgtgtctgttcaccgacttcgacagccagaccaacgtgtcccagagcaaggactccgacgtgtacatcaccgataagtgcgtgctggacatgcggagcatggacttcaagagcaactccgccgtggcctggtccaacaagtccgatttcgcctgcgccaacgccttcaacaacagcattatccccgaggacacattcttcccaagccccgagagcagcgactccaccgaccacgtgaagcccaaagagacagagaacaccaagcagcccagcaagagctgccacaagcccaaggccatcgtgcacaccgagaaagtgaacatgatgagcctgaccgtgctgggcctgcggatgctgttcgccaaaaccgtggccgtgaacttcctgctgaccgccaagctgttcttcctc

SEQ ID NO: 37728 - DNA, 2994 bp, synthetic construct
  source 1..2994: mol_type = other DNA
atggccttaccagtgaccgccttgctcctgccgctggccttgctgctccacgccgccaggccggaagtgcagctggttgaatctggcggaggactggttcagcctggcggatctctgagactgtcttgtgccgccagcggcttcagcttcagcgacttttggatgagctgggtccgacaggcccctggcaaaggacttgaatgggtcgccacaatcagccaggccggcagcgagaaggactacgtggactctgtgaagggcagattcaccatcagccgggacaacgccaagaagtccctgtacctccagatgaacagcctgagagccgaggacaccgccgtgtactattgtgcctctggcgtgtacagcttcgactacagaggccagggcaccctggtcacagtctcttctggtaccggcggaggcggatctggcggcggaggtagcggtggcggaggatctgaattcgacatcgtgatgacacagagccctgatagcctggccgtgtctctgggagagagagccaccatcaactgcaagagcagccagagcctgctgaacagcggcaacaacaagaactacgtgacatggtatcagcagaagcccggccagcctcctaagctgctgatctactggggcagcaccagatccacaggcgtgcccgatagattttctggctctggcagcggcaccgacttcaccctgacaatttctagcctgcaagccgaggacgtggccgtgtactactgccagaacgactacacataccccttcaccttcggccagggcaccaagctggaaatcaaactcgaggacctgaagaacgtgttcccacctgaggtggccgtgttcgagcctagcgaggccgagatcagccacacccagaaagccaccctcgtgtgcctggctaccggcttctaccccgaccatgtggaactgtcttggtgggtcaacggcaaagaggtgcacagcggcgtgtgtaccgacccccagccactgaaagaacagcccgccctgaacgacagccggtactgcctgagcagcagactgagagtgtccgccaccttctggcagaacccccggaaccacttcagatgccaggtgcagttctacggcctgagcgagaacgacgagtggacccaggacagagccaagcccgtgacccagatcgtgtctgccgaagcctggggcagagccgatgatgtgattaagatccactggcaggaaaagaagtccaacaccatcctgggcagccaggaaggcaacaccatgaagaccaacgacacctacatgaagttcagctggctgaccgtgcccgagaagtccctggacaaagaacacagatgcatcgtgcggcacgaaaacaacaagaacggcgtggaccaggaaatcatcttcccacccatcaagaccgatgtgattacaatggaccccaaggacaactgctccaaggacgccaacgataccctgctgctccagctgaccaacaccagcgcctactacatgtacttgttgctgctgctgaagtccgtggtgtacttcgccatcatcacatgctgcctgctgcggagaaccgccttctgctgcaacggcgagaagtctagggccaagcgatctggatctggagcaacaaacttctcactactcaaacaagcaggtgacgtggaggagaatcccgggcctactagtatggactggatttggcgcatccttttccttgtcggcgctgctaccggcgcgcattccgggccccagctccagctgcaagagtctggacctggcctggtcaagcctagcgagacactgagcctgacctgtaccgtgtccggcgatagcatcagcagcggcgattactactggggctggatcagacagcctcctggcaaaggactggaatggatcggccacatctactacagcggcgtgacctactacaaccccagcctgaagtccagagtgaccatcagcgtggacaccagccggaaccagttctccctgaagctgtctagcgtgacagccgccgataccgccgtgtactactgcaccagagaggacagcagcaactggcggagtagaggccagggaacactggtcacagttagctctggatccggcggaggcggaagtggaggcggaggatctggcggcggaggctctttcgaacaagttcagctggttcagagcggagccgaagtgaagaaacctggggcctctgtgaaggtgtcctgcaaggcttccggctataccttcaccagcttttggctgaactgggtccgacaggcccctggacaaggactggaatggatgggcaacatctaccccagcgacagctacaccgtgtacaaccagaaattcaaggaccgcgtgaccatgaccagggacaccagcacaagcacagtgtacatggaactgagcagcctgcggagcgaggataccgccgtgtattattgcgccagaacctggcggggcaacagcttcgattattggggccagggaaccaccgtgaccgtgtcatctacgcgtatccagaaccctgatcctgccgtgtaccagctgcgggatagcaagagcagcgacaagagcgtgtgtctgttcaccgacttcgacagccagaccaacgtgtcccagagcaaggactccgacgtgtacatcaccgataagtgcgtgctggacatgcggagcatggacttcaagagcaactccgccgtggcctggtccaacaagtccgatttcgcctgcgccaacgccttcaacaacagcattatccccgaggacacattcttcccaagccccgagagcagcgactccaccgaccacgtgaagcccaaagagacagagaacaccaagcagcccagcaagagctgccacaagcccaaggccatcgtgcacaccgagaaagtgaacatgatgagcctgaccgtgctgggcctgcggatgctgttcgccaaaaccgtggccgtgaacttcctgctgaccgccaagctgttcttcctc

SEQ ID NO: 37729 - DNA, 1872 bp, synthetic construct
  source 1..1872: mol_type = other DNA
atggccttaccagtgaccgccttgctcctgccgctggccttgctgctccacgccgccaggccggacatcgtgatgacacagagccctgatagcctggccgtgtctctgggagagagagccaccatcaactgcaagagcagccagagcctgctgaacagcggcaacaacaagaactacgtgacatggtatcagcagaagcccggccagcctcctaagctgctgatctactggggcagcaccagatccacaggcgtgcccgatagattttctggctctggcagcggcaccgacttcaccctgacaatttctagcctgcaagccgaggacgtggccgtgtactactgccagaacgactacacataccccttcaccttcggccagggcaccaagctggaaatcaaactcgaggacctgaagaacgtgttcccacctgaggtggccgtgttcgagcctagcgaggccgagatcagccacacccagaaagccaccctcgtgtgcctggctaccggcttctaccccgaccatgtggaactgtcttggtgggtcaacggcaaagaggtgcacagcggcgtgtctaccgacccccagccactgaaagaacagcccgccctgaacgacagccggtactgcctgagcagcagactgagagtgtccgccaccttctggcagaacccccggaaccacttcagatgccaggtgcagttctacggcctgagcgagaacgacgagtggacccaggacagagccaagcccgtgacccagatcgtgtctgccgaagcctggggcagagccgattgcgacgtgaagctggtggaaaagagcttcgagacagacaccaacctgaacttccagaacctgagcgtgatcggcttcagaatcctgctgctgaaagtggccggctttaacctgctgatgaccctgcggctgtggtccagcagggccaagcgatctggatctggagcaacaaacttctcactactcaaacaagcaggtgacgtggaggagaatcccgggcctactagtatggactggatttggcgcatccttttccttgtcggcgctgctaccggcgcgcattccttcgaacaagttcagctggttcagagcggagccgaagtgaagaaacctggggcctctgtgaaggtgtcctgcaaggcttccggctataccttcaccagcttttggctgaactgggtccgacaggcccctggacaaggactggaatggatgggcaacatctaccccagcgacagctacaccgtgtacaaccagaaattcaaggaccgcgtgaccatgaccagggacaccagcacaagcacagtgtacatggaactgagcagcctgcggagcgaggataccgccgtgtattattgcgccagaacctggcggggcaacagcttcgattattggggccagggaaccaccgtgaccgtgtcatctacgcgtatccagaaccctgatcctgccgtgtaccagctgcgggatagcaagagcagcgacaagagcgtgtgtctgttcaccgacttcgacagccagaccaacgtgtcccagagcaaggactccgacgtgtacatcaccgataagaccgtgctggacatgcggagcatggacttcaagagcaactccgccgtggcctggtccaacaagtccgatttcgcctgcgccaacgccttcaacaacagcattatccccgaggacacattcttcccaagccccgagagcagctgcggctttaccagcgagagctaccagcagggcgtgctgagcgccaccatcctgtacgagatcctgctgggcaaggccaccctgtacgccgtgctggtgtctgccctggtgctgatggctatggtcaagcggaaggacagccgggga

SEQ ID NO: 37730 - DNA, 1872 bp, synthetic construct
  source 1..1872: mol_type = other DNA
atggccttaccagtgaccgccttgctcctgccgctggccttgctgctccacgccgccaggccggacatcgtgatgacacagagccctgatagcctggccgtgtctctgggagagagagccaccatcaactgcaagagcagccagagcctgctgaacagcggcaacaacaagaactacgtgacatggtatcagcagaagcccggccagcctcctaagctgctgatctactggggcagcaccagatccacaggcgtgcccgatagattttctggctctggcagcggcaccgacttcaccctgacaatttctagcctgcaagccgaggacgtggccgtgtactactgccagaacgactacacataccccttcaccttcggccagggcaccaagctggaaatcaaactcgaggacctgaagaacgtgttcccacctgaggtggccgtgttcgagcctagcgaggccgagatcagccacacccagaaagccaccctcgtgtgcctggctaccggcttctaccccgaccatgtggaactgtcttggtgggtcaacggcaaagaggtgcacagcggcgtgtctaccgacccccagccactgaaagaacagcccgccctgaacgacagccggtactgcctgagcagcagactgagagtgtccgccaccttctggcagaacccccggaaccacttcagatgccaggtgcagttctacggcctgagcgagaacgacgagtggacccaggacagagccaagcccgtgacccagatcgtgtctgccgaagcctggggcagagccgattgcggctttaccagcgagagctaccagcagggcgtgctgagcgccaccaacctgagcgtgatcggcttcagaatcctgctgctgaaagtggccggctttaacctgctgatgaccctgcggctgtggtccagcagggccaagcgatctggatctggagcaacaaacttctcactactcaaacaagcaggtgacgtggaggagaatcccgggcctactagtatggactggatttggcgcatccttttccttgtcggcgctgctaccggcgcgcattccttcgaacaagttcagctggttcagagcggagccgaagtgaagaaacctggggcctctgtgaaggtgtcctgcaaggcttccggctataccttcaccagcttttggctgaactgggtccgacaggcccctggacaaggactggaatggatgggcaacatctaccccagcgacagctacaccgtgtacaaccagaaattcaaggaccgcgtgaccatgaccagggacaccagcacaagcacagtgtacatggaactgagcagcctgcggagcgaggataccgccgtgtattattgcgccagaacctggcggggcaacagcttcgattattggggccagggaaccaccgtgaccgtgtcatctacgcgtatccagaaccctgatcctgccgtgtaccagctgcgggatagcaagagcagcgacaagagcgtgtgtctgttcaccgacttcgacagccagaccaacgtgtcccagagcaaggactccgacgtgtacatcaccgataagaccgtgctggacatgcggagcatggacttcaagagcaactccgccgtggcctggtccaacaagtccgatttcgcctgcgccaacgccttcaacaacagcattatccccgaggacacattcttcccaagccccgagagcagctgcgacgtgaagctggtggaaaagagcttcgagacagacaccaacctgaacttccagatcctgtacgagatcctgctgggcaaggccaccctgtacgccgtgctggtgtctgccctggtgctgatggctatggtcaagcggaaggacagccgggga

SEQ ID NO: 37731 - DNA, 2184 bp, synthetic construct
  source 1..2184: mol_type = other DNA
atggccttaccagtgaccgccttgctcctgccgctggccttgctgctccacgccgccaggccggacatcgtgatgacacagagccctgatagcctggccgtgtctctgggagagagagccaccatcaactgcaagagcagccagagcctgctgaacagcggcaacaacaagaactacgtgacatggtatcagcagaagcccggccagcctcctaagctgctgatctactggggcagcaccagatccacaggcgtgcccgatagattttctggctctggcagcggcaccgacttcaccctgacaatttctagcctgcaagccgaggacgtggccgtgtactactgccagaacgactacacataccccttcaccttcggccagggcaccaagctggaaatcaaactcgaggacctgaagaacgtgttcccacctgaggtggccgtgttcgagcctagcgaggccgagatcagccacacccagaaagccaccctcgtgtgcctggctaccggcttctaccccgaccatgtggaactgtcttggtgggtcaacggcaaagaggtgcacagcggcgtgtctaccgacccccagccactgaaagaacagcccgccctgaacgacagccggtactgcctgagcagcagactgagagtgtccgccaccttctggcagaacccccggaaccacttcagatgccaggtgcagttctacggcctgagcgagaacgacgagtggacccaggacagagccaagcccgtgacccagatcgtgtctgccgaagcctggggcagagccgatgatgtgattaagatccactggcaggaaaagaagtccaacaccatcctgggcagccaggaaggcaacaccatgaagaccaacgacacctacatgaagttcagctggctgaccgtgcccgagaagtccctggacaaagaacacagatgcatcgtgcggcacgaaaacaacaagaacggcgtggaccaggaaatcatcttcccacccatcaagaccgatgtgattacaatggaccccaaggacaactgctccaaggacgccaacgataccctgctgctccagctgaccaacaccagcgcctactacatgtacttgttgctgctgctgaagtccgtggtgtacttcgccatcatcacatgctgcctgctgatggctatggtcaagcggaaggacagccggggaagggccaagcgatctggatctggagcaacaaacttctcactactcaaacaagcaggtgacgtggaggagaatcccgggcctactagtatggactggatttggcgcatccttttccttgtcggcgctgctaccggcgcgcattccttcgaacaagttcagctggttcagagcggagccgaagtgaagaaacctggggcctctgtgaaggtgtcctgcaaggcttccggctataccttcaccagcttttggctgaactgggtccgacaggcccctggacaaggactggaatggatgggcaacatctaccccagcgacagctacaccgtgtacaaccagaaattcaaggaccgcgtgaccatgaccagggacaccagcacaagcacagtgtacatggaactgagcagcctgcggagcgaggataccgccgtgtattattgcgccagaacctggcggggcaacagcttcgattattggggccagggaaccaccgtgaccgtgtcatctacgcgtatccagaaccctgatcctgccgtgtaccagctgcgggatagcaagagcagcgacaagagcgtgtgtctgttcaccgacttcgacagccagaccaacgtgtcccagagcaaggactccgacgtgtacatcaccgataagaccgtgctggacatgcggagcatggacttcaagagcaactccgccgtggcctggtccaacaagtccgatttcgcctgcgccaacgccttcaacaacagcattatccccgaggacacattcttcccaagccccgagagcagcgactccaccgaccacgtgaagcccaaagagacagagaacaccaagcagcccagcaagagctgccacaagcccaaggccatcgtgcacaccgagaaagtgaacatgatgagcctgaccgtgctgggcctgcggatgctgttcgccaaaaccgtggccgtgaacttcctgctgaccgccaagctgttcttcctcctcaccgcc

SEQ ID NO: 37732 - DNA, 2178 bp, synthetic construct
  source 1..2178: mol_type = other DNA
atggccttaccagtgaccgccttgctcctgccgctggccttgctgctccacgccgccaggccggacatcgtgatgacacagagccctgatagcctggccgtgtctctgggagagagagccaccatcaactgcaagagcagccagagcctgctgaacagcggcaacaacaagaactacgtgacatggtatcagcagaagcccggccagcctcctaagctgctgatctactggggcagcaccagatccacaggcgtgcccgatagattttctggctctggcagcggcaccgacttcaccctgacaatttctagcctgcaagccgaggacgtggccgtgtactactgccagaacgactacacataccccttcaccttcggccagggcaccaagctggaaatcaaactcgaggacctgaagaacgtgttcccacctgaggtggccgtgttcgagcctagcgaggccgagatcagccacacccagaaagccaccctcgtgtgcctggctaccggcttctaccccgaccatgtggaactgtcttggtgggtcaacggcaaagaggtgcacagcggcgtgtctaccgacccccagccactgaaagaacagcccgccctgaacgacagccggtactgcctgagcagcagactgagagtgtccgccaccttctggcagaacccccggaaccacttcagatgccaggtgcagttctacggcctgagcgagaacgacgagtggacccaggacagagccaagcccgtgacccagatcgtgtctgccgaagcctggggcagagccgatgatgtgattaagatccactggcaggaaaagaagtccaacaccatcctgggcagccaggaaggcaacaccatgaagaccaacgacacctacatgaagttcagctggctgaccgtgcccgagaagtccctggacaaagaacacagatgcatcgtgcggcacgaaaacaacaagaacggcgtggaccaggaaatcatcttcccacccatcaagaccgatgtgattacaatggaccccaaggacaactgctccaaggacgccaacgataccctgctgctccagctgaccaacaccagcgcctactacatgtacttgttgctgctgctgaagtccgtggtgtacttcgccatcatcacatgctgcctgctgcggagaaccgccttctgctgcaacggcgagaagtctagggccaagcgatctggatctggagcaacaaacttctcactactcaaacaagcaggtgacgtggaggagaatcccgggcctactagtatggactggatttggcgcatccttttccttgtcggcgctgctaccggcgcgcattccttcgaacaagttcagctggttcagagcggagccgaagtgaagaaacctggggcctctgtgaaggtgtcctgcaaggcttccggctataccttcaccagcttttggctgaactgggtccgacaggcccctggacaaggactggaatggatgggcaacatctaccccagcgacagctacaccgtgtacaaccagaaattcaaggaccgcgtgaccatgaccagggacaccagcacaagcacagtgtacatggaactgagcagcctgcggagcgaggataccgccgtgtattattgcgccagaacctggcggggcaacagcttcgattattggggccagggaaccaccgtgaccgtgtcatctacgcgtatccagaaccctgatcctgccgtgtaccagctgcgggatagcaagagcagcgacaagagcgtgtgtctgttcaccgacttcgacagccagaccaacgtgtcccagagcaaggactccgacgtgtacatcaccgataagaccgtgctggacatgcggagcatggacttcaagagcaactccgccgtggcctggtccaacaagtccgatttcgcctgcgccaacgccttcaacaacagcattatccccgaggacacattcttcccaagccccgagagcagcgactccaccgaccacgtgaagcccaaagagacagagaacaccaagcagcccagcaagagctgccacaagcccaaggccatcgtgcacaccgagaaagtgaacatgatgagcctgaccgtgctgggcctgcggatgctgttcgccaaaaccgtggccgtgaacttcctgctgaccgccaagctgttcttcctc

SEQ ID NO: 37733 - DNA, 2610 bp, synthetic construct
  source 1..2610: mol_type = other DNA
atggccttaccagtgaccgccttgctcctgccgctggccttgctgctccacgccgccaggccgctcgaggaggacctgaagaacgtgttcccacctgaggtggccgtgttcgagcctagcgaggccgagatcagccacacccagaaagccaccctcgtgtgcctggctaccggcttctaccccgaccatgtggaactgtcttggtgggtcaacggcaaagaggtgcacagcggcgtgtgtaccgacccccagccactgaaagaacagcccgccctgaacgacagccggtactgcctgagcagcagactgagagtgtccgccaccttctggcagaacccccggaaccacttcagatgccaggtgcagttctacggcctgagcgagaacgacgagtggacccaggacagagccaagcccgtgacccagatcgtgtctgccgaagcctggggcagagccgattgcggctttaccagcgagagctaccagcagggcgtgctgagcgccaccaacctgagcgtgatcggcttcagaatcctgctgctgaaagtggccggctttaacctgctgatgaccctgcggctgtggtccagcagggccaagcgatctggatctggagcaacaaacttctcactactcaaacaagcaggtgacgtggaggagaatcccgggcctactagcatggccttaccagtgaccgccttgctcctgccgctggccttgctgctccacgccgccaggccggacatcgtgatgacacagagccctgatagcctggccgtgtctctgggagagagagccaccatcaactgcaagagcagccagagcctgctgaacagcggcaacaacaagaactacgtgacatggtatcagcagaagcccggccagcctcctaagctgctgatctactggggcagcaccagatccacaggcgtgcccgatagattttctggctctggcagcggcaccgacttcaccctgacaatttctagcctgcaagccgaggacgtggccgtgtactactgccagaacgactacacataccccttcaccttcggccagggcaccaagctggaaatcaaaggcggaggcggaagtggaggcggaggatctggcggcggaggctctcaagttcagctggttcagagcggagccgaagtgaagaaacctggggcctctgtgaaggtgtcctgcaaggcttccggctataccttcaccagcttttggctgaactgggtccgacaggcccctggacaaggactggaatggatgggcaacatctaccccagcgacagctacaccgtgtacaaccagaaattcaaggaccgcgtgaccatgaccagggacaccagcacaagcacagtgtacatggaactgagcagcctgcggagcgaggataccgccgtgtattattgcgccagaacctggcggggcaacagcttcgattattggggccagggaaccaccgtgaccgtgtcatctacgcgtatccagaaccctgatcctgccgtgtaccagctgcgggatagcaagagcagcgacaagagcgtgtgtctgttcaccgacttcgacagccagaccaacgtgtcccagagcaaggactccgacgtgtacatcaccgataagtgcgtgctggacatgcggagcatggacttcaagagcaactccgccgtggcctggtccaacaagtccgatttcgcctgcgccaacgccttcaacaacagcattatccccgaggacacattcttcccaagccccgagagcagctgcgacgtgaagctggtggaaaagagcttcgagacagacaccaacctgaacttccagatcctgtacgaggtgatcggcttcagaatcctgctgctgaaagtggccggctttaacctgctgatgaccctgcggctgtggtccagccgcgccaagagaagcggatctggcgtgaagcagaccctgaatttcgacctgctgaagctggctggcgacgtggaatccaacccaggcccttctagaggccatatgaccgagtacaagcccacggtgcgcctcgccacccgcgacgacgtccccagggccgtacgcaccctcgccgccgcgttcgccgactaccccgccacgcgccacaccgtcgatccggaccgccacatcgagcgggtcaccgagctgcaagaactcttcctcacgcgcgtcgggctcgacatcggcaaggtgtgggtcgcggacgacggcgccgcggtggcggtctggaccacgccggagagcgtcgaagcgggggcggtgttcgccgagatcggcccgcgcatggccgagttgagcggttcccggctggccgcgcagcaacagatggaaggcctcctggcgccgcaccggcccaaggagcccgcgtggttcctggccaccgtcggcgtctcgcccgaccaccagggcaagggtctgggcagcgccgtcgtgctccccggagtggaggcggccgagcgcgccggggtgcccgccttcctggagacctccgcgccccgcaacctccccttctacgagcggctcggcttcaccgtcaccgccgacgtcgaggtgcccgaaggaccgcgcacctggtgcatgacccgcaagcccggtgcctga

SEQ ID NO: 37734 - DNA, 2610 bp, synthetic construct
  source 1..2610: mol_type = other DNA
atggccttaccagtgaccgccttgctcctgccgctggccttgctgctccacgccgccaggccgctcgagatccagaaccctgatcctgccgtgtaccagctgcgggatagcaagagcagcgacaagagcgtgtgtctgttcaccgacttcgacagccagaccaacgtgtcccagagcaaggactccgacgtgtacatcaccgataagtgcgtgctggacatgcggagcatggacttcaagagcaactccgccgtggcctggtccaacaagtccgatttcgcctgcgccaacgccttcaacaacagcattatccccgaggacacattcttcccaagccccgagagcagctgcgacgtgaagctggtggaaaagagcttcgagacagacaccaacctgaacttccagatcctgtacgaggtgatcggcttcagaatcctgctgctgaaagtggccggctttaacctgctgatgaccctgcggctgtggtccagcagggccaagcgatctggatctggagcaacaaacttctcactactcaaacaagcaggtgacgtggaggagaatcccgggcctactagcatggccttaccagtgaccgccttgctcctgccgctggccttgctgctccacgccgccaggccggacatcgtgatgacacagagccctgatagcctggccgtgtctctgggagagagagccaccatcaactgcaagagcagccagagcctgctgaacagcggcaacaacaagaactacgtgacatggtatcagcagaagcccggccagcctcctaagctgctgatctactggggcagcaccagatccacaggcgtgcccgatagattttctggctctggcagcggcaccgacttcaccctgacaatttctagcctgcaagccgaggacgtggccgtgtactactgccagaacgactacacataccccttcaccttcggccagggcaccaagctggaaatcaaaggcggaggcggaagtggaggcggaggatctggcggcggaggctctcaagttcagctggttcagagcggagccgaagtgaagaaacctggggcctctgtgaaggtgtcctgcaaggcttccggctataccttcaccagcttttggctgaactgggtccgacaggcccctggacaaggactggaatggatgggcaacatctaccccagcgacagctacaccgtgtacaaccagaaattcaaggaccgcgtgaccatgaccagggacaccagcacaagcacagtgtacatggaactgagcagcctgcggagcgaggataccgccgtgtattattgcgccagaacctggcggggcaacagcttcgattattggggccagggaaccaccgtgaccgtgtcatctacgcgtgaggacctgaagaacgtgttcccacctgaggtggccgtgttcgagcctagcgaggccgagatcagccacacccagaaagccaccctcgtgtgcctggctaccggcttctaccccgaccatgtggaactgtcttggtgggtcaacggcaaagaggtgcacagcggcgtgtgtaccgacccccagccactgaaagaacagcccgccctgaacgacagccggtactgcctgagcagcagactgagagtgtccgccaccttctggcagaacccccggaaccacttcagatgccaggtgcagttctacggcctgagcgagaacgacgagtggacccaggacagagccaagcccgtgacccagatcgtgtctgccgaagcctggggcagagccgattgcggctttaccagcgagagctaccagcagggcgtgctgagcgccaccaacctgagcgtgatcggcttcagaatcctgctgctgaaagtggccggctttaacctgctgatgaccctgcggctgtggtccagccgcgccaagagaagcggatctggcgtgaagcagaccctgaatttcgacctgctgaagctggctggcgacgtggaatccaacccaggcccttctagaggccatatgaccgagtacaagcccacggtgcgcctcgccacccgcgacgacgtccccagggccgtacgcaccctcgccgccgcgttcgccgactaccccgccacgcgccacaccgtcgatccggaccgccacatcgagcgggtcaccgagctgcaagaactcttcctcacgcgcgtcgggctcgacatcggcaaggtgtgggtcgcggacgacggcgccgcggtggcggtctggaccacgccggagagcgtcgaagcgggggcggtgttcgccgagatcggcccgcgcatggccgagttgagcggttcccggctggccgcgcagcaacagatggaaggcctcctggcgccgcaccggcccaaggagcccgcgtggttcctggccaccgtcggcgtctcgcccgaccaccagggcaagggtctgggcagcgccgtcgtgctccccggagtggaggcggccgagcgcgccggggtgcccgccttcctggagacctccgcgccccgcaacctccccttctacgagcggctcggcttcaccgtcaccgccgacgtcgaggtgcccgaaggaccgcgcacctggtgcatgacccgcaagcccggtgcctga

SEQ ID NO: 37735 - DNA, 2610 bp, synthetic construct; identical to SEQ ID NO: 37733
  source 1..2610: mol_type = other DNA

SEQ ID NO: 37736 - DNA, 2934 bp, synthetic construct
  source 1..2934: mol_type = other DNA
atggccttaccagtgaccgccttgctcctgccgctggccttgctgctccacgccgccaggccgctcgaggaggacctgaagaacgtgttcccacctgaggtggccgtgttcgagcctagcgaggccgagatcagccacacccagaaagccaccctcgtgtgcctggctaccggcttctaccccgaccatgtggaactgtcttggtgggtcaacggcaaagaggtgcacagcggcgtgtctaccgacccccagccactgaaagaacagcccgccctgaacgacagccggtactgcctgagcagcagactgagagtgtccgccaccttctggcagaacccccggaaccacttcagatgccaggtgcagttctacggcctgagcgagaacgacgagtggacccaggacagagccaagcccgtgacccagatcgtgtctgccgaagcctggggcagagccgatgatgtgattaagatccactggcaggaaaagaagtccaacaccatcctgggcagccaggaaggcaacaccatgaagaccaacgacacctacatgaagttcagctggctgaccgtgcccgagaagtccctggacaaagaacacagatgcatcgtgcggcacgaaaacaacaagaacggcgtggaccaggaaatcatcttcccacccatcaagaccgatgtgattacaatggaccccaaggacaactgctccaaggacgccaacgataccctgctgctccagctgaccaacaccagcgcctactacatgtacttgttgctgctgctgaagtccgtggtgtacttcgccatcatcacatgctgcctgctgatggctatggtcaagcggaaggacagccggggaagggccaagcgatctggatctggagcaacaaacttctcactactcaaacaagcaggtgacgtggaggagaatcccgggcctactagcatggccttaccagtgaccgccttgctcctgccgctggccttgctgctccacgccgccaggccggacatcgtgatgacacagagccctgatagcctggccgtgtctctgggagagagagccaccatcaactgcaagagcagccagagcctgctgaacagcggcaacaacaagaactacgtgacatggtatcagcagaagcccggccagcctcctaagctgctgatctactggggcagcaccagatccacaggcgtgcccgatagattttctggctctggcagcggcaccgacttcaccctgacaatttctagcctgcaagccgaggacgtggccgtgtactactgccagaacgactacacataccccttcaccttcggccagggcaccaagctggaaatcaaaggcggaggcggaagtggaggcggaggatctggcggcggaggctctcaagttcagctggttcagagcggagccgaagtgaagaaacctggggcctctgtgaaggtgtcctgcaaggcttccggctataccttcaccagcttttggctgaactgggtccgacaggcccctggacaaggactggaatggatgggcaacatctaccccagcgacagctacaccgtgtacaaccagaaattcaaggaccgcgtgaccatgaccagggacaccagcacaagcacagtgtacatggaactgagcagcctgcggagcgaggataccgccgtgtattattgcgccagaacctggcggggcaacagcttcgattattggggccagggaaccaccgtgaccgtgtcatctacgcgtatccagaaccctgatcctgccgtgtaccagctgcgggatagcaagagcagcgacaagagcgtgtgtctgttcaccgacttcgacagccagaccaacgtgtcccagagcaaggactccgacgtgtacatcaccgataagaccgtgctggacatgcggagcatggacttcaagagcaactccgccgtggcctggtccaacaagtccgatttcgcctgcgccaacgccttcaacaacagcattatccccgaggacacattcttcccaagccccgagagcagcgactccaccgaccacgtgaagcccaaagagacagagaacaccaagcagcccagcaagagctgccacaagcccaaggccatcgtgcacaccgagaaagtgaacatgatgagcctgaccgtgctgggcctgcggatgctgttcgccaaaaccgtggccgtgaacttcctgctgaccgccaagctgttcttcctcctcaccgcccgcgccaagagaagcggatctggcgtgaagcagaccctgaatttcgacctgctgaagctggctggcgacgtggaatccaacccaggcccttctagaggccatatgaccgagtacaagcccacggtgcgcctcgccacccgcgacgacgtccccagggccgtacgcaccctcgccgccgcgttcgccgactaccccgccacgcgccacaccgtcgatccggaccgccacatcgagcgggtcaccgagctgcaagaactcttcctcacgcgcgtcgggctcgacatcggcaaggtgtgggtcgcggacgacggcgccgcggtggcggtctggaccacgccggagagcgtcgaagcgggggcggtgttcgccgagatcggcccgcgcatggccgagttgagcggttcccggctggccgcgcagcaacagatggaaggcctcctggcgccgcaccggcccaaggagcccgcgtggttcctggccaccgtcggcgtctcgcccgaccaccagggcaagggtctgggcagcgccgtcgtgctccccggagtggaggcggccgagcgcgccggggtgcccgccttcctggagacctccgcgccccgcaacctccccttctacgagcggctcggcttcaccgtcaccgccgacgtcgaggtgcccgaaggaccgcgcacctggtgcatgacccgcaagcccggtgcctga

SEQ ID NO: 37737 - DNA, 2934 bp, synthetic construct
  source 1..2934: mol_type = other DNA
atggccttaccagtgaccgccttgctcctgccgctggccttgctgctccacgccgccaggccgctcgagatccagaaccctgatcctgccgtgtaccagctgcgggatagcaagagcagcgacaagagcgtgtgtctgttcaccgacttcgacagccagaccaacgtgtcccagagcaaggactccgacgtgtacatcaccgataagaccgtgctggacatgcggagcatggacttcaagagcaactccgccgtggcctggtccaacaagtccgatttcgcctgcgccaacgccttcaacaacagcattatccccgaggacacattcttcccaagccccgagagcagcgactccaccgaccacgtgaagcccaaagagacagagaacaccaagcagcccagcaagagctgccacaagcccaaggccatcgtgcacaccgagaaagtgaacatgatgagcctgaccgtgctgggcctgcggatgctgttcgccaaaaccgtggccgtgaacttcctgctgaccgccaagctgttcttcctcctcaccgccagggccaagcgatctggatctggagcaacaaacttctcactactcaaacaagcaggtgacgtggaggagaatcccgggcctactagcatggccttaccagtgaccgccttgctcctgccgctggccttgctgctccacgccgccaggccggacatcgtgatgacacagagccctgatagcctggccgtgtctctgggagagagagccaccatcaactgcaagagcagccagagcctgctgaacagcggcaacaacaagaactacgtgacatggtatcagcagaagcccggccagcctcctaagctgctgatctactggggcagcaccagatccacaggcgtgcccgatagattttctggctctggcagcggcaccgacttcaccctgacaatttctagcctgcaagccgaggacgtggccgtgtactactgccagaacgactacacataccccttcaccttcggccagggcaccaagctggaaatcaaaggcggaggcggaagtggaggcggaggatctggcggcggaggctctcaagttcagctggttcagagcggagccgaagtgaagaaacctggggcctctgtgaaggtgtcctgcaaggcttccggctataccttcaccagcttttggctgaactgggtccgacaggcccctggacaaggactggaatggatgggcaacatctaccccagcgacagctacaccgtgtacaaccagaaattcaaggaccgcgtgaccatgaccagggacaccagcacaagcacagtgtacatggaactgagcagcctgcggagcgaggataccgccgtgtattattgcgccagaacctggcggggcaacagcttcgattattggggccagggaaccaccgtgaccgtgtcatctacgcgtgaggacctgaagaacgtgttcccacctgaggtggccgtgttcgagcctagcgaggccgagatcagccacacccagaaagccaccctcgtgtgcctggctaccggcttctaccccgaccatgtggaactgtcttggtgggtcaacggcaaagaggtgcacagcggcgtgtctaccgacccccagccactgaaagaacagcccgccctgaacgacagccggtactgcctgagcagcagactgagagtgtccgccaccttctggcagaacccccggaaccacttcagatgccaggtgcagttctacggcctgagcgagaacgacgagtggacccaggacagagccaagcccgtgacccagatcgtgtctgccgaagcctggggcagagccgatgatgtgattaagatccactggcaggaaaagaagtccaacaccatcctgggcagccaggaaggcaacaccatgaagaccaacgacacctacatgaagttcagctggctgaccgtgcccgagaagtccctggacaaagaacacagatgcatcgtgcggcacgaaaacaacaagaacggcgtggaccaggaaatcatcttcccacccatcaagaccgatgtgattacaatggaccccaaggacaactgctccaaggacgccaacgataccctgctgctccagctgaccaacaccagcgcctactacatgtacttgttgctgctgctgaagtccgtggtgtacttcgccatcatcacatgctgcctgctgatggctatggtcaagcggaaggacagccggggacgcgccaagagaagcggatctggcgtgaagcagaccctgaatttcgacctgctgaagctggctggcgacgtggaatccaacccaggcccttctagaggccatatgaccgagtacaagcccacggtgcgcctcgccacccgcgacgacgtccccagggccgtacgcaccctcgccgccgcgttcgccgactaccccgccacgcgccacaccgtcgatccggaccgccacatcgagcgggtcaccgagctgcaagaactcttcctcacgcgcgtcgggctcgacatcggcaaggtgtgggtcgcggacgacggcgccgcggtggcggtctggaccacgccggagagcgtcgaagcgggggcggtgttcgccgagatcggcccgcgcatggccgagttgagcggttcccggctggccgcgcagcaacagatggaaggcctcctggcgccgcaccggcccaaggagcccgcgtggttcctggccaccgtcggcgtctcgcccgaccaccagggcaagggtctgggcagcgccgtcgtgctccccggagtggaggcggccgagcgcgccggggtgcccgccttcctggagacctccgcgccccgcaacctccccttctacgagcggctcggcttcaccgtcaccgccgacgtcgaggtgcccgaaggaccgcgcacctggtgcatgacccgcaagcccggtgcctga

SEQ ID NO: 37738 - DNA, 2928 bp, synthetic construct
  source 1..2928: mol_type = other DNA
atggccttaccagtgaccgccttgctcctgccgctggccttgctgctccacgccgccaggccgctcgaggaggacctgaagaacgtgttcccacctgaggtggccgtgttcgagcctagcgaggccgagatcagccacacccagaaagccaccctcgtgtgcctggctaccggcttctaccccgaccatgtggaactgtcttggtgggtcaacggcaaagaggtgcacagcggcgtgtgtaccgacccccagccactgaaagaacagcccgccctgaacgacagccggtactgcctgagcagcagactgagagtgtccgccaccttctggcagaacccccggaaccacttcagatgccaggtgcagttctacggcctgagcgagaacgacgagtggacccaggacagagccaagcccgtgacccagatcgtgtctgccgaagcctggggcagagccgatgatgtgattaagatccactggcaggaaaagaagtccaacaccatcctgggcagccaggaaggcaacaccatgaagaccaacgacacctacatgaagttcagctggctgaccgtgcccgagaagtccctggacaaagaacacagatgcatcgtgcggcacgaaaacaacaagaacggcgtggaccaggaaatcatcttcccacccatcaagaccgatgtgattacaatggaccccaaggacaactgctccaaggacgccaacgataccctgctgctccagctgaccaacaccagcgcctactacatgtacttgttgctgctgctgaagtccgtggtgtacttcgccatcatcacatgctgcctgctgcggagaaccgccttctgctgcaacggcgagaagtctagggccaagcgatctggatctggagcaacaaacttctcactactcaaacaagcaggtgacgtggaggagaatcccgggcctactagcatggccttaccagtgaccgccttgctcctgccgctggccttgctgctccacgccgccaggccggacatcgtgatgacacagagccctgatagcctggccgtgtctctgggagagagagccaccatcaactgcaagagcagccagagcctgctgaacagcggcaacaacaagaactacgtgacatggtatcagcagaagcccggccagcctcctaagctgctgatctactggggcagcaccagatccacaggcgtgcccgatagattttctggctctggcagcggcaccgacttcaccctgacaatttctagcctgcaagccgaggacgtggccgtgtactactgccagaacgactacacataccccttcaccttcggccagggcaccaagctggaaatcaaaggcggaggcggaagtggaggcggaggatctggcggcggaggctctcaagttcagctggttcagagcggagccgaagtgaagaaacctggggcctctgtgaaggtgtcctgcaaggcttccggctataccttcaccagcttttggctgaactgggtccgacaggcccctggacaaggactggaatggatgggcaacatctaccccagcgacagctacaccgtgtacaaccagaaattcaaggaccgcgtgaccatgaccagggacaccagcacaagcacagtgtacatggaactgagcagcctgcggagcgaggataccgccgtgtattattgcgccagaacctggcggggcaacagcttcgattattggggccagggaaccaccgtgaccgtgtcatctacgcgtatccagaaccctgatcctgccgtgtaccagctgcgggatagcaagagcagcgacaagagcgtgtgtctgttcaccgacttcgacagccagaccaacgtgtcccagagcaaggactccgacgtgtacatcaccgataagtgcgtgctggacatgcggagcatggacttcaagagcaactccgccgtggcctggtccaacaagtccgatttcgcctgcgccaacgccttcaacaacagcattatccccgaggacacattcttcccaagccccgagagcagcgactccaccgaccacgtgaagcccaaagagacagagaacaccaagcagcccagcaagagctgccacaagcccaaggccatcgtgcacaccgagaaagtgaacatgatgagcctgaccgtgctgggcctgcggatgctgttcgccaaaaccgtggccgtgaacttcctgctgaccgccaagctgttcttcctccgcgccaagagaagcggatctggcgtgaagcagaccctgaatttcgacctgctgaagctggctggcgacgtggaatccaacccaggcccttctagaggccatatgaccgagtacaagcccacggtgcgcctcgccacccgcgacgacgtccccagggccgtacgcaccctcgccgccgcgttcgccgactaccccgccacgcgccacaccgtcgatccggaccgccacatcgagcgggtcaccgagctgcaagaactcttcctcacgcgcgtcgggctcgacatcggcaaggtgtgggtcgcggacgacggcgccgcggtggcggtctggaccacgccggagagcgtcgaagcgggggcggtgttcgccgagatcggcccgcgcatggccgagttgagcggttcccggctggccgcgcagcaacagatggaaggcctcctggcgccgcaccggcccaaggagcccgcgtggttcctggccaccgtcggcgtctcgcccgaccaccagggcaagggtctgggcagcgccgtcgtgctccccggagtggaggcggccgagcgcgccggggtgcccgccttcctggagacctccgcgccccgcaacctccccttctacgagcggctcggcttcaccgtcaccgccgacgtcgaggtgcccgaaggaccgcgcacctggtgcatgacccgcaagcccggtgcctga

SEQ ID NO: 37739 - DNA, 2928 bp, synthetic construct
  source 1..2928: mol_type = other DNA
atggccttaccagtgaccgccttgctcctgccgctggccttgctgctccacgccgccaggccgctcgagatccagaaccctgatcctgccgtgtaccagctgcgggatagcaagagcagcgacaagagcgtgtgtctgttcaccgacttcgacagccagaccaacgtgtcccagagcaaggactccgacgtgtacatcaccgataagtgcgtgctggacatgcggagcatggacttcaagagcaactccgccgtggcctggtccaacaagtccgatttcgcctgcgccaacgccttcaacaacagcattatccccgaggacacattcttcccaagccccgagagcagcgactccaccgaccacgtgaagcccaaagagacagagaacaccaagcagcccagcaagagctgccacaagcccaaggccatcgtgcacaccgagaaagtgaacatgatgagcctgaccgtgctgggcctgcggatgctgttcgccaaaaccgtggccgtgaacttcctgctgaccgccaagctgttcttcctcagggccaagcgatctggatctggagcaacaaacttctcactactcaaacaagcaggtgacgtggaggagaatcccgggcctactagcatggccttaccagtgaccgccttgctcctgccgctggccttgctgctccacgccgccaggccggacatcgtgatgacacagagccctgatagcctggccgtgtctctgggagagagagccaccatcaactgcaagagcagccagagcctgctgaacagcggcaacaacaagaactacgtgacatggtatcagcagaagcccggccagcctcctaagctgctgatctactggggcagcaccagatccacaggcgtgcccgatagattttctggctctggcagcggcaccgacttcaccctgacaatttctagcctgcaagccgaggacgtggccgtgtactactgccagaacgactacacataccccttcaccttcggccagggcaccaagctggaaatcaaaggcggaggcggaagtggaggcggaggatctggcggcggaggctctcaagttcagctggttcagagcggagccgaagtgaagaaacctggggcctctgtgaaggtgtcctgcaaggcttccggctataccttcaccagcttttggctgaactgggtccgacaggcccctggacaaggactggaatggatgggcaacatctaccccagcgacagctacaccgtgtacaaccagaaattcaaggaccgcgtgaccatgaccagggacaccagcacaagcacagtgtacatggaactgagcagcctgcggagcgaggataccgccgtgtattattgcgccagaacctggcggggcaacagcttcgattattggggccagggaaccaccgtgaccgtgtcatctacgcgtgaggacctgaagaacgtgttcccacctgaggtggccgtgttcgagcctagcgaggccgagatcagccacacccagaaagccaccctcgtgtgcctggctaccggcttctaccccgaccatgtggaactgtcttggtgggtcaacggcaaagaggtgcacagcggcgtgtgtaccgacccccagccactgaaagaacagcccgccctgaacgacagccggtactgcctgagcagcagactgagagtgtccgccaccttctggcagaacccccggaaccacttcagatgccaggtgcagttctacggcctgagcgagaacgacgagtggacccaggacagagccaagcccgtgacccagatcgtgtctgccgaagcctggggcagagccgatgatgtgattaagatccactggcaggaaaagaagtccaacaccatcctgggcagccaggaaggcaacaccatgaagaccaacgacacctacatgaagttcagctggctgaccgtgcccgagaagtccctggacaaagaacacagatgcatcgtgcggcacgaaaacaacaagaacggcgtggaccaggaaatcatcttcccacccatcaagaccgatgtgattacaatggaccccaaggacaactgctccaaggacgccaacgataccctgctgctccagctgaccaacaccagcgcctactacatgtacttgttgctgctgctgaagtccgtggtgtacttcgccatcatcacatgctgcctgctgcggagaaccgccttctgctgcaacggcgagaagtctcgcgccaagagaagcggatctggcgtgaagcagaccctgaatttcgacctgctgaagctggctggcgacgtggaatccaacccaggcccttctagaggccatatgaccgagtacaagcccacggtgcgcctcgccacccgcgacgacgtccccagggccgtacgcaccctcgccgccgcgttcgccgactaccccgccacgcgccacaccgtcgatccggaccgccacatcgagcgggtcaccgagctgcaagaactcttcctcacgcgcgtcgggctcgacatcggcaaggtgtgggtcgcggacgacggcgccgcggtggcggtctggaccacgccggagagcgtcgaagcgggggcggtgttcgccgagatcggcccgcgcatggccgagttgagcggttcccggctggccgcgcagcaacagatggaaggcctcctggcgccgcaccggcccaaggagcccgcgtggttcctggccaccgtcggcgtctcgcccgaccaccagggcaagggtctgggcagcgccgtcgtgctccccggagtggaggcggccgagcgcgccggggtgcccgccttcctggagacctccgcgccccgcaacctccccttctacgagcggctcggcttcaccgtcaccgccgacgtcgaggtgcccgaaggaccgcgcacctggtgcatgacccgcaagcccggtgcctga

SEQ ID NO: 37740 - DNA, 2928 bp, synthetic construct
  source 1..2928: mol_type = other DNA
atggccttaccagtgaccgccttgctcctgccgctggccttgctgctccacgccgccaggccgctcgaggaggacctgaagaacgtgttcccacctgaggtggccgtgttcgagcctagcgaggccgagatcagccacacccagaaagccaccctcgtgtgcctggctaccggcttctaccccgaccatgtggaactgtcttggtgggtcaacggcaaagaggtgcacagcggcgtgtctaccgacccccagccactgaaagaacagcccgccctgaacgacagccggtactgcctgagcagcagactgagagtgtccgccaccttctggcagaacccccggaaccacttcagatgccaggtgcagttctacggcctgagcgagaacgacgagtggacccaggacagagccaagcccgtgacccagatcgtgtctgccgaagcctggggcagagccgatgatgtgattaagatccactggcaggaaaagaagtccaacaccatcctgggcagccaggaaggcaacaccatgaagaccaacgacacctacatgaagttcagctggctgaccgtgcccgagaagtccctggacaaagaacacagatgcatcgtgcggcacgaaaacaacaagaacggcgtggaccaggaaatcatcttcccacccatcaagaccgatgtgattacaatggaccccaaggacaactgctccaaggacgccaacgataccctgctgctccagctgaccaacaccagcgcctactacatgtacttgttgctgctgctgaagtccgtggtgtacttcgccatcatcacatgctgcctgctgcggagaaccgccttctgctgcaacggcgagaagtctagggccaagcgatctggatctggagcaacaaacttctcactactcaaacaagcaggtgacgtggaggagaatcccgggcctactagcatggccttaccagtgaccgccttgctcctgccgctggccttgctgctccacgccgccaggccggacatcgtgatgacacagagccctgatagcctggccgtgtctctgggagagagagccaccatcaactgcaagagcagccagagcctgctgaacagcggcaacaacaagaactacgtgacatggtatcagcagaagcccggccagcctcctaagctgctgatctactggggcagcaccagatccacaggcgtgcccgatagattttctggctctggcagcggcaccgacttcaccctgacaatttctagcctgcaagccgaggacgtggccgtgtactactgccagaacgactacacataccccttcaccttcggccagggcaccaagctggaaatcaaaggcggaggcggaagtggaggcggaggatctggcggcggaggctctcaagttcagctggttcagagcggagccgaagtgaagaaacctggggcctctgtgaaggtgtcctgcaaggcttccggctataccttcaccagcttttggctgaactgggtccgacaggcccctggacaaggactggaatggatgggcaacatctaccccagcgacagctacaccgtgtacaaccagaaattcaaggaccgcgtgaccatgaccagggacaccagcacaagcacagtgtacatggaactgagcagcctgcggagcgaggataccgccgtgtattattgcgccagaacctggcggggcaacagcttcgattattggggccagggaaccaccgtgaccgtgtcatctacgcgtatccagaaccctgatcctgccgtgtaccagctgcgggatagcaagagcagcgacaagagcgtgtgtctgttcaccgacttcgacagccagaccaacgtgtcccagagcaaggactccgacgtgtacatcaccgataagaccgtgctggacatgcggagcatggacttcaagagcaactccgccgtggcctggtccaacaagtccgatttcgcctgcgccaacgccttcaacaacagcattatccccgaggacacattcttcccaagccccgagagcagcgactccaccgaccacgtgaagcccaaagagacagagaacaccaagcagcccagcaagagctgccacaagcccaaggccatcgtgcacaccgagaaagtgaacatgatgagcctgaccgtgctgggcctgcggatgctgttcgccaaaaccgtggccgtgaacttcctgctgaccgccaagctgttcttcctccgcgccaagagaagcggatctggcgtgaagcagaccctgaatttcgacctgctgaagctggctggcgacgtggaatccaacccaggcccttctagaggccatatgaccgagtacaagcccacggtgcgcctcgccacccgcgacgacgtccccagggccgtacgcaccctcgccgccgcgttcgccgactaccccgccacgcgccacaccgtcgatccggaccgccacatcgagcgggtcaccgagctgcaagaactcttcctcacgcgcgtcgggctcgacatcggcaaggtgtgggtcgcggacgacggcgccgcggtggcggtctggaccacgccggagagcgtcgaagcgggggcggtgttcgccgagatcggcccgcgcatggccgagttgagcggttcccggctggccgcgcagcaacagatggaaggcctcctggcgccgcaccggcccaaggagcccgcgtggttcctggccaccgtcggcgtctcgcccgaccaccagggcaagggtctgggcagcgccgtcgtgctccccggagtggaggcggccgagcgcgccggggtgcccgccttcctggagacctccgcgccccgcaacctccccttctacgagcggctcggcttcaccgtcaccgccgacgtcgaggtgcccgaaggaccgcgcacctggtgcatgacccgcaagcccggtgcctga

SEQ ID NO: 37741 - DNA, 2928 bp, synthetic construct
  source 1..2928: mol_type = other DNA
atggccttaccagtgaccgccttgctcctgccgctggccttgctgctccacgccgccaggccgctcgagatccagaaccctgatcctgccgtgtaccagctgcgggatagcaagagcagcgacaagagcgtgtgtctgttcaccgacttcgacagccagaccaacgtgtcccagagcaaggactccgacgtgtacatcaccgataagaccgtgctggacatgcggagcatggacttcaagagcaactccgccgtggcctggtccaacaagtccgatttcgcctgcgccaacgccttcaacaacagcattatccccgaggacacattcttcccaagccccgagagcagcgactccaccgaccacgtgaagcccaaagagacagagaacaccaagcagcccagcaagagctgccacaagcccaaggccatcgtgcacaccgagaaagtgaacatgatgagcctgaccgtgctgggcctgcggatgctgttcgccaaaaccgtggccgtgaacttcctgctgaccgccaagctgttcttcctcagggccaagcgatctggatctggagcaacaaacttctcactactcaaacaagcaggtgacgtggaggagaatcccgggcctactagcatggccttaccagtgaccgccttgctcctgccgctggccttgctgctccacgccgccaggccggacatcgtgatgacacagagccctgatagcctggccgtgtctctgggagagagagccaccatcaactgcaagagcagccagagcctgctgaacagcggcaacaacaagaactacgtgacatggtatcagcagaagcccggccagcctcctaagctgctgatctactggggcagcaccagatccacaggcgtgcccgatagattttctggctctggcagcggcaccgacttcaccctgacaatttctagcctgcaagccgaggacgtggccgtgtactactgccagaacgactacacataccccttcaccttcggccagggcaccaagctggaaatcaaaggcggaggcggaagtggaggcggaggatctggcggcggaggctctcaagttcagctggttcagagcggagccgaagtgaagaaacctggggcctctgtgaaggtgtcctgcaaggcttccggctataccttcaccagcttttggctgaactgggtccgacaggcccctggacaaggactggaatggatgggcaacatctaccccagcgacagctacaccgtgtacaaccagaaattcaaggaccgcgtgaccatgaccagggacaccagcacaagcacagtgtacatggaactgagcagcctgcggagcgaggataccgccgtgtattattgcgccagaacctggcggggcaacagcttcgattattggggccagggaaccaccgtgaccgtgtcatctacgcgtgaggacctgaagaacgtgttcccacctgaggtggccgtgttcgagcctagcgaggccgagatcagccacacccagaaagccaccctcgtgtgcctggctaccggcttctaccccgaccatgtggaactgtcttggtgggtcaacggcaaagaggtgcacagcggcgtgtctaccgacccccagccactgaaagaacagcccgccctgaacgacagccggtactgcctgagcagcagactgagagtgtccgccaccttctggcagaacccccggaaccacttcagatgccaggtgcagttctacggcctgagcgagaacgacgagtggacccaggacagagccaagcccgtgacccagatcgtgtctgccgaagcctggggcagagccgatgatgtgattaagatccactggcaggaaaagaagtccaacaccatcctgggcagccaggaaggcaacaccatgaagaccaacgacacctacatgaagttcagctggctgaccgtgcccgagaagtccctggacaaagaacacagatgcatcgtgcggcacgaaaacaacaagaacggcgtggaccaggaaatcatcttcccacccatcaagaccgatgtgattacaatggaccccaaggacaactgctccaaggacgccaacgataccctgctgctccagctgaccaacaccagcgcctactacatgtacttgttgctgctgctgaagtccgtggtgtacttcgccatcatcacatgctgcctgctgcggagaaccgccttctgctgcaacggcgagaagtctcgcgccaagagaagcggatctggcgtgaagcagaccctgaatttcgacctgctgaagctggctggcgacgtggaatccaacccaggcccttctagaggccatatgaccgagtacaagcccacggtgcgcctcgccacccgcgacgacgtccccagggccgtacgcaccctcgccgccgcgttcgccgactaccccgccacgcgccacaccgtcgatccggaccgccacatcgagcgggtcaccgagctgcaagaactcttcctcacgcgcgtcgggctcgacatcggcaaggtgtgggtcgcggacgacggcgccgcggtggcggtctggaccacgccggagagcgtcgaagcgggggcggtgttcgccgagatcggcccgcgcatggccgagttgagcggttcccggctggccgcgcagcaacagatggaaggcctcctggcgccgcaccggcccaaggagcccgcgtggttcctggccaccgtcggcgtctcgcccgaccaccagggcaagggtctgggcagcgccgtcgtgctccccggagtggaggcggccgagcgcgccggggtgcccgccttcctggagacctccgcgccccgcaacctccccttctacgagcggctcggcttcaccgtcaccgccgacgtcgaggtgcccgaaggaccgcgcacctggtgcatgacccgcaagcccggtgcctga

SEQ ID NO: 37742 - DNA, 2622 bp, synthetic construct
  source 1..2622: mol_type = other DNA
atggccttaccagtgaccgccttgctcctgccgctggccttgctgctccacgccgccaggccgctcgaggaggacctgaagaacgtgttcccacctgaggtggccgtgttcgagcctagcaaggccgagatcgcccacacccagaaagccaccctcgtgtgcctggctaccggcttctaccccgaccatgtggaactgtcttggtgggtcaacggcaaagaggtgcacagcggcgtgtgtaccgacccccagccactgaaagaacagcccgccctgaacgacagccggtactgcctgagcagcagactgagagtgtccgccaccttctggcagaacccccggaaccacttcagatgccaggtgcagttctacggcctgagcgagaacgacgagtggacccaggacagagccaagcccgtgacccagatcgtgtctgccgaagcctggggcagagccgattgcggcatcaccagcgccagctaccaccagggcgtgctgagcgccaccatcctgtacgagatcctgctgggcaaggccaccctgtacgccgtgctggtgtctgccctggtgctgatggctatggtcaagcggaaggacagccggggaagggccaagcgatctggatctggagcaacaaacttctcactactcaaacaagcaggtgacgtggaggagaatcccgggcctactagcatggccttaccagtgaccgccttgctcctgccgctggccttgctgctccacgccgccaggccggacatcgtgatgacacagagccctgatagcctggccgtgtctctgggagagagagccaccatcaactgcaagagcagccagagcctgctgaacagcggcaacaacaagaactacgtgacatggtatcagcagaagcccggccagcctcctaagctgctgatctactggggcagcaccagatccacaggcgtgcccgatagattttctggctctggcagcggcaccgacttcaccctgacaatttctagcctgcaagccgaggacgtggccgtgtactactgccagaacgactacacataccccttcaccttcggccagggcaccaagctggaaatcaaaggcggaggcggaagtggaggcggaggatctggcggcggaggctctcaagttcagctggttcagagcggagccgaagtgaagaaacctggggcctctgtgaaggtgtcctgcaaggcttccggctataccttcaccagcttttggctgaactgggtccgacaggcccctggacaaggactggaatggatgggcaacatctaccccagcgacagctacaccgtgtacaaccagaaattcaaggaccgcgtgaccatgaccagggacaccagcacaagcacagtgtacatggaactgagcagcctgcggagcgaggataccgccgtgtattattgcgccagaacctggcggggcaacagcttcgattattggggccagggaaccaccgtgaccgtgtcatctacgcgtatccagaaccctgatcctgccgtgtaccagctgcgggatagcaagagcagcgacaagagcgtgtgtctgttcaccgacttcgacagccagaccaacgtgtcccagagcaaggactccgacgtgtacatcaccgataagtgcgtgctggacatgcggagcatggacttcaagagcaactccgccgtggcctggtccaacaagtccgatttcgcctgcgccaacgccttcaacaacagcattatccccgaggacacattcttcccaagcagcgacgtgccctgcgacgtgaagctggtggaaaagagcttcgagacagacaccaacctgaacttccagaacctgagcgtgatcggcttcagaatcctgctgctgaaagtggccggctttaacctgctgatgaccctgcggctgtggtccagccgcgccaagagaagcggatctggcgtgaagcagaccctgaatttcgacctgctgaagctggctggcgacgtggaatccaacccaggcccttctagaggccatatgaccgagtacaagcccacggtgcgcctcgccacccgcgacgacgtccccagggccgtacgcaccctcgccgccgcgttcgccgactaccccgccacgcgccacaccgtcgatccggaccgccacatcgagcgggtcaccgagctgcaagaactcttcctcacgcgcgtcgggctcgacatcggcaaggtgtgggtcgcggacgacggcgccgcggtggcggtctggaccacgccggagagcgtcgaagcgggggcggtgttcgccgagatcggcccgcgcatggccgagttgagcggttcccggctggccgcgcagcaacagatggaaggcctcctggcgccgcaccggcccaaggagcccgcgtggttcctggccaccgtcggcgtctcgcccgaccaccagggcaagggtctgggcagcgccgtcgtgctccccggagtggaggcggccgagcgcgccggggtgcccgccttcctggagacctccgcgccccgcaacctccccttctacgagcggctcggcttcaccgtcaccgccgacgtcgaggtgcccgaaggaccgcgcacctggtgcatgacccgcaagcccggtgcctga

SEQ ID NO: 37743 - DNA, 2622 bp, synthetic construct
  source 1..2622: mol_type = other DNA
atggccttaccagtgaccgccttgctcctgccgctggccttgctgctccacgccgccaggccgctcgagatccagaaccctgatcctgccgtgtaccagctgcgggatagcaagagcagcgacaagagcgtgtgtctgttcaccgacttcgacagccagaccaacgtgtcccagagcaaggactccgacgtgtacatcaccgataagtgcgtgctggacatgcggagcatggacttcaagagcaactccgccgtggcctggtccaacaagtccgatttcgcctgcgccaacgccttcaacaacagcattatccccgaggacacattcttcccaagcagcgacgtgccctgcgacgtgaagctggtggaaaagagcttcgagacagacaccaacctgaacttccagaacctgagcgtgatcggcttcagaatcctgctgctgaaagtggccggctttaacctgctgatgaccctgcggctgtggtccagcagggccaagcgatctggatctggagcaacaaacttctcactactcaaacaagcaggtgacgtggaggagaatcccgggcctactagcatggccttaccagtgaccgccttgctcctgccgctggccttgctgctccacgccgccaggccggacatcgtgatgacacagagccctgatagcctggccgtgtctctgggagagagagccaccatcaactgcaagagcagccagagcctgctgaacagcggcaacaacaagaactacgtgacatggtatcagcagaagcccggccagcctcctaagctgctgatctactggggcagcaccagatccacaggcgtgcccgatagattttctggctctggcagcggcaccgacttcaccctgacaatttctagcctgcaagccgaggacgtggccgtgtactactgccagaacgactacacataccccttcaccttcggccagggcaccaagctggaaatcaaaggcggaggcggaagtggaggcggaggatctggcggcggaggctctcaagttcagctggttcagagcggagccgaagtgaagaaacctggggcctctgtgaaggtgtcctgcaaggcttccggctataccttcaccagcttttggctgaactgggtccgacaggcccctggacaaggactggaatggatgggcaacatctaccccagcgacagctacaccgtgtacaaccagaaattcaaggaccgcgtgaccatgaccagggacaccagcacaagcacagtgtacatggaactgagcagcctgcggagcgaggataccgccgtgtattattgcgccagaacctggcggggcaacagcttcgattattggggccagggaaccaccgtgaccgtgtcatctacgcgtgaggacctgaagaacgtgttcccacctgaggtggccgtgttcgagcctagcaaggccgagatcgcccacacccagaaagccaccctcgtgtgcctggctaccggcttctaccccgaccatgtggaactgtcttggtgggtcaacggcaaagaggtgcacagcggcgtgtgtaccgacccccagccactgaaagaacagcccgccctgaacgacagccggtactgcctgagcagcagactgagagtgtccgccaccttctggcagaacccccggaaccacttcagatgccaggtgcagttctacggcctgagcgagaacgacgagtggacccaggacagagccaagcccgtgacccagatcgtgtctgccgaagcctggggcagagccgattgcggcatcaccagcgccagctaccaccagggcgtgctgagcgccaccatcctgtacgagatcctgctgggcaaggccaccctgtacgccgtgctggtgtctgccctggtgctgatggctatggtcaagcggaaggacagccggggacgcgccaagagaagcggatctggcgtgaagcagaccctgaatttcgacctgctgaagctggctggcgacgtggaatccaacccaggcccttctagaggccatatgaccgagtacaagcccacggtgcgcctcgccacccgcgacgacgtccccagggccgtacgcaccctcgccgccgcgttcgccgactaccccgccacgcgccacaccgtcgatccggaccgccacatcgagcgggtcaccgagctgcaagaactcttcctcacgcgcgtcgggctcgacatcggcaaggtgtgggtcgcggacgacggcgccgcggtggcggtctggaccacgccggagagcgtcgaagcgggggcggtgttcgccgagatcggcccgcgcatggccgagttgagcggttcccggctggccgcgcagcaacagatggaaggcctcctggcgccgcaccggcccaaggagcccgcgtggttcctggccaccgtcggcgtctcgcccgaccaccagggcaagggtctgggcagcgccgtcgtgctccccggagtggaggcggccgagcgcgccggggtgcccgccttcctggagacctccgcgccccgcaacctccccttctacgagcggctcggcttcaccgtcaccgccgacgtcgaggtgcccgaaggaccgcgcacctggtgcatgacccgcaagcccggtgcctga

SEQ ID NO: 37744 - DNA, 2301 bp, synthetic construct
  source 1..2301: mol_type = other DNA
atggccttaccagtgaccgccttgctcctgccgctggccttgctgctccacgccgccaggccgctcgagcagagttttgggttgttggaccctaaattgtgctatctgttggacggaatcctgttcatttacggagtgatcctgaccgcattgttcctgcgggttaagttttccagatccgcagacgcacccgcttaccaacaagggcagaaccaactctacaatgaacttaatttggggcggagggaagagtacgacgttctggacaaaaggaggggacgagatcccgagatgggcggaaagcctcagcgaaggaagaatccgcaagaggggctttataacgaactccagaaagataaaatggcagaagcctatagtgagattgggatgaagggagaaaggaggaggggtaaaggtcacgatgggttgtaccaaggattgagcacagccactaaagatacctatgatgcgctccacatgcaggccctgccgccaagaagggccaagcgatctggatctggagcaacaaacttctcactactcaaacaagcaggtgacgtggaggagaatcccgggcctactagcatggccttaccagtgaccgccttgctcctgccgctggccttgctgctccacgccgccaggccggacatcgtgatgacacagagccctgatagcctggccgtgtctctgggagagagagccaccatcaactgcaagagcagccagagcctgctgaacagcggcaacaacaagaactacgtgacatggtatcagcagaagcccggccagcctcctaagctgctgatctactggggcagcaccagatccacaggcgtgcccgatagattttctggctctggcagcggcaccgacttcaccctgacaatttctagcctgcaagccgaggacgtggccgtgtactactgccagaacgactacacataccccttcaccttcggccagggcaccaagctggaaatcaaaggcggaggcggaagtggaggcggaggatctggcggcggaggctctcaagttcagctggttcagagcggagccgaagtgaagaaacctggggcctctgtgaaggtgtcctgcaaggcttccggctataccttcaccagcttttggctgaactgggtccgacaggcccctggacaaggactggaatggatgggcaacatctaccccagcgacagctacaccgtgtacaaccagaaattcaaggaccgcgtgaccatgaccagggacaccagcacaagcacagtgtacatggaactgagcagcctgcggagcgaggataccgccgtgtattattgcgccagaacctggcggggcaacagcttcgattattggggccagggaaccaccgtgaccgtgtcatctacgcgtgagctgggagagcctcagctgtgctatatcctggacgccatcctgtttctgtacggcatcgtgctgaccctgctgtactgccggctgaagatccaagtgcggaaggccgccatcaccagctacgagaaatccgacggcgtgtacaccggcctgagcaccagaaatcaagagacatacgagacactgaagcacgaaaagcctccacaacgcgccaagagaagcggatctggcgtgaagcagaccctgaatttcgacctgctgaagctggctggcgacgtggaatccaacccaggcccttctagaggccatatgaccgagtacaagcccacggtgcgcctcgccacccgcgacgacgtccccagggccgtacgcaccctcgccgccgcgttcgccgactaccccgccacgcgccacaccgtcgatccggaccgccacatcgagcgggtcaccgagctgcaagaactcttcctcacgcgcgtcgggctcgacatcggcaaggtgtgggtcgcggacgacggcgccgcggtggcggtctggaccacgccggagagcgtcgaagcgggggcggtgttcgccgagatcggcccgcgcatggccgagttgagcggttcccggctggccgcgcagcaacagatggaaggcctcctggcgccgcaccggcccaaggagcccgcgtggttcctggccaccgtcggcgtctcgcccgaccaccagggcaagggtctgggcagcgccgtcgtgctccccggagtggaggcggccgagcgcgccggggtgcccgccttcctggagacctccgcgccccgcaacctccccttctacgagcggctcggcttcaccgtcaccgccgacgtcgaggtgcccgaaggaccgcgcacctggtgcatgacccgcaagcccggtgcctga

SEQ ID NO: 37745 - DNA, 2934 bp, synthetic construct; identical to SEQ ID NO: 37736
  source 1..2934: mol_type = other DNA

SEQ ID NO: 37746 - DNA, 2934 bp, synthetic construct; identical to SEQ ID NO: 37737
  source 1..2934: mol_type = other DNA

SEQ ID NO: 37747 - DNA, 2931 bp, synthetic construct
  source 1..2931: mol_type = other DNA
atggccttaccagtgaccgccttgctcctgccgctggccttgctgctccacgccgccaggccgctcgaggaggaggacctgaagaacgtgttcccacctgaggtggccgtgttcgagcctagcgaggccgagatcagccacacccagaaagccaccctcgtgtgcctggctaccggcttctaccccgaccatgtggaactgtcttggtgggtcaacggcaaagaggtgcacagcggcgtgtgtaccgacccccagccactgaaagaacagcccgccctgaacgacagccggtactgcctgagcagcagactgagagtgtccgccaccttctggcagaacccccggaaccacttcagatgccaggtgcagttctacggcctgagcgagaacgacgagtggacccaggacagagccaagcccgtgacccagatcgtgtctgccgaagcctggggcagagccgatgatgtgattaagatccactggcaggaaaagaagtccaacaccatcctgggcagccaggaaggcaacaccatgaagaccaacgacacctacatgaagttcagctggctgaccgtgcccgagaagtccctggacaaagaacacagatgcatcgtgcggcacgaaaacaacaagaacggcgtggaccaggaaatcatcttcccacccatcaagaccgatgtgattacaatggaccccaaggacaactgctccaaggacgccaacgataccctgctgctccagctgaccaacaccagcgcctactacatgtacttgttgctgctgctgaagtccgtggtgtacttcgccatcatcacatgctgcctgctgcggagaaccgccttctgctgcaacggcgagaagtctagggccaagcgatctggatctggagcaacaaacttctcactactcaaacaagcaggtgacgtggaggagaatcccgggcctactagcatggccttaccagtgaccgccttgctcctgccgctggccttgctgctccacgccgccaggccggacatcgtgatgacacagagccctgatagcctggccgtgtctctgggagagagagccaccatcaactgcaagagcagccagagcctgctgaacagcggcaacaacaagaactacgtgacatggtatcagcagaagcccggccagcctcctaagctgctgatctactggggcagcaccagatccacaggcgtgcccgatagattttctggctctggcagcggcaccgacttcaccctgacaatttctagcctgcaagccgaggacgtggccgtgtactactgccagaacgactacacataccccttcaccttcggccagggcaccaagctggaaatcaaaggcggaggcggaagtggaggcggaggatctggcggcggaggctctcaagttcagctggttcagagcggagccgaagtgaagaaacctggggcctctgtgaaggtgtcctgcaaggcttccggctataccttcaccagcttttggctgaactgggtccgacaggcccctggacaaggactggaatggatgggcaacatctaccccagcgacagctacaccgtgtacaaccagaaattcaaggaccgcgtgaccatgaccagggacaccagcacaagcacagtgtacatggaactgagcagcctgcggagcgaggataccgccgtgtattattgcgccagaacctggcggggcaacagcttcgattattggggccagggaaccaccgtgaccgtgtcatctacgcgtatccagaaccctgatcctgccgtgtaccagctgcgggatagcaagagcagcgacaagagcgtgtgtctgttcaccgacttcgacagccagaccaacgtgtcccagagcaaggactccgacgtgtacatcaccgataagtgcgtgctggacatgcggagcatggacttcaagagcaactccgccgtggcctggtccaacaagtccgatttcgcctgcgccaacgccttcaacaacagcattatccccgaggacacattcttcccaagccccgagagcagcgactccaccgaccacgtgaagcccaaagagacagagaacaccaagcagcccagcaagagctgccacaagcccaaggccatcgtgcacaccgagaaagtgaacatgatgagcctgaccgtgctgggcctgcggatgctgttcgccaaaaccgtggccgtgaacttcctgctgaccgccaagctgttcttcctccgcgccaagagaagcggatctggcgtgaagcagaccctgaatttcgacctgctgaagctggctggcgacgtggaatccaacccaggcccttctagaggccatatgaccgagtacaagcccacggtgcgcctcgccacccgcgacgacgtccccagggccgtacgcaccctcgccgccgcgttcgccgactaccccgccacgcgccacaccgtcgatccggaccgccacatcgagcgggtcaccgagctgcaagaactcttcctcacgcgcgtcgggctcgacatcggcaaggtgtgggtcgcggacgacggcgccgcggtggcggtctggaccacgccggagagcgtcgaagcgggggcggtgttcgccgagatcggcccgcgcatggccgagttgagcggttcccggctggccgcgcagcaacagatggaaggcctcctggcgccgcaccggcccaaggagcccgcgtggttcctggccaccgtcggcgtctcgcccgaccaccagggcaagggtctgggcagcgccgtcgtgctccccggagtggaggcggccgagcgcgccggggtgcccgccttcctggagacctccgcgccccgcaacctccccttctacgagcggctcggcttcaccgtcaccgccgacgtcgaggtgcccgaaggaccgcgcacctggtgcatgacccgcaagcccggtgcctga

SEQ ID NO: 37748 - DNA, 2931 bp, synthetic construct
  source 1..2931: mol_type = other DNA
atggccttaccagtgaccgccttgctcctgccgctggccttgctgctccacgccgccaggccgctcgagatccagaaccctgatcctgccgtgtaccagctgcgggatagcaagagcagcgacaagagcgtgtgtctgttcaccgacttcgacagccagaccaacgtgtcccagagcaaggactccgacgtgtacatcaccgataagtgcgtgctggacatgcggagcatggacttcaagagcaactccgccgtggcctggtccaacaagtccgatttcgcctgcgccaacgccttcaacaacagcattatccccgaggacacattcttcccaagccccgagagcagcgactccaccgaccacgtgaagcccaaagagacagagaacaccaagcagcccagcaagagctgccacaagcccaaggccatcgtgcacaccgagaaagtgaacatgatgagcctgaccgtgctgggcctgcggatgctgttcgccaaaaccgtggccgtgaacttcctgctgaccgccaagctgttcttcctcagggccaagcgatctggatctggagcaacaaacttctcactactcaaacaagcaggtgacgtggaggagaatcccgggcctactagcatggccttaccagtgaccgccttgctcctgccgctggccttgctgctccacgccgccaggccggacatcgtgatgacacagagccctgatagcctggccgtgtctctgggagagagagccaccatcaactgcaagagcagccagagcctgctgaacagcggcaacaacaagaactacgtgacatggtatcagcagaagcccggccagcctcctaagctgctgatctactggggcagcaccagatccacaggcgtgcccgatagattttctggctctggcagcggcaccgacttcaccctgacaatttctagcctgcaagccgaggacgtggccgtgtactactgccagaacgactacacataccccttcaccttcggccagggcaccaagctggaaatcaaaggcggaggcggaagtggaggcggaggatctggcggcggaggctctcaagttcagctggttcagagcggagccgaagtgaagaaacctggggcctctgtgaaggtgtcctgcaaggcttccggctataccttcaccagcttttggctgaactgggtccgacaggcccctggacaaggactggaatggatgggcaacatctaccccagcgacagctacaccgtgtacaaccagaaattcaaggaccgcgtgaccatgaccagggacaccagcacaagcacagtgtacatggaactgagcagcctgcggagcgaggataccgccgtgtattattgcgccagaacctggcggggcaacagcttcgattattggggccagggaaccaccgtgaccgtgtcatctacgcgtgaggaggacctgaagaacgtgttcccacctgaggtggccgtgttcgagcctagcgaggccgagatcagccacacccagaaagccaccctcgtgtgcctggctaccggcttctaccccgaccatgtggaactgtcttggtgggtcaacggcaaagaggtgcacagcggcgtgtgtaccgacccccagccactgaaagaacagcccgccctgaacgacagccggtactgcctgagcagcagactgagagtgtccgccaccttctggcagaacccccggaaccacttcagatgccaggtgcagttctacggcctgagcgagaacgacgagtggacccaggacagagccaagcccgtgacccagatcgtgtctgccgaagcctggggcagagccgatgatgtgattaagatccactggcaggaaaagaagtccaacaccatcctgggcagccaggaaggcaacaccatgaagaccaacgacacctacatgaagttcagctggctgaccgtgcccgagaagtccctggacaaagaacacagatgcatcgtgcggcacgaaaacaacaagaacggcgtggaccaggaaatcatcttcccacccatcaagaccgatgtgattacaatggaccccaaggacaactgctccaaggacgccaacgataccctgctgctccagctgaccaacaccagcgcctactacatgtacttgttgctgctgctgaagtccgtggtgtacttcgccatcatcacatgctgcctgctgcggagaaccgccttctgctgcaacggcgagaagtctcgcgccaagagaagcggatctggcgtgaagcagaccctgaatttcgacctgctgaagctggctggcgacgtggaatccaacccaggcccttctagaggccatatgaccgagtacaagcccacggtgcgcctcgccacccgcgacgacgtccccagggccgtacgcaccctcgccgccgcgttcgccgactaccccgccacgcgccacaccgtcgatccggaccgccacatcgagcgggtcaccgagctgcaagaactcttcctcacgcgcgtcgggctcgacatcggcaaggtgtgggtcgcggacgacggcgccgcggtggcggtctggaccacgccggagagcgtcgaagcgggggcggtgttcgccgagatcggcccgcgcatggccgagttgagcggttcccggctggccgcgcagcaacagatggaaggcctcctggcgccgcaccggcccaaggagcccgcgtggttcctggccaccgtcggcgtctcgcccgaccaccagggcaagggtctgggcagcgccgtcgtgctccccggagtggaggcggccgagcgcgccggggtgcccgccttcctggagacctccgcgccccgcaacctccccttctacgagcggctcggcttcaccgtcaccgccgacgtcgaggtgcccgaaggaccgcgcacctggtgcatgacccgcaagcccggtgcctga

SEQ ID NO: 37749 - DNA, 2622 bp, synthetic construct
  source 1..2622: mol_type = other DNA
atggccttaccagtgaccgccttgctcctgccgctggccttgctgctccacgccgccaggccgctcgaggaggacctgaagaacgtgttcccacctgaggtggccgtgttcgagcctagcgaggccgagatcagccacacccagaaagccaccctcgtgtgcctggctaccggcttctaccccgaccatgtggaactgtcttggtgggtcaacggcaaagaggtgcacagcggcgtgtctaccgacccccagccactgaaagaacagcccgccctgaacgacagccggtactgcctgagcagcagactgagagtgtccgccaccttctggcagaacccccggaaccacttcagatgccaggtgcagttctacggcctgagcgagaacgacgagtggacccaggacagagccaagcccgtgacccagatcgtgtctgccgaagcctggggcagagccgattgcggctttaccagcgagagctaccagcagggcgtgctgagcgccaccaacctgagcgtgatcggcttcagaatcctgctgctgaaagtggccggctttaacctgctgatgaccctgcggctgtggtccagcagggccaagcgatctggatctggagcaacaaacttctcactactcaaacaagcaggtgacgtggaggagaatcccgggcctactagcatggccttaccagtgaccgccttgctcctgccgctggccttgctgctccacgccgccaggccggacatcgtgatgacacagagccctgatagcctggccgtgtctctgggagagagagccaccatcaactgcaagagcagccagagcctgctgaacagcggcaacaacaagaactacgtgacatggtatcagcagaagcccggccagcctcctaagctgctgatctactggggcagcaccagatccacaggcgtgcccgatagattttctggctctggcagcggcaccgacttcaccctgacaatttctagcctgcaagccgaggacgtggccgtgtactactgccagaacgactacacataccccttcaccttcggccagggcaccaagctggaaatcaaaggcggaggcggaagtggaggcggaggatctggcggcggaggctctcaagttcagctggttcagagcggagccgaagtgaagaaacctggggcctctgtgaaggtgtcctgcaaggcttccggctataccttcaccagcttttggctgaactgggtccgacaggcccctggacaaggactggaatggatgggcaacatctaccccagcgacagctacaccgtgtacaaccagaaattcaaggaccgcgtgaccatgaccagggacaccagcacaagcacagtgtacatggaactgagcagcctgcggagcgaggataccgccgtgtattattgcgccagaacctggcggggcaacagcttcgattattggggccagggaaccaccgtgaccgtgtcatctacgcgtatccagaaccctgatcctgccgtgtaccagctgcgggatagcaagagcagcgacaagagcgtgtgtctgttcaccgacttcgacagccagaccaacgtgtcccagagcaaggactccgacgtgtacatcaccgataagaccgtgctggacatgcggagcatggacttcaagagcaactccgccgtggcctggtccaacaagtccgatttcgcctgcgccaacgccttcaacaacagcattatccccgaggacacattcttcccaagccccgagagcagctgcgacgtgaagctggtggaaaagagcttcgagacagacaccaacctgaacttccagatcctgtacgagatcctgctgggcaaggccaccctgtacgccgtgctggtgtctgccctggtgctgatggctatggtcaagcggaaggacagccggggacgcgccaagagaagcggatctggcgtgaagcagaccctgaatttcgacctgctgaagctggctggcgacgtggaatccaacccaggcccttctagaggccatatgaccgagtacaagcccacggtgcgcctcgccacccgcgacgacgtccccagggccgtacgcaccctcgccgccgcgttcgccgactaccccgccacgcgccacaccgtcgatccggaccgccacatcgagcgggtcaccgagctgcaagaactcttcctcacgcgcgtcgggctcgacatcggcaaggtgtgggtcgcggacgacggcgccgcggtggcggtctggaccacgccggagagcgtcgaagcgggggcggtgttcgccgagatcggcccgcgcatggccgagttgagcggttcccggctggccgcgcagcaacagatggaaggcctcctggcgccgcaccggcccaaggagcccgcgtggttcctggccaccgtcggcgtctcgcccgaccaccagggcaagggtctgggcagcgccgtcgtgctccccggagtggaggcggccgagcgcgccggggtgcccgccttcctggagacctccgcgccccgcaacctccccttctacgagcggctcggcttcaccgtcaccgccgacgtcgaggtgcccgaaggaccgcgcacctggtgcatgacccgcaagcccggtgcctga

SEQ ID NO: 37750 - DNA, 2622 bp, synthetic construct
  source 1..2622: mol_type = other DNA
atggccttaccagtgaccgccttgctcctgccgctggccttgctgctccacgccgccaggccgctcgagatccagaaccctgatcctgccgtgtaccagctgcgggatagcaagagcagcgacaagagcgtgtgtctgttcaccgacttcgacagccagaccaacgtgtcccagagcaaggactccgacgtgtacatcaccgataagaccgtgctggacatgcggagcatggacttcaagagcaactccgccgtggcctggtccaacaagtccgatttcgcctgcgccaacgccttcaacaacagcattatccccgaggacacattcttcccaagccccgagagcagctgcgacgtgaagctggtggaaaagagcttcgagacagacaccaacctgaacttccagatcctgtacgagatcctgctgggcaaggccaccctgtacgccgtgctggtgtctgccctggtgctgatggctatggtcaagcggaaggacagccggggaagggccaagcgatctggatctggagcaacaaacttctcactactcaaacaagcaggtgacgtggaggagaatcccgggcctactagcatggccttaccagtgaccgccttgctcctgccgctggccttgctgctccacgccgccaggccggacatcgtgatgacacagagccctgatagcctggccgtgtctctgggagagagagccaccatcaactgcaagagcagccagagcctgctgaacagcggcaacaacaagaactacgtgacatggtatcagcagaagcccggccagcctcctaagctgctgatctactggggcagcaccagatccacaggcgtgcccgatagattttctggctctggcagcggcaccgacttcaccctgacaatttctagcctgcaagccgaggacgtggccgtgtactactgccagaacgactacacataccccttcaccttcggccagggcaccaagctggaaatcaaaggcggaggcggaagtggaggcggaggatctggcggcggaggctctcaagttcagctggttcagagcggagccgaagtgaagaaacctggggcctctgtgaaggtgtcctgcaaggcttccggctataccttcaccagcttttggctgaactgggtccgacaggcccctggacaaggactggaatggatgggcaacatctaccccagcgacagctacaccgtgtacaaccagaaattcaaggaccgcgtgaccatgaccagggacaccagcacaagcacagtgtacatggaactgagcagcctgcggagcgaggataccgccgtgtattattgcgccagaacctggcggggcaacagcttcgattattggggccagggaaccaccgtgaccgtgtcatctacgcgtgaggacctgaagaacgtgttcccacctgaggtggccgtgttcgagcctagcgaggccgagatcagccacacccagaaagccaccctcgtgtgcctggctaccggcttctaccccgaccatgtggaactgtcttggtgggtcaacggcaaagaggtgcacagcggcgtgtctaccgacccccagccactgaaagaacagcccgccctgaacgacagccggtactgcctgagcagcagactgagagtgtccgccaccttctggcagaacccccggaaccacttcagatgccaggtgcagttctacggcctgagcgagaacgacgagtggacccaggacagagccaagcccgtgacccagatcgtgtctgccgaagcctggggcagagccgattgcggctttaccagcgagagctaccagcagggcgtgctgagcgccaccaacctgagcgtgatcggcttcagaatcctgctgctgaaagtggccggctttaacctgctgatgaccctgcggctgtggtccagccgcgccaagagaagcggatctggcgtgaagcagaccctgaatttcgacctgctgaagctggctggcgacgtggaatccaacccaggcccttctagaggccatatgaccgagtacaagcccacggtgcgcctcgccacccgcgacgacgtccccagggccgtacgcaccctcgccgccgcgttcgccgactaccccgccacgcgccacaccgtcgatccggaccgccacatcgagcgggtcaccgagctgcaagaactcttcctcacgcgcgtcgggctcgacatcggcaaggtgtgggtcgcggacgacggcgccgcggtggcggtctggaccacgccggagagcgtcgaagcgggggcggtgttcgccgagatcggcccgcgcatggccgagttgagcggttcccggctggccgcgcagcaacagatggaaggcctcctggcgccgcaccggcccaaggagcccgcgtggttcctggccaccgtcggcgtctcgcccgaccaccagggcaagggtctgggcagcgccgtcgtgctccccggagtggaggcggccgagcgcgccggggtgcccgccttcctggagacctccgcgccccgcaacctccccttctacgagcggctcggcttcaccgtcaccgccgacgtcgaggtgcccgaaggaccgcgcacctggtgcatgacccgcaagcccggtgcctga

SEQ ID NO: 37751 - DNA, 2622 bp, synthetic construct
  source 1..2622: mol_type = other DNA
atggccttaccagtgaccgccttgctcctgccgctggccttgctgctccacgccgccaggccgctcgaggaggacctgaagaacgtgttcccacctgaggtggccgtgttcgagcctagcgaggccgagatcagccacacccagaaagccaccctcgtgtgcctggctaccggcttctaccccgaccatgtggaactgtcttggtgggtcaacggcaaagaggtgcacagcggcgtgtgtaccgacccccagccactgaaagaacagcccgccctgaacgacagccggtactgcctgagcagcagactgagagtgtccgccaccttctggcagaacccccggaaccacttcagatgccaggtgcagttctacggcctgagcgagaacgacgagtggacccaggacagagccaagcccgtgacccagatcgtgtctgccgaagcctggggcagagccgattgcgacgtgaagctggtggaaaagagcttcgagacagacaccaacctgaacttccagaacctgagcgtgatcggcttcagaatcctgctgctgaaagtggccggctttaacctgctgatgaccctgcggctgtggtccagcagggccaagcgatctggatctggagcaacaaacttctcactactcaaacaagcaggtgacgtggaggagaatcccgggcctactagcatggccttaccagtgaccgccttgctcctgccgctggccttgctgctccacgccgccaggccggacatcgtgatgacacagagccctgatagcctggccgtgtctctgggagagagagccaccatcaactgcaagagcagccagagcctgctgaacagcggcaacaacaagaactacgtgacatggtatcagcagaagcccggccagcctcctaagctgctgatctactggggcagcaccagatccacaggcgtgcccgatagattttctggctctggcagcggcaccgacttcaccctgacaatttctagcctgcaagccgaggacgtggccgtgtactactgccagaacgactacacataccccttcaccttcggccagggcaccaagctggaaatcaaaggcggaggcggaagtggaggcggaggatctggcggcggaggctctcaagttcagctggttcagagcggagccgaagtgaagaaacctggggcctctgtgaaggtgtcctgcaaggcttccggctataccttcaccagcttttggctgaactgggtccgacaggcccctggacaaggactggaatggatgggcaacatctaccccagcgacagctacaccgtgtacaaccagaaattcaaggaccgcgtgaccatgaccagggacaccagcacaagcacagtgtacatggaactgagcagcctgcggagcgaggataccgccgtgtattattgcgccagaacctggcggggcaacagcttcgattattggggccagggaaccaccgtgaccgtgtcatctacgcgtatccagaaccctgatcctgccgtgtaccagctgcgggatagcaagagcagcgacaagagcgtgtgtctgttcaccgacttcgacagccagaccaacgtgtcccagagcaaggactccgacgtgtacatcaccgataagtgcgtgctggacatgcggagcatggacttcaagagcaactccgccgtggcctggtccaacaagtccgatttcgcctgcgccaacgccttcaacaacagcattatccccgaggacacattcttcccaagccccgagagcagctgcggctttaccagcgagagctaccagcagggcgtgctgagcgccaccatcctgtacgagatcctgctgggcaaggccaccctgtacgccgtgctggtgtctgccctggtgctgatggctatggtcaagcggaaggacagccggggacgcgccaagagaagcggatctggcgtgaagcagaccctgaatttcgacctgctgaagctggctggcgacgtggaatccaacccaggcccttctagaggccatatgaccgagtacaagcccacggtgcgcctcgccacccgcgacgacgtccccagggccgtacgcaccctcgccgccgcgttcgccgactaccccgccacgcgccacaccgtcgatccggaccgccacatcgagcgggtcaccgagctgcaagaactcttcctcacgcgcgtcgggctcgacatcggcaaggtgtgggtcgcggacgacggcgccgcggtggcggtctggaccacgccggagagcgtcgaagcgggggcggtgttcgccgagatcggcccgcgcatggccgagttgagcggttcccggctggccgcgcagcaacagatggaaggcctcctggcgccgcaccggcccaaggagcccgcgtggttcctggccaccgtcggcgtctcgcccgaccaccagggcaagggtctgggcagcgccgtcgtgctccccggagtggaggcggccgagcgcgccggggtgcccgccttcctggagacctccgcgccccgcaacctccccttctacgagcggctcggcttcaccgtcaccgccgacgtcgaggtgcccgaaggaccgcgcacctggtgcatgacccgcaagcccggtgcctga

SEQ ID NO: 37752 - DNA, 2622 bp, synthetic construct
  source 1..2622: mol_type = other DNA
atggccttaccagtgaccgccttgctcctgccgctggccttgctgctccacgccgccaggccgctcgaggaggacctgaagaacgtgttcccacctgaggtggccgtgttcgagcctagcgaggccgagatcagccacacccagaaagccaccctcgtgtgcctggctaccggcttctaccccgaccatgtggaactgtcttggtgggtcaacggcaaagaggtgcacagcggcgtgtctaccgacccccagccactgaaagaacagcccgccctgaacgacagccggtactgcctgagcagcagactgagagtgtccgccaccttctggcagaacccccggaaccacttcagatgccaggtgcagttctacggcctgagcgagaacgacgagtggacccaggacagagccaagcccgtgacccagatcgtgtctgccgaagcctggggcagagccgattgcgacgtgaagctggtggaaaagagcttcgagacagacaccaacctgaacttccagaacctgagcgtgatcggcttcagaatcctgctgctgaaagtggccggctttaacctgctgatgaccctgcggctgtggtccagcagggccaagcgatctggatctggagcaacaaacttctcactactcaaacaagcaggtgacgtggaggagaatcccgggcctactagcatggccttaccagtgaccgccttgctcctgccgctggccttgctgctccacgccgccaggccggacatcgtgatgacacagagccctgatagcctggccgtgtctctgggagagagagccaccatcaactgcaagagcagccagagcctgctgaacagcggcaacaacaagaactacgtgacatggtatcagcagaagcccggccagcctcctaagctgctgatctactggggcagcaccagatccacaggcgtgcccgatagattttctggctctggcagcggcaccgacttcaccctgacaatttctagcctgcaagccgaggacgtggccgtgtactactgccagaacgactacacataccccttcaccttcggccagggcaccaagctggaaatcaaaggcggaggcggaagtggaggcggaggatctggcggcggaggctctcaagttcagctggttcagagcggagccgaagtgaagaaacctggggcctctgtgaaggtgtcctgcaaggcttccggctataccttcaccagcttttggctgaactgggtccgacaggcccctggacaaggactggaatggatgggcaacatctaccccagcgacagctacaccgtgtacaaccagaaattcaaggaccgcgtgaccatgaccagggacaccagcacaagcacagtgtacatggaactgagcagcctgcggagcgaggataccgccgtgtattattgcgccagaacctggcggggcaacagcttcgattattggggccagggaaccaccgtgaccgtgtcatctacgcgtatccagaaccctgatcctgccgtgtaccagctgcgggatagcaagagcagcgacaagagcgtgtgtctgttcaccgacttcgacagccagaccaacgtgtcccagagcaaggactccgacgtgtacatcaccgataagaccgtgctggacatgcggagcatggacttcaagagcaactccgccgtggcctggtccaacaagtccgatttcgcctgcgccaacgccttcaacaacagcattatccccgaggacacattcttcccaagccccgagagcagctgcggctttaccagcgagagctaccagcagggcgtgctgagcgccaccatcctgtacgagatcctgctgggcaaggccaccctgtacgccgtgctggtgtctgccctggtgctgatggctatggtcaagcggaaggacagccggggacgcgccaagagaagcggatctggcgtgaagcagaccctgaatttcgacctgctgaagctggctggcgacgtggaatccaacccaggcccttctagaggccatatgaccgagtacaagcccacggtgcgcctcgccacccgcgacgacgtccccagggccgtacgcaccctcgccgccgcgttcgccgactaccccgccacgcgccacaccgtcgatccggaccgccacatcgagcgggtcaccgagctgcaagaactcttcctcacgcgcgtcgggctcgacatcggcaaggtgtgggtcgcggacgacggcgccgcggtggcggtctggaccacgccggagagcgtcgaagcgggggcggtgttcgccgagatcggcccgcgcatggccgagttgagcggttcccggctggccgcgcagcaacagatggaaggcctcctggcgccgcaccggcccaaggagcccgcgtggttcctggccaccgtcggcgtctcgcccgaccaccagggcaagggtctgggcagcgccgtcgtgctccccggagtggaggcggccgagcgcgccggggtgcccgccttcctggagacctccgcgccccgcaacctccccttctacgagcggctcggcttcaccgtcaccgccgacgtcgaggtgcccgaaggaccgcgcacctggtgcatgacccgcaagcccggtgcctga

SEQ ID NO: 37753 - DNA, 2931 bp, synthetic construct
  source 1..2931: mol_type = other DNA
atggccttaccagtgaccgccttgctcctgccgctggccttgctgctccacgccgccaggccgctcgaggaggaggacctgaagaacgtgttcccacctgaggtggccgtgttcgagcctagcgaggccgagatcagccacacccagaaagccaccctcgtgtgcctggctaccggcttctaccccgaccatgtggaactgtcttggtgggtcaacggcaaagaggtgcacagcggcgtgtctaccgacccccagccactgaaagaacagcccgccctgaacgacagccggtactgcctgagcagcagactgagagtgtccgccaccttctggcagaacccccggaaccacttcagatgccaggtgcagttctacggcctgagcgagaacgacgagtggacccaggacagagccaagcccgtgacccagatcgtgtctgccgaagcctggggcagagccgatgatgtgattaagatccactggcaggaaaagaagtccaacaccatcctgggcagccaggaaggcaacaccatgaagaccaacgacacctacatgaagttcagctggctgaccgtgcccgagaagtccctggacaaagaacacagatgcatcgtgcggcacgaaaacaacaagaacggcgtggaccaggaaatcatcttcccacccatcaagaccgatgtgattacaatggaccccaaggacaactgctccaaggacgccaacgataccctgctgctccagctgaccaacaccagcgcctactacatgtacttgttgctgctgctgaagtccgtggtgtacttcgccatcatcacatgctgcctgctgcggagaaccgccttctgctgcaacggcgagaagtctagggccaagcgatctggatctggagcaacaaacttctcactactcaaacaagcaggtgacgtggaggagaatcccgggcctactagcatggccttaccagtgaccgccttgctcctgccgctggccttgctgctccacgccgccaggccggacatcgtgatgacacagagccctgatagcctggccgtgtctctgggagagagagccaccatcaactgcaagagcagccagagcctgctgaacagcggcaacaacaagaactacgtgacatggtatcagcagaagcccggccagcctcctaagctgctgatctactggggcagcaccagatccacaggcgtgcccgatagattttctggctctggcagcggcaccgacttcaccctgacaatttctagcctgcaagccgaggacgtggccgtgtactactgccagaacgactacacataccccttcaccttcggccagggcaccaagctggaaatcaaaggcggaggcggaagtggaggcggaggatctggcggcggaggctctcaagttcagctggttcagagcggagccgaagtgaagaaacctggggcctctgtgaaggtgtcctgcaaggcttccggctataccttcaccagcttttggctgaactgggtccgacaggcccctggacaaggactggaatggatgggcaacatctaccccagcgacagctacaccgtgtacaaccagaaattcaaggaccgcgtgaccatgaccagggacaccagcacaagcacagtgtacatggaactgagcagcctgcggagcgaggataccgccgtgtattattgcgccagaacctggcggggcaacagcttcgattattggggccagggaaccaccgtgaccgtgtcatctacgcgtatccagaaccctgatcctgccgtgtaccagctgcgggatagcaagagcagcgacaagagcgtgtgtctgttcaccgacttcgacagccagaccaacgtgtcccagagcaaggactccgacgtgtacatcaccgataagaccgtgctggacatgcggagcatggacttcaagagcaactccgccgtggcctggtccaacaagtccgatttcgcctgcgccaacgccttcaacaacagcattatccccgaggacacattcttcccaagccccgagagcagcgactccaccgaccacgtgaagcccaaagagacagagaacaccaagcagcccagcaagagctgccacaagcccaaggccatcgtgcacaccgagaaagtgaacatgatgagcctgaccgtgctgggcctgcggatgctgttcgccaaaaccgtggccgtgaacttcctgctgaccgccaagctgttcttcctccgcgccaagagaagcggatctggcgtgaagcagaccctgaatttcgacctgctgaagctggctggcgacgtggaatccaacccaggcccttctagaggccatatgaccgagtacaagcccacggtgcgcctcgccacccgcgacgacgtccccagggccgtacgcaccctcgccgccgcgttcgccgactaccccgccacgcgccacaccgtcgatccggaccgccacatcgagcgggtcaccgagctgcaagaactcttcctcacgcgcgtcgggctcgacatcggcaaggtgtgggtcgcggacgacggcgccgcggtggcggtctggaccacgccggagagcgtcgaagcgggggcggtgttcgccgagatcggcccgcgcatggccgagttgagcggttcccggctggccgcgcagcaacagatggaaggcctcctggcgccgcaccggcccaaggagcccgcgtggttcctggccaccgtcggcgtctcgcccgaccaccagggcaagggtctgggcagcgccgtcgtgctccccggagtggaggcggccgagcgcgccggggtgcccgccttcctggagacctccgcgccccgcaacctccccttctacgagcggctcggcttcaccgtcaccgccgacgtcgaggtgcccgaaggaccgcgcacctggtgcatgacccgcaagcccggtgcctga

SEQ ID NO: 37754 - DNA, 2622 bp, synthetic construct
  source 1..2622: mol_type = other DNA
atggccttaccagtgaccgccttgctcctgccgctggccttgctgctccacgccgccaggccgctcgaggaggacctgaagaacgtgttcccacctgaggtggccgtgttcgagcctagcgaggccgagatcagccacacccagaaagccaccctcgtgtgcctggctaccggcttctaccccgaccatgtggaactgtcttggtgggtcaacggcaaagaggtgcacagcggcgtgtgtaccgacccccagccactgaaagaacagcccgccctgaacgacagccggtactgcctgagcagcagactgagagtgtccgccaccttctggcagaacccccggaaccacttcagatgccaggtgcagttctacggcctgagcgagaacgacgagtggacccaggacagagccaagcccgtgacccagatcgtgtctgccgaagcctggggcagagccgattgcggctttaccagcgagagctaccagcagggcgtgctgagcgccaccaacctgagcgtgatcggcttcagaatcctgctgctgaaagtggccggctttaacctgctgatgaccctgcggctgtggtccagcagggccaagcgatctggatctggagcaacaaacttctcactactcaaacaagcaggtgacgtggaggagaatcccgggcctactagcatggccttaccagtgaccgccttgctcctgccgctggccttgctgctccacgccgccaggccggacatcgtgatgacacagagccctgatagcctggccgtgtctctgggagagagagccaccatcaactgcaagagcagccagagcctgctgaacagcggcaacaacaagaactacgtgacatggtatcagcagaagcccggccagcctcctaagctgctgatctactggggcagcaccagatccacaggcgtgcccgatagattttctggctctggcagcggcaccgacttcaccctgacaatttctagcctgcaagccgaggacgtggccgtgtactactgccagaacgactacacataccccttcaccttcggccagggcaccaagctggaaatcaaaggcggaggcggaagtggaggcggaggatctggcggcggaggctctcaagttcagctggttcagagcggagccgaagtgaagaaacctggggcctctgtgaaggtgtcctgcaaggcttccggctataccttcaccagcttttggctgaactgggtccgacaggcccctggacaaggactggaatggatgggcaacatctaccccagcgacagctacaccgtgtacaaccagaaattcaaggaccgcgtgaccatgaccagggacaccagcacaagcacagtgtacatggaactgagcagcctgcggagcgaggataccgccgtgtattattgcgccagaacctggcggggcaacagcttcgattattggggccagggaaccaccgtgaccgtgtcatctacgcgtatccagaaccctgatcctgccgtgtaccagctgcgggatagcaagagcagcgacaagagcgtgtgtctgttcaccgacttcgacagccagaccaacgtgtcccagagcaaggactccgacgtgtacatcaccgataagtgcgtgctggacatgcggagcatggacttcaagagcaactccgccgtggcctggtccaacaagtccgatttcgcctgcgccaacgccttcaacaacagcattatccccgaggacacattcttcccaagccccgagagcagctgcgacgtgaagctggtggaaaagagcttcgagacagacaccaacctgaacttccagatcctgtacgagatcctgctgggcaaggccaccctgtacgccgtgctggtgtctgccctggtgctgatggctatggtcaagcggaaggacagccggggacgcgccaagagaagcggatctggcgtgaagcagaccctgaatttcgacctgctgaagctggctggcgacgtggaatccaacccaggcccttctagaggccatatgaccgagtacaagcccacggtgcgcctcgccacccgcgacgacgtccccagggccgtacgcaccctcgccgccgcgttcgccgactaccccgccacgcgccacaccgtcgatccggaccgccacatcgagcgggtcaccgagctgcaagaactcttcctcacgcgcgtcgggctcgacatcggcaaggtgtgggtcgcggacgacggcgccgcggtggcggtctggaccacgccggagagcgtcgaagcgggggcggtgttcgccgagatcggcccgcgcatggccgagttgagcggttcccggctggccgcgcagcaacagatggaaggcctcctggcgccgcaccggcccaaggagcccgcgtggttcctggccaccgtcggcgtctcgcccgaccaccagggcaagggtctgggcagcgccgtcgtgctccccggagtggaggcggccgagcgcgccggggtgcccgccttcctggagacctccgcgccccgcaacctccccttctacgagcggctcggcttcaccgtcaccgccgacgtcgaggtgcccgaaggaccgcgcacctggtgcatgacccgcaagcccggtgcctga

SEQ ID NO: 37755 - DNA, 2709 bp, synthetic construct
  source 1..2709: mol_type = other DNA
atggccttaccagtgaccgccttgctcctgccgctggccttgctgctccacgccgccaggccgctcgaggaggaggacctgaagaacgtgttcccacctgaggtggccgtgttcgagcctagcgaggccgagatcagccacacccagaaagccaccctcgtgtgcctggctaccggcttctaccccgaccatgtggaactgtcttggtgggtcaacggcaaagaggtgcacagcggcgtgtgtaccgacccccagccactgaaagaacagcccgccctgaacgacagccggtactgcctgagcagcagactgagagtgtccgccaccttctggcagaacccccggaaccacttcagatgccaggtgcagttctacggcctgagcgagaacgacgagtggacccaggacagagccaagcccgtgacccagatcgtgtctgccgaagcctggggcagagccgattgcggctttaccagcgagagctaccagcagggcgtgctgagcgccaccaacctgagcgtgatcggcttcagaatcctgctgctgaaagtggccggctttaacctgctgatgaccctgcggctgtggtccagcagggccaagcgatctggatctggagcaacaaacttctcactactcaaacaagcaggtgacgtggaggagaatcccgggcctactagcatggccttaccagtgaccgccttgctcctgccgctggccttgctgctccacgccgccaggccggacatcgtgatgacacagagccctgatagcctggccgtgtctctgggagagagagccaccatcaactgcaagagcagccagagcctgctgaacagcggcaacaacaagaactacgtgacatggtatcagcagaagcccggccagcctcctaagctgctgatctactggggcagcaccagatccacaggcgtgcccgatagattttctggctctggcagcggcaccgacttcaccctgacaatttctagcctgcaagccgaggacgtggccgtgtactactgccagaacgactacacataccccttcaccttcggccagggcaccaagctggaaatcaaaggcggaggcggaagtggaggcggaggatctggcggcggaggctctcaagttcagctggttcagagcggagccgaagtgaagaaacctggggcctctgtgaaggtgtcctgcaaggcttccggctataccttcaccagcttttggctgaactgggtccgacaggcccctggacaaggactggaatggatgggcaacatctaccccagcgacagctacaccgtgtacaaccagaaattcaaggaccgcgtgaccatgaccagggacaccagcacaagcacagtgtacatggaactgagcagcctgcggagcgaggataccgccgtgtattattgcgccagaacctggcggggcaacagcttcgattattggggccagggaaccaccgtgaccgtgtcatctacgcgtggacagcctaaggccaatcctaccgtgacactgttccctccaagcagcgaagaactccaggccaacaaggccacacttgtgtgcctgatctccgacttctaccctggggctgtgacagtggcttggaaggccgatggatctcctgtgaaagccggcgtggaaaccaccaagccatccaagcagagcaacaacaaatacgccgccagctcctacctgagcctgacacctgagcagtggaagtcccacagatcctacagctgccaagtgacccacgaaggcagcaccgtggaaaagacagtggcccctacagagtgcagccccatcaagaccgatgtgattacaatggaccccaaggacaactgctccaaggacgccaacgataccctgctgctccagctgaccaacaccagcgcctactacatgtacttgttgctgctgctgaagtccgtggtgtacttcgccatcatcacatgctgcctgctgcggagaaccgccttctgctgcaacggcgagaagtctcgcgccaagagaagcggatctggcgtgaagcagaccctgaatttcgacctgctgaagctggctggcgacgtggaatccaacccaggcccttctagaggccatatgaccgagtacaagcccacggtgcgcctcgccacccgcgacgacgtccccagggccgtacgcaccctcgccgccgcgttcgccgactaccccgccacgcgccacaccgtcgatccggaccgccacatcgagcgggtcaccgagctgcaagaactcttcctcacgcgcgtcgggctcgacatcggcaaggtgtgggtcgcggacgacggcgccgcggtggcggtctggaccacgccggagagcgtcgaagcgggggcggtgttcgccgagatcggcccgcgcatggccgagttgagcggttcccggctggccgcgcagcaacagatggaaggcctcctggcgccgcaccggcccaaggagcccgcgtggttcctggccaccgtcggcgtctcgcccgaccaccagggcaagggtctgggcagcgccgtcgtgctccccggagtggaggcggccgagcgcgccggggtgcccgccttcctggagacctccgcgccccgcaacctccccttctacgagcggctcggcttcaccgtcaccgccgacgtcgaggtgcccgaaggaccgcgcacctggtgcatgacccgcaagcccggtgcctga

SEQ ID NO: 37756 - DNA, 2709 bp, synthetic construct
  source 1..2709: mol_type = other DNA
atggccttaccagtgaccgccttgctcctgccgctggccttgctgctccacgccgccaggccgctcgagggacagcctaaggccaatcctaccgtgacactgttccctccaagcagcgaagaactccaggccaacaaggccacacttgtgtgcctgatctccgacttctaccctggggctgtgacagtggcttggaaggccgatggatctcctgtgaaagccggcgtggaaaccaccaagccatccaagcagagcaacaacaaatacgccgccagctcctacctgagcctgacacctgagcagtggaagtcccacagatcctacagctgccaagtgacccacgaaggcagcaccgtggaaaagacagtggcccctacagagtgcagccccatcaagaccgatgtgattacaatggaccccaaggacaactgctccaaggacgccaacgataccctgctgctccagctgaccaacaccagcgcctactacatgtacttgttgctgctgctgaagtccgtggtgtacttcgccatcatcacatgctgcctgctgcggagaaccgccttctgctgcaacggcgagaagtctagggccaagcgatctggatctggagcaacaaacttctcactactcaaacaagcaggtgacgtggaggagaatcccgggcctactagcatggccttaccagtgaccgccttgctcctgccgctggccttgctgctccacgccgccaggccggacatcgtgatgacacagagccctgatagcctggccgtgtctctgggagagagagccaccatcaactgcaagagcagccagagcctgctgaacagcggcaacaacaagaactacgtgacatggtatcagcagaagcccggccagcctcctaagctgctgatctactggggcagcaccagatccacaggcgtgcccgatagattttctggctctggcagcggcaccgacttcaccctgacaatttctagcctgcaagccgaggacgtggccgtgtactactgccagaacgactacacataccccttcaccttcggccagggcaccaagctggaaatcaaaggcggaggcggaagtggaggcggaggatctggcggcggaggctctcaagttcagctggttcagagcggagccgaagtgaagaaacctggggcctctgtgaaggtgtcctgcaaggcttccggctataccttcaccagcttttggctgaactgggtccgacaggcccctggacaaggactggaatggatgggcaacatctaccccagcgacagctacaccgtgtacaaccagaaattcaaggaccgcgtgaccatgaccagggacaccagcacaagcacagtgtacatggaactgagcagcctgcggagcgaggataccgccgtgtattattgcgccagaacctggcggggcaacagcttcgattattggggccagggaaccaccgtgaccgtgtcatctacgcgtgaggaggacctgaagaacgtgttcccacctgaggtggccgtgttcgagcctagcgaggccgagatcagccacacccagaaagccaccctcgtgtgcctggctaccggcttctaccccgaccatgtggaactgtcttggtgggtcaacggcaaagaggtgcacagcggcgtgtgtaccgacccccagccactgaaagaacagcccgccctgaacgacagccggtactgcctgagcagcagactgagagtgtccgccaccttctggcagaacccccggaaccacttcagatgccaggtgcagttctacggcctgagcgagaacgacgagtggacccaggacagagccaagcccgtgacccagatcgtgtctgccgaagcctggggcagagccgattgcggctttaccagcgagagctaccagcagggcgtgctgagcgccaccaacctgagcgtgatcggcttcagaatcctgctgctgaaagtggccggctttaacctgctgatgaccctgcggctgtggtccagccgcgccaagagaagcggatctggcgtgaagcagaccctgaatttcgacctgctgaagctggctggcgacgtggaatccaacccaggcccttctagaggccatatgaccgagtacaagcccacggtgcgcctcgccacccgcgacgacgtccccagggccgtacgcaccctcgccgccgcgttcgccgactaccccgccacgcgccacaccgtcgatccggaccgccacatcgagcgggtcaccgagctgcaagaactcttcctcacgcgcgtcgggctcgacatcggcaaggtgtgggtcgcggacgacggcgccgcggtggcggtctggaccacgccggagagcgtcgaagcgggggcggtgttcgccgagatcggcccgcgcatggccgagttgagcggttcccggctggccgcgcagcaacagatggaaggcctcctggcgccgcaccggcccaaggagcccgcgtggttcctggccaccgtcggcgtctcgcccgaccaccagggcaagggtctgggcagcgccgtcgtgctccccggagtggaggcggccgagcgcgccggggtgcccgccttcctggagacctccgcgccccgcaacctccccttctacgagcggctcggcttcaccgtcaccgccgacgtcgaggtgcccgaaggaccgcgcacctggtgcatgacccgcaagcccggtgcctga

SEQ ID NO: 37757 - DNA, 2700 bp, synthetic construct
  source 1..2700: mol_type = other DNA
atggccttaccagtgaccgccttgctcctgccgctggccttgctgctccacgccgccaggccgctcgaggaggcctctacaaagggaccctccgtgtttcctctggctcccagcagcaagtctacaagcggaggaacagccgctctgggctgcctggtcaaggattactttcccgagcctgtgaccgtgtcctggaatagcggagcactgacaagcggcgtgcacacctttccagccgtgctgcaaagcagcggcctgtactctctgagcagcgtggtcacagtgcctagctctagcctgggcacccagacctacatctgcaatgtgaaccacaagcctagcaacaccaaggtggacaagagagtggaacccaagagctgtcccatcaagaccgatgtgattacaatggaccccaaggacaactgctccaaggacgccaacgataccctgctgctccagctgaccaacaccagcgcctactacatgtacttgttgctgctgctgaagtccgtggtgtacttcgccatcatcacatgctgcctgctgcggagaaccgccttctgctgcaacggcgagaagtctagggccaagcgatctggatctggagcaacaaacttctcactactcaaacaagcaggtgacgtggaggagaatcccgggcctactagcatggccttaccagtgaccgccttgctcctgccgctggccttgctgctccacgccgccaggccggacatcgtgatgacacagagccctgatagcctggccgtgtctctgggagagagagccaccatcaactgcaagagcagccagagcctgctgaacagcggcaacaacaagaactacgtgacatggtatcagcagaagcccggccagcctcctaagctgctgatctactggggcagcaccagatccacaggcgtgcccgatagattttctggctctggcagcggcaccgacttcaccctgacaatttctagcctgcaagccgaggacgtggccgtgtactactgccagaacgactacacataccccttcaccttcggccagggcaccaagctggaaatcaaaggcggaggcggaagtggaggcggaggatctggcggcggaggctctcaagttcagctggttcagagcggagccgaagtgaagaaacctggggcctctgtgaaggtgtcctgcaaggcttccggctataccttcaccagcttttggctgaactgggtccgacaggcccctggacaaggactggaatggatgggcaacatctaccccagcgacagctacaccgtgtacaaccagaaattcaaggaccgcgtgaccatgaccagggacaccagcacaagcacagtgtacatggaactgagcagcctgcggagcgaggataccgccgtgtattattgcgccagaacctggcggggcaacagcttcgattattggggccagggaaccaccgtgaccgtgtcatctacgcgtggacagcctaaggccaatcctaccgtgacactgttccctccaagcagcgaagaactccaggccaacaaggccacacttgtgtgcctgatctccgacttctaccctggggctgtgacagtggcttggaaggccgatggatctcctgtgaaagccggcgtggaaaccaccaagccatccaagcagagcaacaacaaatacgccgccagctcctacctgagcctgacacctgagcagtggaagtcccacagatcctacagctgccaagtgacccacgaaggcagcaccgtggaaaagacagtggcccctacagagtgcagcgaagtgaaaaccgactccaccgaccacgtgaagcccaaagagacagagaacaccaagcagcccagcaagagctgccacaagcccaaggccatcgtgcacaccgagaaagtgaacatgatgagcctgaccgtgctgggcctgcggatgctgttcgccaaaaccgtggccgtgaacttcctgctgaccgccaagctgttcttcctccgcgccaagagaagcggatctggcgtgaagcagaccctgaatttcgacctgctgaagctggctggcgacgtggaatccaacccaggcccttctagaggccatatgaccgagtacaagcccacggtgcgcctcgccacccgcgacgacgtccccagggccgtacgcaccctcgccgccgcgttcgccgactaccccgccacgcgccacaccgtcgatccggaccgccacatcgagcgggtcaccgagctgcaagaactcttcctcacgcgcgtcgggctcgacatcggcaaggtgtgggtcgcggacgacggcgccgcggtggcggtctggaccacgccggagagcgtcgaagcgggggcggtgttcgccgagatcggcccgcgcatggccgagttgagcggttcccggctggccgcgcagcaacagatggaaggcctcctggcgccgcaccggcccaaggagcccgcgtggttcctggccaccgtcggcgtctcgcccgaccaccagggcaagggtctgggcagcgccgtcgtgctccccggagtggaggcggccgagcgcgccggggtgcccgccttcctggagacctccgcgccccgcaacctccccttctacgagcggctcggcttcaccgtcaccgccgacgtcgaggtgcccgaaggaccgcgcacctggtgcatgacccgcaagcccggtgcctga

SEQ ID NO: 37758 - DNA, 2634 bp, synthetic construct
  source 1..2634: mol_type = other DNA
atggccttaccagtgaccgccttgctcctgccgctggccttgctgctccacgccgccaggccgctcgaggaggcctctacaaagggaccctccgtgtttcctctggctcccagcagcaagtctacaagcggaggaacagccgctctgggctgcctggtcaaggattactttcccgagcctgtgaccgtgtcctggaatagcggagcactgacaagcggcgtgcacacctttccagccgtgctgcaaagcagcggcctgtactctctgagcagcgtggtcacagtgcctagctctagcctgggcacccagacctacatctgcaatgtgaaccacaagcctagcaacaccaaggtggacaagagagtggaacccaagagctgtggcagagccgattgcggctttaccagcgagagctaccagcagggcgtgctgagcgccaccatcctgtacgagatcctgctgggcaaggccaccctgtacgccgtgctggtgtctgccctggtgctgatggctatggtcaagcggaaggacagccggggaagggccaagcgatctggatctggagcaacaaacttctcactactcaaacaagcaggtgacgtggaggagaatcccgggcctactagcatggccttaccagtgaccgccttgctcctgccgctggccttgctgctccacgccgccaggccggacatcgtgatgacacagagccctgatagcctggccgtgtctctgggagagagagccaccatcaactgcaagagcagccagagcctgctgaacagcggcaacaacaagaactacgtgacatggtatcagcagaagcccggccagcctcctaagctgctgatctactggggcagcaccagatccacaggcgtgcccgatagattttctggctctggcagcggcaccgacttcaccctgacaatttctagcctgcaagccgaggacgtggccgtgtactactgccagaacgactacacataccccttcaccttcggccagggcaccaagctggaaatcaaaggcggaggcggaagtggaggcggaggatctggcggcggaggctctcaagttcagctggttcagagcggagccgaagtgaagaaacctggggcctctgtgaaggtgtcctgcaaggcttccggctataccttcaccagcttttggctgaactgggtccgacaggcccctggacaaggactggaatggatgggcaacatctaccccagcgacagctacaccgtgtacaaccagaaattcaaggaccgcgtgaccatgaccagggacaccagcacaagcacagtgtacatggaactgagcagcctgcggagcgaggataccgccgtgtattattgcgccagaacctggcggggcaacagcttcgattattggggccagggaaccaccgtgaccgtgtcatctacgcgtggacagcctaaggccaatcctaccgtgacactgttccctccaagcagcgaagaactccaggccaacaaggccacacttgtgtgcctgatctccgacttctaccctggggctgtgacagtggcttggaaggccgatggatctcctgtgaaagccggcgtggaaaccaccaagccatccaagcagagcaacaacaaatacgccgccagctcctacctgagcctgacacctgagcagtggaagtcccacagatcctacagctgccaagtgacccacgaaggcagcaccgtggaaaagacagtggcccctacagagtgcagcatccccgaggacacattcttcccaagccccgagagcagctgcgacgtgaagctggtggaaaagagcttcgagacagacaccaacctgaacttccagaacctgagcgtgatcggcttcagaatcctgctgctgaaagtggccggctttaacctgctgatgaccctgcggctgtggtccagccgcgccaagagaagcggatctggcgtgaagcagaccctgaatttcgacctgctgaagctggctggcgacgtggaatccaacccaggcccttctagaggccatatgaccgagtacaagcccacggtgcgcctcgccacccgcgacgacgtccccagggccgtacgcaccctcgccgccgcgttcgccgactaccccgccacgcgccacaccgtcgatccggaccgccacatcgagcgggtcaccgagctgcaagaactcttcctcacgcgcgtcgggctcgacatcggcaaggtgtgggtcgcggacgacggcgccgcggtggcggtctggaccacgccggagagcgtcgaagcgggggcggtgttcgccgagatcggcccgcgcatggccgagttgagcggttcccggctggccgcgcagcaacagatggaaggcctcctggcgccgcaccggcccaaggagcccgcgtggttcctggccaccgtcggcgtctcgcccgaccaccagggcaagggtctgggcagcgccgtcgtgctccccggagtggaggcggccgagcgcgccggggtgcccgccttcctggagacctccgcgccccgcaacctccccttctacgagcggctcggcttcaccgtcaccgccgacgtcgaggtgcccgaaggaccgcgcacctggtgcatgacccgcaagcccggtgcctga

SEQ ID NO: 37759 - DNA, 2634 bp, synthetic construct
  source 1..2634: mol_type = other DNA
atggccttaccagtgaccgccttgctcctgccgctggccttgctgctccacgccgccaggccgctcgaggaggcctctacaaagggaccctccgtgtttcctctggctcccagcagcaagtctacaagcggaggaacagccgctctgggctgcctggtcaaggattactttcccgagcctgtgaccgtgtcctggaatagcggagcactgacaagcggcgtgcacacctttccagccgtgctgcaaagcagcggcctgtactctctgagcagcgtggtcacagtgcctagctctagcctgggcacccagacctacatctgcaatgtgaaccacaagcctagcaacaccaaggtggacaagagagtggaacccaagagctgtatccccgaggacacattcttcccaagccccgagagcagctgcgacgtgaagctggtggaaaagagcttcgagacagacaccaacctgaacttccagaacctgagcgtgatcggcttcagaatcctgctgctgaaagtggccggctttaacctgctgatgaccctgcggctgtggtccagcagggccaagcgatctggatctggagcaacaaacttctcactactcaaacaagcaggtgacgtggaggagaatcccgggcctactagcatggccttaccagtgaccgccttgctcctgccgctggccttgctgctccacgccgccaggccggacatcgtgatgacacagagccctgatagcctggccgtgtctctgggagagagagccaccatcaactgcaagagcagccagagcctgctgaacagcggcaacaacaagaactacgtgacatggtatcagcagaagcccggccagcctcctaagctgctgatctactggggcagcaccagatccacaggcgtgcccgatagattttctggctctggcagcggcaccgacttcaccctgacaatttctagcctgcaagccgaggacgtggccgtgtactactgccagaacgactacacataccccttcaccttcggccagggcaccaagctggaaatcaaaggcggaggcggaagtggaggcggaggatctggcggcggaggctctcaagttcagctggttcagagcggagccgaagtgaagaaacctggggcctctgtgaaggtgtcctgcaaggcttccggctataccttcaccagcttttggctgaactgggtccgacaggcccctggacaaggactggaatggatgggcaacatctaccccagcgacagctacaccgtgtacaaccagaaattcaaggaccgcgtgaccatgaccagggacaccagcacaagcacagtgtacatggaactgagcagcctgcggagcgaggataccgccgtgtattattgcgccagaacctggcggggcaacagcttcgattattggggccagggaaccaccgtgaccgtgtcatctacgcgtggacagcctaaggccaatcctaccgtgacactgttccctccaagcagcgaagaactccaggccaacaaggccacacttgtgtgcctgatctccgacttctaccctggggctgtgacagtggcttggaaggccgatggatctcctgtgaaagccggcgtggaaaccaccaagccatccaagcagagcaacaacaaatacgccgccagctcctacctgagcctgacacctgagcagtggaagtcccacagatcctacagctgccaagtgacccacgaaggcagcaccgtggaaaagacagtggcccctacagagtgcagcggcagagccgattgcggctttaccagcgagagctaccagcagggcgtgctgagcgccaccatcctgtacgagatcctgctgggcaaggccaccctgtacgccgtgctggtgtctgccctggtgctgatggctatggtcaagcggaaggacagccggggacgcgccaagagaagcggatctggcgtgaagcagaccctgaatttcgacctgctgaagctggctggcgacgtggaatccaacccaggcccttctagaggccatatgaccgagtacaagcccacggtgcgcctcgccacccgcgacgacgtccccagggccgtacgcaccctcgccgccgcgttcgccgactaccccgccacgcgccacaccgtcgatccggaccgccacatcgagcgggtcaccgagctgcaagaactcttcctcacgcgcgtcgggctcgacatcggcaaggtgtgggtcgcggacgacggcgccgcggtggcggtctggaccacgccggagagcgtcgaagcgggggcggtgttcgccgagatcggcccgcgcatggccgagttgagcggttcccggctggccgcgcagcaacagatggaaggcctcctggcgccgcaccggcccaaggagcccgcgtggttcctggccaccgtcggcgtctcgcccgaccaccagggcaagggtctgggcagcgccgtcgtgctccccggagtggaggcggccgagcgcgccggggtgcccgccttcctggagacctccgcgccccgcaacctccccttctacgagcggctcggcttcaccgtcaccgccgacgtcgaggtgcccgaaggaccgcgcacctggtgcatgacccgcaagcccggtgcctga

SEQ ID NO: 37760 - DNA, 1872 bp, synthetic construct
  source 1..1872: mol_type = other DNA
atggccttaccagtgaccgccttgctcctgccgctggccttgctgctccacgccgccaggccggacatcgtgatgacacagagccctgatagcctggccgtgtctctgggagagagagccaccatcaactgcaagagcagccagagcctgctgaacagcggcaacaacaagaactacgtgacatggtatcagcagaagcccggccagcctcctaagctgctgatctactggggcagcaccagatccacaggcgtgcccgatagattttctggctctggcagcggcaccgacttcaccctgacaatttctagcctgcaagccgaggacgtggccgtgtactactgccagaacgactacacataccccttcaccttcggccagggcaccaagctggaaatcaaactcgaggacctgaagaacgtgttcccacctgaggtggccgtgttcgagcctagcgaggccgagatcagccacacccagaaagccaccctcgtgtgcctggctaccggcttctaccccgaccatgtggaactgtcttggtgggtcaacggcaaagaggtgcacagcggcgtgtgtaccgacccccagccactgaaagaacagcccgccctgaacgacagccggtactgcctgagcagcagactgagagtgtccgccaccttctggcagaacccccggaaccacttcagatgccaggtgcagttctacggcctgagcgagaacgacgagtggacccaggacagagccaagcccgtgacccagatcgtgtctgccgaagcctggggcagagccgatagcggctttaccagcgagagctaccagcagggcgtgctgagcgccaccatcctgtacgagatcctgctgggcaaggccaccctgtacgccgtgctggtgtctgccctggtgctgatggctatggtcaagcggaaggacagccggggaagggccaagcgatctggatctggagcaacaaacttctcactactcaaacaagcaggtgacgtggaggagaatcccgggcctactagtatggactggatttggcgcatccttttccttgtcggcgctgctaccggcgcgcattccttcgaacaagttcagctggttcagagcggagccgaagtgaagaaacctggggcctctgtgaaggtgtcctgcaaggcttccggctataccttcaccagcttttggctgaactgggtccgacaggcccctggacaaggactggaatggatgggcaacatctaccccagcgacagctacaccgtgtacaaccagaaattcaaggaccgcgtgaccatgaccagggacaccagcacaagcacagtgtacatggaactgagcagcctgcggagcgaggataccgccgtgtattattgcgccagaacctggcggggcaacagcttcgattattggggccagggaaccaccgtgaccgtgtcatctacgcgtatccagaaccctgatcctgccgtgtaccagctgcgggatagcaagagcagcgacaagagcgtgtgtctgttcaccgacttcgacagccagaccaacgtgtcccagagcaaggactccgacgtgtacatcaccgataagtgcgtgctggacatgcggagcatggacttcaagagcaactccgccgtggcctggtccaacaagtccgatttcgcctgcgccaacgccttcaacaacagcattatccccgaggacacattcttcccaagccccgagagcagcagcgacgtgaagctggtggaaaagagcttcgagacagacaccaacctgaacttccagaacctgagcgtgatcggcttcagaatcctgctgctgaaagtggccggctttaacctgctgatgaccctgcggctgtggtccagc

SEQ ID NO: 37761 - DNA, 2712 bp, synthetic construct
  source 1..2712: mol_type = other DNA
atggccttaccagtgaccgccttgctcctgccgctggccttgctgctccacgccgccaggccggaggttcagctgcttgagtctggcggaggactggttcaacctggcggaagcctgagactgtcttgtgccgcctctggcagaaccttcagcatgggctggtatagacaggcccctggcaagggcctcgaatttgtgtctgccatcacatacagcggcggcagcccttactacgccgattctgtgaagggcagattcaccatcagccgggacaacagcaagaacaccgtgtacctccagatgaacagcctgagagccgaggacaccgccgtgtactactgtgccgccaatccaacctacggcagcgactggaatgccgagaattggggccagggcacactggtcacagtgtctagtggtaccggcggaggcggatctggcggcggaggtagcggtggcggaggatctgaattcgacatcgtgatgacacagagccctgatagcctggccgtgtctctgggagagagagccaccatcaactgcaagagcagccagagcctgctgaacagcggcaacaacaagaactacgtgacatggtatcagcagaagcccggccagcctcctaagctgctgatctactggggcagcaccagatccacaggcgtgcccgatagattttctggctctggcagcggcaccgacttcaccctgacaatttctagcctgcaagccgaggacgtggccgtgtactactgccagaacgactacacataccccttcaccttcggccagggcaccaagctggaaatcaaactcgagatccagaaccctgatcctgccgtgtaccagctgcgggatagcaagagcagcgacaagagcgtgtgtctgttcaccgacttcgacagccagaccaacgtgtcccagagcaaggactccgacgtgtacatcaccgataagtgcgtgctggacatgcggagcatggacttcaagagcaactccgccgtggcctggtccaacaagtccgatttcgcctgcgccaacgccttcaacaacagcattatccccgaggacacattcttcccaagcagcgacgtgccctgcgacgtgaagctggtggaaaagagcttcgagacagacaccaacctgaacttccagaacctgagcgtgatcggcttcagaatcctgctgctgaaagtggccggctttaacctgctgatgaccctgcggctgtggtccagccgcgccaagagaagcggatctggcgtgaagcagaccctgaatttcgacctgctgaagctggctggcgacgtggaatccaacccaggccctactagtaccatggactggatttggcgcatccttttccttgtcggcgctgctaccggcacccattccgggcccgaagtgcaactggttgaatccggtggcggcctggtgcaacccggcggatctctcagacttagctgtgccgcctccggcagaaccttcacaatgggatggtacaggcaggctccagggaaagagagagagttcgtcgccgccatctctctgtctcccacactggcctactacgccgactctgtgaaaggccggttcaccatctccagagataatagcaagaacaccgtggtgctgcaaatgaactctctgagagccgaggatacagccctgtactattgtgccgctgaccggaagtccgtgatgagcatcagacccgattactggggacagggcacactggtcacagtgtctagtggatccggcggcggaggatctggcggaggcggatctgggggcggaggctctttcgaacaagttcagctggttcagagcggagccgaagtgaagaaacctggggcctctgtgaaggtgtcctgcaaggcttccggctataccttcaccagcttttggctgaactgggtccgacaggcccctggacaaggactggaatggatgggcaacatctaccccagcgacagctacaccgtgtacaaccagaaattcaaggaccgcgtgaccatgaccagggacaccagcacaagcacagtgtacatggaactgagcagcctgcggagcgaggataccgccgtgtattattgcgccagaacctggcggggcaacagcttcgattattggggccagggaaccaccgtgaccgtgtcatctacgcgtgaggacctgaagaacgtgttcccacctgaggtggccgtgttcgagcctagcaaggccgagatcgcccacacccagaaagccaccctcgtgtgcctggctaccggcttctaccccgaccatgtggaactgtcttggtgggtcaacggcaaagaggtgcacagcggcgtgtgtaccgacccccagccactgaaagaacagcccgccctgaacgacagccggtactgcctgagcagcagactgagagtgtccgccaccttctggcagaacccccggaaccacttcagatgccaggtgcagttctacggcctgagcgagaacgacgagtggacccaggacagagccaagcccgtgacccagatcgtgtctgccgaagcctggggcagagccgattgcggcatcaccagcgccagctaccaccagggcgtgctgagcgccaccatcctgtacgagatcctgctgggcaaggccaccctgtacgccgtgctggtgtctgccctggtgctgatggctatggtcaagcggaaggacagccggggataa

SEQ ID NO: 37762 - DNA, 2712 bp, synthetic construct
  source 1..2712: mol_type = other DNA
atggccttaccagtgaccgccttgctcctgccgctggccttgctgctccacgccgccaggccggaagtgcagctggttgaatctggcggaggactggttcaggctggcggatctctgagactgtcttgtgccgccagcggcagaacctttagcatgggctggtttagacaggcccctggcaaagagagagagttcgtcgccgccatcacatactctggcggcagcccttactacgccgactctgtgaagggcagattcaccatcagccgggacaacgccaagaacaccgtgtacctccagatgaacagcctgaagcctgaggacaccgccgtgtactactgcgccgccaatccaacatacggcagcgactggaacgccgagaattggggccagggaacccaagtgacagtgtctagcggtaccggcggaggcggatctggcggcggaggtagcggtggcggaggatctgaattcgacatcgtgatgacacagagccctgatagcctggccgtgtctctgggagagagagccaccatcaactgcaagagcagccagagcctgctgaacagcggcaacaacaagaactacgtgacatggtatcagcagaagcccggccagcctcctaagctgctgatctactggggcagcaccagatccacaggcgtgcccgatagattttctggctctggcagcggcaccgacttcaccctgacaatttctagcctgcaagccgaggacgtggccgtgtactactgccagaacgactacacataccccttcaccttcggccagggcaccaagctggaaatcaaactcgagatccagaaccctgatcctgccgtgtaccagctgcgggatagcaagagcagcgacaagagcgtgtgtctgttcaccgacttcgacagccagaccaacgtgtcccagagcaaggactccgacgtgtacatcaccgataagtgcgtgctggacatgcggagcatggacttcaagagcaactccgccgtggcctggtccaacaagtccgatttcgcctgcgccaacgccttcaacaacagcattatccccgaggacacattcttcccaagcagcgacgtgccctgcgacgtgaagctggtggaaaagagcttcgagacagacaccaacctgaacttccagaacctgagcgtgatcggcttcagaatcctgctgctgaaagtggccggctttaacctgctgatgaccctgcggctgtggtccagccgcgccaagagaagcggatctggcgtgaagcagaccctgaatttcgacctgctgaagctggctggcgacgtggaatccaacccaggccctactagtaccatggactggatttggcgcatccttttccttgtcggcgctgctaccggcgcccattccgggcccgaagtgcaactggttgaatccggtggcggcctggtgcaacccggcggatctctcagacttagctgtgccgcctccggcagaaccttcacaatgggatggtacaggcaggctccagggaaagagagagagttcgtcgccgccatctctctgtctcccacactggcctactacgccgactctgtgaaaggccggttcaccatctccagagataatagcaagaacaccgtggtgctgcaaatgaactctctgagagccgaggatacagccctgtactattgtgccgctgaccggaagtccgtgatgagcatcagacccgattactggggacagggcacactggtcacagtgtctagtggatccggcggcggaggatctggcggaggcggatctgggggcggaggctctttcgaacaagttcagctggttcagagcggagccgaagtgaagaaacctggggcctctgtgaaggtgtcctgcaaggcttccggctataccttcaccagcttttggctgaactgggtccgacaggcccctggacaaggactggaatggatgggcaacatctaccccagcgacagctacaccgtgtacaaccagaaattcaaggaccgcgtgaccatgaccagggacaccagcacaagcacagtgtacatggaactgagcagcctgcggagcgaggataccgccgtgtattattgcgccagaacctggcggggcaacagcttcgattattggggccagggaaccaccgtgaccgtgtcatctacgcgtgaggacctgaagaacgtgttcccacctgaggtggccgtgttcgagcctagcaaggccgagatcgcccacacccagaaagccaccctcgtgtgcctggctaccggcttctaccccgaccatgtggaactgtcttggtgggtcaacggcaaagaggtgcacagcggcgtgtgtaccgacccccagccactgaaagaacagcccgccctgaacgacagccggtactgcctgagcagcagactgagagtgtccgccaccttctggcagaacccccggaaccacttcagatgccaggtgcagttctacggcctgagcgagaacgacgagtggacccaggacagagccaagcccgtgacccagatcgtgtctgccgaagcctggggcagagccgattgcggcatcaccagcgccagctaccaccagggcgtgctgagcgccaccatcctgtacgagatcctgctgggcaaggccaccctgtacgccgtgctggtgtctgccctggtgctgatggctatggtcaagcggaaggacagccggggataa

SEQ ID NO: 37763 - DNA, 2703 bp, synthetic construct
  source 1..2703: mol_type = other DNA
atggccttaccagtgaccgccttgctcctgccgctggccttgctgctccacgccgccaggccggaagtgcagctggttgaatctggcggaggactggttcaggctggcggatctctgagactgtcttgtgccgccagcggcagaacctttagcatgggctggtttagacaggcccctggcaaagagagagagttcgtcgccgccatcacatactctggcggcagcccttactacgccgactctgtgaagggcagattcaccatcagccgggacaacgccaagaacaccgtgtacctccagatgaacagcctgaagcctgaggacaccgccgtgtactactgcgccgccaatccaacatacggcagcgactggaacgccgagaattggggccagggaacccaagtgacagtgtctagcggtaccggcggaggcggatctggcggcggaggtagcggtggcggaggatctgaattcgacatcgtgatgacacagagccctgatagcctggccgtgtctctgggagagagagccaccatcaactgcaagagcagccagagcctgctgaacagcggcaacaacaagaactacgtgacatggtatcagcagaagcccggccagcctcctaagctgctgatctactggggcagcaccagatccacaggcgtgcccgatagattttctggctctggcagcggcaccgacttcaccctgacaatttctagcctgcaagccgaggacgtggccgtgtactactgccagaacgactacacataccccttcaccttcggccagggcaccaagctggaaatcaaactcgaggacctgaagaacgtgttcccacctgaggtggccgtgttcgagcctagcgaggccgagatcagccacacccagaaagccaccctcgtgtgcctggctaccggcttctaccccgaccatgtggaactgtcttggtgggtcaacggcaaagaggtgcacagcggcgtgtgtaccgacccccagccactgaaagaacagcccgccctgaacgacagccggtactgcctgagcagcagactgagagtgtccgccaccttctggcagaacccccggaaccacttcagatgccaggtgcagttctacggcctgagcgagaacgacgagtggacccaggacagagccaagcccgtgacccagatcgtgtctgccgaagcctggggcagagccgattgcggctttaccagcgagagctaccagcagggcgtgctgagcgccaccatcctgtacgagatcctgctgggcaaggccaccctgtacgccgtgctggtgtctgccctggtgctgatggctatggtcaagcggaaggacagccggggaagggccaagcgatctggatctggagcaacaaacttctcactactcaaacaagcaggtgacgtggaggagaatcccgggcctactagtgccaccatggactggatttggcgcatccttttccttgtcggcgctgctaccggcgcccattccgggcccgaagtgcaactggttgaatccggtggcggcctggtgcaagcaggcggatctctcagacttagctgtgccgcctccggcagaaccttcacaatgggatggtttaggcaggctccagggaaagagagagagttcgtcgccgccatctctctgtctcccacactggcctactacgccgactctgtgaaaggccggttcaccatctccagagataatgccaagaacaccgtggtgctgcaaatgaactctctgaaacccgaggatacagccctgtactattgtgccgctgaccggaagtccgtgatgagcatcagacccgattactggggacagggcacacaagtcacagtgtcctctggatccggcggcggaggatctggcggaggcggatctgggggcggaggctctttcgaacaagttcagctggttcagagcggagccgaagtgaagaaacctggggcctctgtgaaggtgtcctgcaaggcttccggctataccttcaccagcttttggctgaactgggtccgacaggcccctggacaaggactggaatggatgggcaacatctaccccagcgacagctacaccgtgtacaaccagaaattcaaggaccgcgtgaccatgaccagggacaccagcacaagcacagtgtacatggaactgagcagcctgcggagcgaggataccgccgtgtattattgcgccagaacctggcggggcaacagcttcgattattggggccagggaaccaccgtgaccgtgtcatctacgcgtatccagaaccctgatcctgccgtgtaccagctgcgggatagcaagagcagcgacaagagcgtgtgtctgttcaccgacttcgacagccagaccaacgtgtcccagagcaaggactccgacgtgtacatcaccgataagtgcgtgctggacatgcggagcatggacttcaagagcaactccgccgtggcctggtccaacaagtccgatttcgcctgcgccaacgccttcaacaacagcattatccccgaggacacattcttcccaagccccgagagcagctgcgacgtgaagctggtggaaaagagcttcgagacagacaccaacctgaacttccagaacctgagcgtgatcggcttcagaatcctgctgctgaaagtggccggctttaacctgctgatgaccctgcggctgtggtccagctaa

SEQ ID NO: 37764 - DNA, 2316 bp, synthetic construct
  source 1..2316: mol_type = other DNA
atggccttaccagtgaccgccttgctcctgccgctggccttgctgctccacgccgccaggccggaagtgcagctggttgaatctggcggaggactggttcagcctggcggatctctgagactgagctgtgaagccagcggcttcgccagcgacgattacatcatcggctggttcagacaggcccctggcaaagagagagagggcgtcagctgcatcagctctaagtacgccaacaccgtgtacaccgacagcgtgaagggcagattcagactgagcagaggcaccgccaagaataccgtgtacctccagatgagcgccctgaagcctgaggataccgccgtgtactactgcgctatggacagccgcagagtgacatgccctgagatcagcaccatgcaccggaacttcgattcttggggccagggcacactggtcacagtgtcatctggtaccggcggaggcggatctggcggcggaggtagcggtggcggaggatctgaattcgacatcgtgatgacacagagccctgatagcctggccgtgtctctgggagagagagccaccatcaactgcaagagcagccagagcctgctgaacagcggcaacaacaagaactacgtgacatggtatcagcagaagcccggccagcctcctaagctgctgatctactggggcagcaccagatccacaggcgtgcccgatagattttctggctctggcagcggcaccgacttcaccctgacaatttctagcctgcaagccgaggacgtggccgtgtactactgccagaacgactacacataccccttcaccttcggccagggcaccaagctggaaatcaaactcgaggacctgaagaacgtgttcccacctgaggtggccgtgttcgagcctagcaaggccgagatcgcccacacccagaaagccaccctcgtgtgcctggctaccggcttctaccccgaccatgtggaactgtcttggtgggtcaacggcaaagaggtgcacagcggcgtgtgtaccgacccccagccactgaaagaacagcccgccctgaacgacagccggtactgcctgagcagcagactgagagtgtccgccaccttctggcagaacccccggaaccacttcagatgccaggtgcagttctacggcctgagcgagaacgacgagtggacccaggacagagccaagcccgtgacccagatcgtgtctgccgaagcctggggcagagccgattgcggcatcaccagcgccagctaccaccagggcgtgctgagcgccaccatcctgtacgagatcctgctgggcaaggccaccctgtacgccgtgctggtgtctgccctggtgctgatggctatggtcaagcggaaggacagccggggaagggccaagcgatctggatctggagcaacaaacttctcactactcaaacaagcaggtgacgtggaggagaatcccgggcctactagtatggactggatttggcgcatccttttccttgtcggcgctgctaccggcgcgcattccttcgaacaagttcagctggttcagagcggagccgaagtgaagaaacctggggcctctgtgaaggtgtcctgcaaggcttccggctataccttcaccagcttttggctgaactgggtccgacaggcccctggacaaggactggaatggatgggcaacatctaccccagcgacagctacaccgtgtacaaccagaaattcaaggaccgcgtgaccatgaccagggacaccagcacaagcacagtgtacatggaactgagcagcctgcggagcgaggataccgccgtgtattattgcgccagaacctggcggggcaacagcttcgattattggggccagggaaccaccgtgaccgtgtcatctacgcgtatccagaaccctgatcctgccgtgtaccagctgcgggatagcaagagcagcgacaagagcgtgtgtctgttcaccgacttcgacagccagaccaacgtgtcccagagcaaggactccgacgtgtacatcaccgataagtgcgtgctggacatgcggagcatggacttcaagagcaactccgccgtggcctggtccaacaagtccgatttcgcctgcgccaacgccttcaacaacagcattatccccgaggacacattcttcccaagcagcgacgtgccctgcgacgtgaagctggtggaaaagagcttcgagacagacaccaacctgaacttccagaacctgagcgtgatcggcttcagaatcctgctgctgaaagtggccggctttaacctgctgatgaccctgcggctgtggtccagctaa

SEQ ID NO: 37765 - DNA, 2289 bp, synthetic construct
  source 1..2289: mol_type = other DNA
atggccttaccagtgaccgccttgctcctgccgctggccttgctgctccacgccgccaggccggacatcgtgatgacacagagccctgatagcctggccgtgtctctgggagagagagccaccatcaactgcaagagcagccagagcctgctgaacagcggcaacaacaagaactacgtgacatggtatcagcagaagcccggccagcctcctaagctgctgatctactggggcagcaccagatccacaggcgtgcccgatagattttctggctctggcagcggcaccgacttcaccctgacaatttctagcctgcaagccgaggacgtggccgtgtactactgccagaacgactacacataccccttcaccttcggccagggcaccaagctggaaatcaaactcgaggacctgaagaacgtgttcccacctgaggtggccgtgttcgagcctagcgaggccgagatcagccacacccagaaagccaccctcgtgtgcctggctaccggcttctaccccgaccatgtggaactgtcttggtgggtcaacggcaaagaggtgcacagcggcgtgtgtaccgacccccagccactgaaagaacagcccgccctgaacgacagccggtactgcctgagcagcagactgagagtgtccgccaccttctggcagaacccccggaaccacttcagatgccaggtgcagttctacggcctgagcgagaacgacgagtggacccaggacagagccaagcccgtgacccagatcgtgtctgccgaagcctggggcagagccgattgcggctttaccagcgagagctaccagcagggcgtgctgagcgccaccatcctgtacgagatcctgctgggcaaggccaccctgtacgccgtgctggtgtctgccctggtgctgatggctatggtcaagcggaaggacagccggggaagggccaagcgatctggatctggagcaacaaacttctcactactcaaacaagcaggtgacgtggaggagaatcccgggcctactagtaccatggactggatttggcgcatccttttccttgtcggcgctgctaccggcgcccattccgggcccgaagtgcaactggttgaatccggtggcggcctggtgcaacccggcggatctctcagacttagctgtgccgcctccggcagaaccttcacaatgggatggtacaggcaggctccagggaaagagagagagttcgtcgccgccatctctctgtctcccacactggcctactacgccgactctgtgaaaggccggttcaccatctccagagataatagcaagaacaccgtggtgctgcaaatgaactctctgagagccgaggatacagccctgtactattgtgccgctgaccggaagtccgtgatgagcatcagacccgattactggggacagggcacactggtcacagtgtctagtggatccggcggcggaggatctggcggaggcggatctgggggcggaggctctttcgaacaagttcagctggttcagagcggagccgaagtgaagaaacctggggcctctgtgaaggtgtcctgcaaggcttccggctataccttcaccagcttttggctgaactgggtccgacaggcccctggacaaggactggaatggatgggcaacatctaccccagcgacagctacaccgtgtacaaccagaaattcaaggaccgcgtgaccatgaccagggacaccagcacaagcacagtgtacatggaactgagcagcctgcggagcgaggataccgccgtgtattattgcgccagaacctggcggggcaacagcttcgattattggggccagggaaccaccgtgaccgtgtcatctacgcgtatccagaaccctgatcctgccgtgtaccagctgcgggatagcaagagcagcgacaagagcgtgtgtctgttcaccgacttcgacagccagaccaacgtgtcccagagcaaggactccgacgtgtacatcaccgataagtgcgtgctggacatgcggagcatggacttcaagagcaactccgccgtggcctggtccaacaagtccgatttcgcctgcgccaacgccttcaacaacagcattatccccgaggacacattcttcccaagccccgagagcagctgcgacgtgaagctggtggaaaagagcttcgagacagacaccaacctgaacttccagaacctgagcgtgatcggcttcagaatcctgctgctgaaagtggccggctttaacctgctgatgaccctgcggctgtggtccagctaa

SEQ ID NO: 37766 - DNA, 2307 bp, synthetic construct
  source 1..2307: mol_type = other DNA
atggccttaccagtgaccgccttgctcctgccgctggccttgctgctccacgccgccaggccggacatcgtgatgacacagagccctgatagcctggccgtgtctctgggagagagagccaccatcaactgcaagagcagccagagcctgctgaacagcggcaacaacaagaactacgtgacatggtatcagcagaagcccggccagcctcctaagctgctgatctactggggcagcaccagatccacaggcgtgcccgatagattttctggctctggcagcggcaccgacttcaccctgacaatttctagcctgcaagccgaggacgtggccgtgtactactgccagaacgactacacataccccttcaccttcggccagggcaccaagctggaaatcaaactcgaggacctgaagaacgtgttcccacctgaggtggccgtgttcgagcctagcgaggccgagatcagccacacccagaaagccaccctcgtgtgcctggctaccggcttctaccccgaccatgtggaactgtcttggtgggtcaacggcaaagaggtgcacagcggcgtgtgtaccgacccccagccactgaaagaacagcccgccctgaacgacagccggtactgcctgagcagcagactgagagtgtccgccaccttctggcagaacccccggaaccacttcagatgccaggtgcagttctacggcctgagcgagaacgacgagtggacccaggacagagccaagcccgtgacccagatcgtgtctgccgaagcctggggcagagccgattgcggctttaccagcgagagctaccagcagggcgtgctgagcgccaccatcctgtacgagatcctgctgggcaaggccaccctgtacgccgtgctggtgtctgccctggtgctgatggctatggtcaagcggaaggacagccggggaagggccaagcgatctggatctggagcaacaaacttctcactactcaaacaagcaggtgacgtggaggagaatcccgggcctactagtaccatggactggatttggcgcatccttttccttgtcggcgctgctaccggcgcccattccgggccccaggtgcagctggttgaatctggcggaggactggttcagcctggcggatctctgagactgtcttgtgccgccagcggcaacatcaacagcagaaactgcatgggctggttcagacaggcccctggcaagggaagagaaggcgtggcagctatcggccaagtgaccggcagaacctactacgtggacagcgtgaagggcagattcaccatcagcctggacaacagcaagaacaccctgtacctccagatgaacagcctgagagccgaggacaccgccgtgtactattgtgctgctgcccctggctgtctgctgtctgcacttagaagcgccgactacagaaactggggccagggcacactggtcaccgtttcttctggatccggcggcggaggatctggcggaggcggatctgggggcggaggctctttcgaacaagttcagctggttcagagcggagccgaagtgaagaaacctggggcctctgtgaaggtgtcctgcaaggcttccggctataccttcaccagcttttggctgaactgggtccgacaggcccctggacaaggactggaatggatgggcaacatctaccccagcgacagctacaccgtgtacaaccagaaattcaaggaccgcgtgaccatgaccagggacaccagcacaagcacagtgtacatggaactgagcagcctgcggagcgaggataccgccgtgtattattgcgccagaacctggcggggcaacagcttcgattattggggccagggaaccaccgtgaccgtgtcatctacgcgtatccagaaccctgatcctgccgtgtaccagctgcgggatagcaagagcagcgacaagagcgtgtgtctgttcaccgacttcgacagccagaccaacgtgtcccagagcaaggactccgacgtgtacatcaccgataagtgcgtgctggacatgcggagcatggacttcaagagcaactccgccgtggcctggtccaacaagtccgatttcgcctgcgccaacgccttcaacaacagcattatccccgaggacacattcttcccaagccccgagagcagctgcgacgtgaagctggtggaaaagagcttcgagacagacaccaacctgaacttccagaacctgagcgtgatcggcttcagaatcctgctgctgaaagtggccggctttaacctgctgatgaccctgcggctgtggtccagc

SEQ ID NO: 37767 - DNA, 2310 bp, synthetic construct
  source 1..2310: mol_type = other DNA
atggccttaccagtgaccgccttgctcctgccgctggccttgctgctccacgccgccaggccggacatcgtgatgacacagagccctgatagcctggccgtgtctctgggagagagagccaccatcaactgcaagagcagccagagcctgctgaacagcggcaacaacaagaactacgtgacatggtatcagcagaagcccggccagcctcctaagctgctgatctactggggcagcaccagatccacaggcgtgcccgatagattttctggctctggcagcggcaccgacttcaccctgacaatttctagcctgcaagccgaggacgtggccgtgtactactgccagaacgactacacataccccttcaccttcggccagggcaccaagctggaaatcaaactcgaggacctgaagaacgtgttcccacctgaggtggccgtgttcgagcctagcgaggccgagatcagccacacccagaaagccaccctcgtgtgcctggctaccggcttctaccccgaccatgtggaactgtcttggtgggtcaacggcaaagaggtgcacagcggcgtgtgtaccgacccccagccactgaaagaacagcccgccctgaacgacagccggtactgcctgagcagcagactgagagtgtccgccaccttctggcagaacccccggaaccacttcagatgccaggtgcagttctacggcctgagcgagaacgacgagtggacccaggacagagccaagcccgtgacccagatcgtgtctgccgaagcctggggcagagccgattgcggctttaccagcgagagctaccagcagggcgtgctgagcgccaccatcctgtacgagatcctgctgggcaaggccaccctgtacgccgtgctggtgtctgccctggtgctgatggctatggtcaagcggaaggacagccggggaagggccaagcgatctggatctggagcaacaaacttctcactactcaaacaagcaggtgacgtggaggagaatcccgggcctactagtaccatggactggatttggcgcatccttttccttgtcggcgctgctaccggcgcccattccgggccccaggtgcagctggttgaatctggcggaggatctgttcaggctggcggctctctgagactgtcttgtggcgcttccggcaacatcagcagcagaaactgcatgggctggttcagacaggcccctggcaaagagagagaaggcgttgccgccatcggacaagtgaccggcagatcctactacgtggacagcgtgaagggcagattcaccatcagcctggacaacgccaagaacaccctgtacctccagatgaacacactgaagcccgaggacaccgccatgtactactgtgctgctgcccctggctgtctgctgtctgcacttagaagcgccgactacagaaactggggccagggaacccaagtgacagtgtctagtggatccggcggcggaggatctggcggaggcggatctgggggcggaggctctttcgaacaagttcagctggttcagagcggagccgaagtgaagaaacctggggcctctgtgaaggtgtcctgcaaggcttccggctataccttcaccagcttttggctgaactgggtccgacaggcccctggacaaggactggaatggatgggcaacatctaccccagcgacagctacaccgtgtacaaccagaaattcaaggaccgcgtgaccatgaccagggacaccagcacaagcacagtgtacatggaactgagcagcctgcggagcgaggataccgccgtgtattattgcgccagaacctggcggggcaacagcttcgattattggggccagggaaccaccgtgaccgtgtcatctacgcgtatccagaaccctgatcctgccgtgtaccagctgcgggatagcaagagcagcgacaagagcgtgtgtctgttcaccgacttcgacagccagaccaacgtgtcccagagcaaggactccgacgtgtacatcaccgataagtgcgtgctggacatgcggagcatggacttcaagagcaactccgccgtggcctggtccaacaagtccgatttcgcctgcgccaacgccttcaacaacagcattatccccgaggacacattcttcccaagccccgagagcagctgcgacgtgaagctggtggaaaagagcttcgagacagacaccaacctgaacttccagaacctgagcgtgatcggcttcagaatcctgctgctgaaagtggccggctttaacctgctgatgaccctgcggctgtggtccagctaa

SEQ ID NO: 37768 - DNA, 2733 bp, synthetic construct
  source 1..2733: mol_type = other DNA
atggccttaccagtgaccgccttgctcctgccgctggccttgctgctccacgccgccaggccggaagtgcagctggttgaatctggcggaggactggttcaggctggcggatctctgagactgtcttgtgccgccagcggcagaacctttagcatgggctggtttagacaggcccctggcaaagagagagagttcgtcgccgccatcacatactctggcggcagcccttactacgccgactctgtgaagggcagattcaccatcagccgggacaacgccaagaacaccgtgtacctccagatgaacagcctgaagcctgaggacaccgccgtgtactactgcgccgccaatccaacatacggcagcgactggaacgccgagaattggggccagggaacccaagtgacagtgtctagcggtaccggcggaggcggatctggcggcggaggtagcggtggcggaggatctgaattcgacatcgtgatgacacagagccctgatagcctggccgtgtctctgggagagagagccaccatcaactgcaagagcagccagagcctgctgaacagcggcaacaacaagaactacgtgacatggtatcagcagaagcccggccagcctcctaagctgctgatctactggggcagcaccagatccacaggcgtgcccgatagattttctggctctggcagcggcaccgacttcaccctgacaatttctagcctgcaagccgaggacgtggccgtgtactactgccagaacgactacacataccccttcaccttcggccagggcaccaagctggaaatcaaactcgagatccagaaccctgatcctgccgtgtaccagctgcgggatagcaagagcagcgacaagagcgtgtgtctgttcaccgacttcgacagccagaccaacgtgtcccagagcaaggactccgacgtgtacatcaccgataagtgcgtgctggacatgcggagcatggacttcaagagcaactccgccgtggcctggtccaacaagtccgatttcgcctgcgccaacgccttcaacaacagcattatccccgaggacacattcttcccaagcagcgacgtgccctgcgacgtgaagctggtggaaaagagcttcgagacagacaccaacctgaacttccagaacctgagcgtgatcggcttcagaatcctgctgctgaaagtggccggctttaacctgctgatgaccctgcggctgtggtccagccgcgccaagagaagcggatctggcgtgaagcagaccctgaatttcgacctgctgaagctggctggcgacgtggaatccaacccaggccctactagtaccatggactggatttggcgcatccttttccttgtcggcgctgctaccggcgcccattccgggccccaggtgcagctggttgaatctggcggaggatctgttcaggctggcggctctctgagactgtcttgtggcgcttccggcaacatcagcagcagaaactgcatgggctggttcagacaggcccctggcaaagagagagaaggcgttgccgccatcggacaagtgaccggcagatcctactacgtggacagcgtgaagggcagattcaccatcagcctggacaacgccaagaacaccctgtacctccagatgaacacactgaagcccgaggacaccgccatgtactactgtgctgctgcccctggctgtctgctgtctgcacttagaagcgccgactacagaaactggggccagggaacccaagtgacagtgtctagtggatccggcggcggaggatctggcggaggcggatctgggggcggaggctctttcgaacaagttcagctggttcagagcggagccgaagtgaagaaacctggggcctctgtgaaggtgtcctgcaaggcttccggctataccttcaccagcttttggctgaactgggtccgacaggcccctggacaaggactggaatggatgggcaacatctaccccagcgacagctacaccgtgtacaaccagaaattcaaggaccgcgtgaccatgaccagggacaccagcacaagcacagtgtacatggaactgagcagcctgcggagcgaggataccgccgtgtattattgcgccagaacctggcggggcaacagcttcgattattggggccagggaaccaccgtgaccgtgtcatctacgcgtgaggacctgaagaacgtgttcccacctgaggtggccgtgttcgagcctagcaaggccgagatcgcccacacccagaaagccaccctcgtgtgcctggctaccggcttctaccccgaccatgtggaactgtcttggtgggtcaacggcaaagaggtgcacagcggcgtgtgtaccgacccccagccactgaaagaacagcccgccctgaacgacagccggtactgcctgagcagcagactgagagtgtccgccaccttctggcagaacccccggaaccacttcagatgccaggtgcagttctacggcctgagcgagaacgacgagtggacccaggacagagccaagcccgtgacccagatcgtgtctgccgaagcctggggcagagccgattgcggcatcaccagcgccagctaccaccagggcgtgctgagcgccaccatcctgtacgagatcctgctgggcaaggccaccctgtacgccgtgctggtgtctgccctggtgctgatggctatggtcaagcggaaggacagccggggataa

SEQ ID NO: 37769 - DNA, 2724 bp, synthetic construct
  source 1..2724: mol_type = other DNA
atggccttaccagtgaccgccttgctcctgccgctggccttgctgctccacgccgccaggccgcaggtgcagctggttgaatctggcggaggatctgttcaggctggcggctctctgagactgtcttgtggcgcttccggcaacatcagcagcagaaactgcatgggctggttcagacaggcccctggcaaagagagagaaggcgttgccgccatcggacaagtgaccggcagatcctactacgtggacagcgtgaagggcagattcaccatcagcctggacaacgccaagaacaccctgtacctccagatgaacacactgaagcccgaggacaccgccatgtactactgtgctgctgcccctggctgtctgctgtctgcacttagaagcgccgactacagaaactggggccagggaacccaagtgacagtgtctagtggtaccggcggaggcggatctggcggcggaggtagcggtggcggaggatctgaattcgacatcgtgatgacacagagccctgatagcctggccgtgtctctgggagagagagccaccatcaactgcaagagcagccagagcctgctgaacagcggcaacaacaagaactacgtgacatggtatcagcagaagcccggccagcctcctaagctgctgatctactggggcagcaccagatccacaggcgtgcccgatagattttctggctctggcagcggcaccgacttcaccctgacaatttctagcctgcaagccgaggacgtggccgtgtactactgccagaacgactacacataccccttcaccttcggccagggcaccaagctggaaatcaaactcgaggacctgaagaacgtgttcccacctgaggtggccgtgttcgagcctagcgaggccgagatcagccacacccagaaagccaccctcgtgtgcctggctaccggcttctaccccgaccatgtggaactgtcttggtgggtcaacggcaaagaggtgcacagcggcgtgtgtaccgacccccagccactgaaagaacagcccgccctgaacgacagccggtactgcctgagcagcagactgagagtgtccgccaccttctggcagaacccccggaaccacttcagatgccaggtgcagttctacggcctgagcgagaacgacgagtggacccaggacagagccaagcccgtgacccagatcgtgtctgccgaagcctggggcagagccgattgcggctttaccagcgagagctaccagcagggcgtgctgagcgccaccatcctgtacgagatcctgctgggcaaggccaccctgtacgccgtgctggtgtctgccctggtgctgatggctatggtcaagcggaaggacagccggggaagggccaagcgatctggatctggagcaacaaacttctcactactcaaacaagcaggtgacgtggaggagaatcccgggcctactagtgccaccatggactggatttggcgcatccttttccttgtcggcgctgctaccggcgcccattccgggcccgaagtgcaactggttgaatccggtggcggcctggtgcaagcaggcggatctctcagacttagctgtgccgcctccggcagaaccttcacaatgggatggtttaggcaggctccagggaaagagagagagttcgtcgccgccatctctctgtctcccacactggcctactacgccgactctgtgaaaggccggttcaccatctccagagataatgccaagaacaccgtggtgctgcaaatgaactctctgaaacccgaggatacagccctgtactattgtgccgctgaccggaagtccgtgatgagcatcagacccgattactggggacagggcacacaagtcacagtgtcctctggatccggcggcggaggatctggcggaggcggatctgggggcggaggctctttcgaacaagttcagctggttcagagcggagccgaagtgaagaaacctggggcctctgtgaaggtgtcctgcaaggcttccggctataccttcaccagcttttggctgaactgggtccgacaggcccctggacaaggactggaatggatgggcaacatctaccccagcgacagctacaccgtgtacaaccagaaattcaaggaccgcgtgaccatgaccagggacaccagcacaagcacagtgtacatggaactgagcagcctgcggagcgaggataccgccgtgtattattgcgccagaacctggcggggcaacagcttcgattattggggccagggaaccaccgtgaccgtgtcatctacgcgtatccagaaccctgatcctgccgtgtaccagctgcgggatagcaagagcagcgacaagagcgtgtgtctgttcaccgacttcgacagccagaccaacgtgtcccagagcaaggactccgacgtgtacatcaccgataagtgcgtgctggacatgcggagcatggacttcaagagcaactccgccgtggcctggtccaacaagtccgatttcgcctgcgccaacgccttcaacaacagcattatccccgaggacacattcttcccaagccccgagagcagctgcgacgtgaagctggtggaaaagagcttcgagacagacaccaacctgaacttccagaacctgagcgtgatcggcttcagaatcctgctgctgaaagtggccggctttaacctgctgatgaccctgcggctgtggtccagctaa

SEQ ID NO: 37770 - DNA, 2313 bp, synthetic construct
  source 1..2313: mol_type = other DNA
atggccttaccagtgaccgccttgctcctgccgctggccttgctgctccacgccgccaggccgcaggtgcagctggttgaatctggcggaggatctgttcaggctggcggctctctgagactgtcttgtggcgcttccggcaacatcagcagcagaaactgcatgggctggttcagacaggcccctggcaaagagagagaaggcgttgccgccatcggacaagtgaccggcagatcctactacgtggacagcgtgaagggcagattcaccatcagcctggacaacgccaagaacaccctgtacctccagatgaacacactgaagcccgaggacaccgccatgtactactgtgctgctgcccctggctgtctgctgtctgcacttagaagcgccgactacagaaactggggccagggaacccaagtgacagtgtctagtggtaccggcggaggcggatctggcggcggaggtagcggtggcggaggatctgaattcgacatcgtgatgacacagagccctgatagcctggccgtgtctctgggagagagagccaccatcaactgcaagagcagccagagcctgctgaacagcggcaacaacaagaactacgtgacatggtatcagcagaagcccggccagcctcctaagctgctgatctactggggcagcaccagatccacaggcgtgcccgatagattttctggctctggcagcggcaccgacttcaccctgacaatttctagcctgcaagccgaggacgtggccgtgtactactgccagaacgactacacataccccttcaccttcggccagggcaccaagctggaaatcaaactcgaggacctgaagaacgtgttcccacctgaggtggccgtgttcgagcctagcgaggccgagatcagccacacccagaaagccaccctcgtgtgcctggctaccggcttctaccccgaccatgtggaactgtcttggtgggtcaacggcaaagaggtgcacagcggcgtgtgtaccgacccccagccactgaaagaacagcccgccctgaacgacagccggtactgcctgagcagcagactgagagtgtccgccaccttctggcagaacccccggaaccacttcagatgccaggtgcagttctacggcctgagcgagaacgacgagtggacccaggacagagccaagcccgtgacccagatcgtgtctgccgaagcctggggcagagccgattgcggctttaccagcgagagctaccagcagggcgtgctgagcgccaccatcctgtacgagatcctgctgggcaaggccaccctgtacgccgtgctggtgtctgccctggtgctgatggctatggtcaagcggaaggacagccggggaagggccaagcgatctggatctggagcaacaaacttctcactactcaaacaagcaggtgacgtggaggagaatcccgggcctactagtgccaccatggactggatttggcgcatccttttccttgtcggcgctgctaccggcgcccattccttcgaacaagttcagctggttcagagcggagccgaagtgaagaaacctggggcctctgtgaaggtgtcctgcaaggcttccggctataccttcaccagcttttggctgaactgggtccgacaggcccctggacaaggactggaatggatgggcaacatctaccccagcgacagctacaccgtgtacaaccagaaattcaaggaccgcgtgaccatgaccagggacaccagcacaagcacagtgtacatggaactgagcagcctgcggagcgaggataccgccgtgtattattgcgccagaacctggcggggcaacagcttcgattattggggccagggaaccaccgtgaccgtgtcatctacgcgtatccagaaccctgatcctgccgtgtaccagctgcgggatagcaagagcagcgacaagagcgtgtgtctgttcaccgacttcgacagccagaccaacgtgtcccagagcaaggactccgacgtgtacatcaccgataagtgcgtgctggacatgcggagcatggacttcaagagcaactccgccgtggcctggtccaacaagtccgatttcgcctgcgccaacgccttcaacaacagcattatccccgaggacacattcttcccaagccccgagagcagctgcgacgtgaagctggtggaaaagagcttcgagacagacaccaacctgaacttccagaacctgagcgtgatcggcttcagaatcctgctgctgaaagtggccggctttaacctgctgatgaccctgcggctgtggtccagctaa

SEQ ID NO: 37771 - DNA, 2313 bp, synthetic construct
  source 1..2313: mol_type = other DNA
atggccttaccagtgaccgccttgctcctgccgctggccttgctgctccacgccgccaggccgcaagttcagctggtggaaagcggtggtggcgttgtgcaacctggtggaagtctgaggctgagctgtgccgcttctggcctgagctttagcacctacactgtggcctggttcaggcaggctcccggaaagggtcttgaaggcgtggccgccattccttacaccagccagcacatggtgtacacagacagcgtcagaggccggttcaccatcagcagagacaactccaagaatacgctctatctccagatgaactctctgcgcgccgaagatacagccgtgtattactgcgccaccgacagacggcctggcacctctatgctggctatcaacggctacaacagatggggacagggaaccaccgtgaccgtgtcatctggtaccggcggaggcggatctggcggcggaggtagcggtggcggaggatctgaattcgacatcgtgatgacacagagccctgatagcctggccgtgtctctgggagagagagccaccatcaactgcaagagcagccagagcctgctgaacagcggcaacaacaagaactacgtgacatggtatcagcagaagcccggccagcctcctaagctgctgatctactggggcagcaccagatccacaggcgtgcccgatagattttctggctctggcagcggcaccgacttcaccctgacaatttctagcctgcaagccgaggacgtggccgtgtactactgccagaacgactacacataccccttcaccttcggccagggcaccaagctggaaatcaaactcgaggacctgaagaacgtgttcccacctgaggtggccgtgttcgagcctagcgaggccgagatcagccacacccagaaagccaccctcgtgtgcctggctaccggcttctaccccgaccatgtggaactgtcttggtgggtcaacggcaaagaggtgcacagcggcgtgtgtaccgacccccagccactgaaagaacagcccgccctgaacgacagccggtactgcctgagcagcagactgagagtgtccgccaccttctggcagaacccccggaaccacttcagatgccaggtgcagttctacggcctgagcgagaacgacgagtggacccaggacagagccaagcccgtgacccagatcgtgtctgccgaagcctggggcagagccgattgcggctttaccagcgagagctaccagcagggcgtgctgagcgccaccatcctgtacgagatcctgctgggcaaggccaccctgtacgccgtgctggtgtctgccctggtgctgatggctatggtcaagcggaaggacagccggggaagggccaagcgatctggatctggagcaacaaacttctcactactcaaacaagcaggtgacgtggaggagaatcccgggcctactagtgccaccatggactggatttggcgcatccttttccttgtcggcgctgctaccggcgcccattccttcgaacaagttcagctggttcagagcggagccgaagtgaagaaacctggggcctctgtgaaggtgtcctgcaaggcttccggctataccttcaccagcttttggctgaactgggtccgacaggcccctggacaaggactggaatggatgggcaacatctaccccagcgacagctacaccgtgtacaaccagaaattcaaggaccgcgtgaccatgaccagggacaccagcacaagcacagtgtacatggaactgagcagcctgcggagcgaggataccgccgtgtattattgcgccagaacctggcggggcaacagcttcgattattggggccagggaaccaccgtgaccgtgtcatctacgcgtatccagaaccctgatcctgccgtgtaccagctgcgggatagcaagagcagcgacaagagcgtgtgtctgttcaccgacttcgacagccagaccaacgtgtcccagagcaaggactccgacgtgtacatcaccgataagtgcgtgctggacatgcggagcatggacttcaagagcaactccgccgtggcctggtccaacaagtccgatttcgcctgcgccaacgccttcaacaacagcattatccccgaggacacattcttcccaagccccgagagcagctgcgacgtgaagctggtggaaaagagcttcgagacagacaccaacctgaacttccagaacctgagcgtgatcggcttcagaatcctgctgctgaaagtggccggctttaacctgctgatgaccctgcggctgtggtccagctaa

SEQ ID NO: 37772 - DNA, 2310 bp, synthetic construct
  source 1..2310: mol_type = other DNA
atggccttaccagtgaccgccttgctcctgccgctggccttgctgctccacgccgccaggccggacatcgtgatgacacagagccctgatagcctggccgtgtctctgggagagagagccaccatcaactgcaagagcagccagagcctgctgaacagcggcaacaacaagaactacgtgacatggtatcagcagaagcccggccagcctcctaagctgctgatctactggggcagcaccagatccacaggcgtgcccgatagattttctggctctggcagcggcaccgacttcaccctgacaatttctagcctgcaagccgaggacgtggccgtgtactactgccagaacgactacacataccccttcaccttcggccagggcaccaagctggaaatcaaactcgaggacctgaagaacgtgttcccacctgaggtggccgtgttcgagcctagcgaggccgagatcagccacacccagaaagccaccctcgtgtgcctggctaccggcttctaccccgaccatgtggaactgtcttggtgggtcaacggcaaagaggtgcacagcggcgtgtgtaccgacccccagccactgaaagaacagcccgccctgaacgacagccggtactgcctgagcagcagactgagagtgtccgccaccttctggcagaacccccggaaccacttcagatgccaggtgcagttctacggcctgagcgagaacgacgagtggacccaggacagagccaagcccgtgacccagatcgtgtctgccgaagcctggggcagagccgattgcggctttaccagcgagagctaccagcagggcgtgctgagcgccaccatcctgtacgagatcctgctgggcaaggccaccctgtacgccgtgctggtgtctgccctggtgctgatggctatggtcaagcggaaggacagccggggaagggccaagcgatctggatctggagcaacaaacttctcactactcaaacaagcaggtgacgtggaggagaatcccgggcctactagtaccatggactggatttggcgcatccttttccttgtcggcgctgctaccggcgcccattccgggccccaagttcagctggtggaaagcggtggtggcgttgtgcaacctggtggaagtctgaggctgagctgtgccgcttctggcctgagctttagcacctacactgtggcctggttcaggcaggctcccggaaagggtcttgaaggcgtggccgccattccttacaccagccagcacatggtgtacacagacagcgtcagaggccggttcaccatcagcagagacaactccaagaatacgctctatctccagatgaactctctgcgcgccgaagatacagccgtgtattactgcgccaccgacagacggcctggcacctctatgctggctatcaacggctacaacagatggggacagggaaccaccgtgaccgtgtcatctggatccggcggcggaggatctggcggaggcggatctgggggcggaggctctttcgaacaagttcagctggttcagagcggagccgaagtgaagaaacctggggcctctgtgaaggtgtcctgcaaggcttccggctataccttcaccagcttttggctgaactgggtccgacaggcccctggacaaggactggaatggatgggcaacatctaccccagcgacagctacaccgtgtacaaccagaaattcaaggaccgcgtgaccatgaccagggacaccagcacaagcacagtgtacatggaactgagcagcctgcggagcgaggataccgccgtgtattattgcgccagaacctggcggggcaacagcttcgattattggggccagggaaccaccgtgaccgtgtcatctacgcgtatccagaaccctgatcctgccgtgtaccagctgcgggatagcaagagcagcgacaagagcgtgtgtctgttcaccgacttcgacagccagaccaacgtgtcccagagcaaggactccgacgtgtacatcaccgataagtgcgtgctggacatgcggagcatggacttcaagagcaactccgccgtggcctggtccaacaagtccgatttcgcctgcgccaacgccttcaacaacagcattatccccgaggacacattcttcccaagccccgagagcagctgcgacgtgaagctggtggaaaagagcttcgagacagacaccaacctgaacttccagaacctgagcgtgatcggcttcagaatcctgctgctgaaagtggccggctttaacctgctgatgaccctgcggctgtggtccagctaa

SEQ ID NO: 37773 - DNA, 2316 bp, synthetic construct
  source 1..2316: mol_type = other DNA
atggccttaccagtgaccgccttgctcctgccgctggccttgctgctccacgccgccaggccggacatcgtgatgacacagagccctgatagcctggccgtgtctctgggagagagagccaccatcaactgcaagagcagccagagcctgctgaacagcggcaacaacaagaactacgtgacatggtatcagcagaagcccggccagcctcctaagctgctgatctactggggcagcaccagatccacaggcgtgcccgatagattttctggctctggcagcggcaccgacttcaccctgacaatttctagcctgcaagccgaggacgtggccgtgtactactgccagaacgactacacataccccttcaccttcggccagggcaccaagctggaaatcaaactcgaggacctgaagaacgtgttcccacctgaggtggccgtgttcgagcctagcgaggccgagatcagccacacccagaaagccaccctcgtgtgcctggctaccggcttctaccccgaccatgtggaactgtcttggtgggtcaacggcaaagaggtgcacagcggcgtgtgtaccgacccccagccactgaaagaacagcccgccctgaacgacagccggtactgcctgagcagcagactgagagtgtccgccaccttctggcagaacccccggaaccacttcagatgccaggtgcagttctacggcctgagcgagaacgacgagtggacccaggacagagccaagcccgtgacccagatcgtgtctgccgaagcctggggcagagccgattgcggctttaccagcgagagctaccagcagggcgtgctgagcgccaccatcctgtacgagatcctgctgggcaaggccaccctgtacgccgtgctggtgtctgccctggtgctgatggctatggtcaagcggaaggacagccggggaagggccaagcgatctggatctggagcaacaaacttctcactactcaaacaagcaggtgacgtggaggagaatcccgggcctactagtaccatggactggatttggcgcatccttttccttgtcggcgctgctaccggcgcccattccgggcccgaggtgcagctggttgaatctggcggaggatctgttcaggctggcggctctctgagactgtcttgtgccgccagcggctacacctacagcatcaactgcatgggctggttcagacaggcccctggcaaagagagagaaggcgttgccgccatctctaccggcggaggcagaaccgattaccgggattctgtgaagggcagattcaccatcagccaggacaacgccaagaacaccgtgtacctccagatgaacagcctgaagcctgaggacaccgccatgtactactgtgccggcaagaccacctatcctggctacggatgtggcctgggcagaagcgcctacaattattggggccagggcacccaagtgaccgtgtcatctggatccggcggcggaggatctggcggaggcggatctgggggcggaggctctttcgaacaagttcagctggttcagagcggagccgaagtgaagaaacctggggcctctgtgaaggtgtcctgcaaggcttccggctataccttcaccagcttttggctgaactgggtccgacaggcccctggacaaggactggaatggatgggcaacatctaccccagcgacagctacaccgtgtacaaccagaaattcaaggaccgcgtgaccatgaccagggacaccagcacaagcacagtgtacatggaactgagcagcctgcggagcgaggataccgccgtgtattattgcgccagaacctggcggggcaacagcttcgattattggggccagggaaccaccgtgaccgtgtcatctacgcgtatccagaaccctgatcctgccgtgtaccagctgcgggatagcaagagcagcgacaagagcgtgtgtctgttcaccgacttcgacagccagaccaacgtgtcccagagcaaggactccgacgtgtacatcaccgataagtgcgtgctggacatgcggagcatggacttcaagagcaactccgccgtggcctggtccaacaagtccgatttcgcctgcgccaacgccttcaacaacagcattatccccgaggacacattcttcccaagccccgagagcagctgcgacgtgaagctggtggaaaagagcttcgagacagacaccaacctgaacttccagaacctgagcgtgatcggcttcagaatcctgctgctgaaagtggccggctttaacctgctgatgaccctgcggctgtggtccagctaa

SEQ ID NO: 37774 - DNA, 1872 bp, synthetic construct
  source 1..1872: mol_type = other DNA
atggccttaccagtgaccgccttgctcctgccgctggccttgctgctccacgccgccaggccggacatcgtgatgacacagagccctgatagcctggccgtgtctctgggagagagagccaccatcaactgcaagagcagccagagcctgctgaacagcggcaacaacaagaactacgtgacatggtatcagcagaagcccggccagcctcctaagctgctgatctactggggcagcaccagatccacaggcgtgcccgatagattttctggctctggcagcggcaccgacttcaccctgacaatttctagcctgcaagccgaggacgtggccgtgtactactgccagaacgactacacataccccttcaccttcggccagggcaccaagctggaaatcaaactcgaggacctgaagcacgtgttcccacctgaggtggccgtgttcgagcctagcgacgccgagatctggcacacccagaaagccaccctcgtgtgcctggctaccggcttctaccccgaccatgtggaactgtcttggtgggtcaacggcaaagaggtgcacagcggcgtgtctaccgacccccagccactgaaagaacagcccgccctgaacgacagccggtactgcctgagcagcagactgagagtgtccgccaccttctggcagaacccccggaaccacttcagatgccaggtgcagttctacggcctgagcgagaacgacgagtggacccaggacagagccaagcccgtgacccagatcgtgtctgccgaagcctggggcagagccgattgcggctttaccagcgagagctaccagcagggcgtgctgagcgccaccatcctgtacgagatcctgctgggcaaggccaccctgtacgccgtgctggtgtctgccctggtgctgatggctatggtcaagcggaaggacagccggggaagggccaagcgatctggatctggagcaacaaacttctcactactcaaacaagcaggtgacgtggaggagaatcccgggcctactagtatggactggatttggcgcatccttttccttgtcggcgctgctaccggcgcgcattccttcgaacaagttcagctggttcagagcggagccgaagtgaagaaacctggggcctctgtgaaggtgtcctgcaaggcttccggctataccttcaccagcttttggctgaactgggtccgacaggcccctggacaaggactggaatggatgggcaacatctaccccagcgacagctacaccgtgtacaaccagaaattcaaggaccgcgtgaccatgaccagggacaccagcacaagcacagtgtacatggaactgagcagcctgcggagcgaggataccgccgtgtattattgcgccagaacctggcggggcaacagcttcgattattggggccagggaaccaccgtgaccgtgtcatctacgcgtatccagaaccctgatcctgccgtgtaccagctgcgggatagcaagagcagcgacaagagcgtgtgtctgttcaccgacttcgacagccagaccaacgtgtcccagagcaaggactccgacgtgtacatcaccgataagaccgtgctggacatgcggagcatggacttcaagagcaactccgccgtggcctggtccagcaagtccgatttcgcctgcgccaacgccttcaacaacagcattatccccgaggacacattcttcccaagccccgagatggcctgcgacgtgaagctggtggaaaagagcttcgagacagacaccaacctgaacttccagaacctgctcgtgatctggctgagaatcctgctgctgaaagtggccggctttaacctgctgatgaccctgcggctgtggtccagc

SEQ ID NO: 37775 - DNA, 1872 bp, synthetic construct
  source 1..1872: mol_type = other DNA
atggccttaccagtgaccgccttgctcctgccgctggccttgctgctccacgccgccaggccggacatcgtgatgacacagagccctgatagcctggccgtgtctctgggagagagagccaccatcaactgcaagagcagccagagcctgctgaacagcggcaacaacaagaactacgtgacatggtatcagcagaagcccggccagcctcctaagctgctgatctactggggcagcaccagatccacaggcgtgcccgatagattttctggctctggcagcggcaccgacttcaccctgacaatttctagcctgcaagccgaggacgtggccgtgtactactgccagaacgactacacataccccttcaccttcggccagggcaccaagctggaaatcaaactcgaggacctgaagcacgtgttcccacctgaggtggccgtgttcgagcctagcgacgccgagatctggcacacccagaaagccaccctcgtgtgcctggctaccggcttctaccccgaccatgtggaactgtcttggtgggtcaacggcaaagaggtgcacagcggcgtgtctaccgacccccagccactgaaagaacagcccgccctgaacgacagccggtactgcctgagcagcagactgagagtgtccgccaccttctggcagaacccccggaaccacttcagatgccaggtgcagttctacggcctgagcgagaacgacgagtggacccaggacagagccaagcccgtgacccagatcgtgtctgccgaagcctggggcagagccgattgcggctttaccagcgagagctaccagcagggcgtgctgagcgccaccatcctgtacgagatcctgctgggcaaggccaccctgtacgccgtgctggtgtctgccctggtgctgatggctatggtcaagcggaaggacagccggggaagggccaagcgatctggatctggagcaacaaacttctcactactcaaacaagcaggtgacgtggaggagaatcccgggcctactagtatggactggatttggcgcatccttttccttgtcggcgctgctaccggcgcgcattccttcgaacaagttcagctggttcagagcggagccgaagtgaagaaacctggggcctctgtgaaggtgtcctgcaaggcttccggctataccttcaccagcttttggctgaactgggtccgacaggcccctggacaaggactggaatggatgggcaacatctaccccagcgacagctacaccgtgtacaaccagaaattcaaggaccgcgtgaccatgaccagggacaccagcacaagcacagtgtacatggaactgagcagcctgcggagcgaggataccgccgtgtattattgcgccagaacctggcggggcaacagcttcgattattggggccagggaaccaccgtgaccgtgtcatctacgcgtatccagaaccctgatcctgccgtgtaccagctgcgggatagcaagagcagcgacaagagcgtgtgtctgttcaccgacttcgacagccagaccaacgtgtcccagagcaaggactccgacgtgtacatcaccgataagaccgtgctggacatgcggagcatggacttcaagagcaactccgccgtggcctggtccaccaagtccgatttcgcctgcgccaacgccttcaacaacagcattatccccgaggacacattcttcccaagccccgaggtggtgtgcgacgtgaagctggtggaaaagagcttcgagacagacaccaacctgaacttccagaacctggtggtgatcggcgccagaatcctgctgctgaaagtggccggctttaacctgctgatgaccctgcggctgtggtccagc

SEQ ID NO: 37776 - DNA, 1872 bp, synthetic construct
  source 1..1872: mol_type = other DNA
atggccttaccagtgaccgccttgctcctgccgctggccttgctgctccacgccgccaggccggacatcgtgatgacacagagccctgatagcctggccgtgtctctgggagagagagccaccatcaactgcaagagcagccagagcctgctgaacagcggcaacaacaagaactacgtgacatggtatcagcagaagcccggccagcctcctaagctgctgatctactggggcagcaccagatccacaggcgtgcccgatagattttctggctctggcagcggcaccgacttcaccctgacaatttctagcctgcaagccgaggacgtggccgtgtactactgccagaacgactacacataccccttcaccttcggccagggcaccaagctggaaatcaaactcgaggacctgaagaacgtgttcccacctgaggtggccgtgttcgagcctagcaaggccgagatcagcagaacccagaaagccaccctcgtgtgcctggctaccggcttctaccctcctcatgtggaactgtcttggtgggtcaacggcaaagaggtgcacgacggcgtgtgtaccgacccccagccactgaaagaacagcccgccctgaacgacagccggtactgcctgagcagcagactgagagtgtccgccaccttctggcagaacccccggaaccacttcagatgccaggtgcagttctacggcctgagcgagaacgacgagtggacccaggacagagccaagcccgtgacccagatcgtgtctgccgaagcctggggcagagccgattgcggctttaccagcgagagctaccagcagggcgtgctgagcgccaccatcctgtacgagatcctgctgggcaaggccaccctgtacgccgtgctggtgtctgccctggtgctgatggctatggtcaagcggaaggacagccggggaagggccaagcgatctggatctggagcaacaaacttctcactactcaaacaagcaggtgacgtggaggagaatcccgggcctactagtatggactggatttggcgcatccttttccttgtcggcgctgctaccggcgcgcattccttcgaacaagttcagctggttcagagcggagccgaagtgaagaaacctggggcctctgtgaaggtgtcctgcaaggcttccggctataccttcaccagcttttggctgaactgggtccgacaggcccctggacaaggactggaatggatgggcaacatctaccccagcgacagctacaccgtgtacaaccagaaattcaaggaccgcgtgaccatgaccagggacaccagcacaagcacagtgtacatggaactgagcagcctgcggagcgaggataccgccgtgtattattgcgccagaacctggcggggcaacagcttcgattattggggccagggaaccaccgtgaccgtgtcatctacgcgtatccagaaccctgatcctgccgtgtaccagctgcgggatagcaagagcagcgacaagttcgtgtgtctgttcaccgacttcgacagccagatcaacgtgtcccagagcaaggactccgacgtgtacatcaccgataagtgcgtgctggacatgcggagcatggacttcaagagcaactccgccgtggcctggtccaacaagtccgatttcacctgcgccaacgccttcaacaacagcattatccccgaggacacattcttcccaagccccgagagcagctgcgacgtgaagctggtggaaaagagcttcgagacagacaccaacctgaacttccagaacctgagcgtgatcggcttcagaatcctgctgctgaaagtggccggctttaacctgctgatgaccctgcggctgtggtccagc

SEQ ID NO: 37777 - DNA, 2298 bp, synthetic construct
  source 1..2298: mol_type = other DNA
atggccttaccagtgaccgccttgctcctgccgctggccttgctgctccacgccgccaggccggacatcgtgatgacacagagccctgatagcctggccgtgtctctgggagagagagccaccatcaactgcaagagcagccagagcctgctgaacagcggcaacaacaagaactacgtgacatggtatcagcagaagcccggccagcctcctaagctgctgatctactggggcagcaccagatccacaggcgtgcccgatagattttctggctctggcagcggcaccgacttcaccctgacaatttctagcctgcaagccgaggacgtggccgtgtactactgccagaacgactacacataccccttcaccttcggccagggcaccaagctggaaatcaaactcgaggacctgaagaacgtgttcccacctgaggtggccgtgttcgagcctagcgaggccgagatcagccacacccagaaagccaccctcgtgtgcctggctaccggcttctaccccgaccatgtggaactgtcttggtgggtcaacggcaaagaggtgcacagcggcgtgtgtaccgacccccagccactgaaagaacagcccgccctgaacgacagccggtactgcctgagcagcagactgagagtgtccgccaccttctggcagaacccccggaaccacttcagatgccaggtgcagttctacggcctgagcgagaacgacgagtggacccaggacagagccaagcccgtgacccagatcgtgtctgccgaagcctggggcagagccgattgcggctttaccagcgagagctaccagcagggcgtgctgagcgccaccatcctgtacgagatcctgctgggcaaggccaccctgtacgccgtgctggtgtctgccctggtgctgatggctatggtcaagcggaaggacagccggggaagggccaagcgatctggatctggagcaacaaacttctcactactcaaacaagcaggtgacgtggaggagaatcccgggcctactagtaccatggactggatttggcgcatccttttccttgtcggcgctgctaccggcgcccattccgggccccaggtgcagctccaagaaagcggacccggactggttaagccctctcagaccctgtctctgacctgcacagttagcggagccagcattaccacaggcgagtattattggaattggtttcggcagccaccaggcaaggggcttgagtggatgggtgctattgctgcctctggcagcaccacctactctcccagctttgagagcagaacctccatcagccgggacacctccaaaaaccagttctctctgaagctgtcctccgtgaccgctgctgacaccgccgtctattattgtggccggtctttcggcgtggcagctgtgaccacaggacagaacagaggccagggaacacttgtgaccgtgtcctctggatccggcggcggaggatctggcggaggcggatctgggggcggaggctctttcgaacaagttcagctggttcagagcggagccgaagtgaagaaacctggggcctctgtgaaggtgtcctgcaaggcttccggctataccttcaccagcttttggctgaactgggtccgacaggcccctggacaaggactggaatggatgggcaacatctaccccagcgacagctacaccgtgtacaaccagaaattcaaggaccgcgtgaccatgaccagggacaccagcacaagcacagtgtacatggaactgagcagcctgcggagcgaggataccgccgtgtattattgcgccagaacctggcggggcaacagcttcgattattggggccagggaaccaccgtgaccgtgtcatctacgcgtatccagaaccctgatcctgccgtgtaccagctgcgggatagcaagagcagcgacaagagcgtgtgtctgttcaccgacttcgacagccagaccaacgtgtcccagagcaaggactccgacgtgtacatcaccgataagtgcgtgctggacatgcggagcatggacttcaagagcaactccgccgtggcctggtccaacaagtccgatttcgcctgcgccaacgccttcaacaacagcattatccccgaggacacattcttcccaagccccgagagcagctgcgacgtgaagctggtggaaaagagcttcgagacagacaccaacctgaacttccagaacctgagcgtgatcggcttcagaatcctgctgctgaaagtggccggctttaacctgctgatgaccctgcggctgtggtccagc

SEQ ID NO: 37778 - DNA, 2721 bp, synthetic construct
  source 1..2721: mol_type = other DNA
atggccttaccagtgaccgccttgctcctgccgctggccttgctgctccacgccgccaggccgcaggttcagctgcaagagtctggccctggcctggtcaagcctagccaaacactgagcctgacctgtaccgtgtctggcggctctatcaccaccggcgagttctactggaactggttcagacagcctcctggcaaaggactggaatggatgggagccattgccgccagcggcagcacaacatacagccctagcttcgagagccggaccagcatcagcagagacaccagcaagaatcagttcagcctgaagctgagcagcgtgacagccgccgatacagccgtgtattactgcggcagatcctttggagtggccgccgtgacaaccggccagaatagaggacagggcaccctggtcacagtgtctagcggtaccggcggaggcggatctggcggcggaggtagcggtggcggaggatctgaattcgacatcgtgatgacacagagccctgatagcctggccgtgtctctgggagagagagccaccatcaactgcaagagcagccagagcctgctgaacagcggcaacaacaagaactacgtgacatggtatcagcagaagcccggccagcctcctaagctgctgatctactggggcagcaccagatccacaggcgtgcccgatagattttctggctctggcagcggcaccgacttcaccctgacaatttctagcctgcaagccgaggacgtggccgtgtactactgccagaacgactacacataccccttcaccttcggccagggcaccaagctggaaatcaaactcgagatccagaaccctgatcctgccgtgtaccagctgcgggatagcaagagcagcgacaagagcgtgtgtctgttcaccgacttcgacagccagaccaacgtgtcccagagcaaggactccgacgtgtacatcaccgataagtgcgtgctggacatgcggagcatggacttcaagagcaactccgccgtggcctggtccaacaagtccgatttcgcctgcgccaacgccttcaacaacagcattatccccgaggacacattcttcccaagcagcgacgtgccctgcgacgtgaagctggtggaaaagagcttcgagacagacaccaacctgaacttccagaacctgagcgtgatcggcttcagaatcctgctgctgaaagtggccggctttaacctgctgatgaccctgcggctgtggtccagccgcgccaagagaagcggatctggcgtgaagcagaccctgaatttcgacctgctgaagctggctggcgacgtggaatccaacccaggccctactagtaccatggactggatttggcgcatccttttccttgtcggcgctgctaccggcgcccattccgggcccgaagtgcaactggttgaatccggtggcggcctggtgcaacccggcggatctctcagacttagctgtgccgcctccggcagaaccttcacaatgggatggtacaggcaggctccagggaaagagagagagttcgtcgccgccatctctctgtctcccacactggcctactacgccgactctgtgaaaggccggttcaccatctccagagataatagcaagaacaccgtggtgctgcaaatgaactctctgagagccgaggatacagccctgtactattgtgccgctgaccggaagtccgtgatgagcatcagacccgattactggggacagggcacactggtcacagtgtctagtggatccggcggcggaggatctggcggaggcggatctgggggcggaggctctttcgaacaagttcagctggttcagagcggagccgaagtgaagaaacctggggcctctgtgaaggtgtcctgcaaggcttccggctataccttcaccagcttttggctgaactgggtccgacaggcccctggacaaggactggaatggatgggcaacatctaccccagcgacagctacaccgtgtacaaccagaaattcaaggaccgcgtgaccatgaccagggacaccagcacaagcacagtgtacatggaactgagcagcctgcggagcgaggataccgccgtgtattattgcgccagaacctggcggggcaacagcttcgattattggggccagggaaccaccgtgaccgtgtcatctacgcgtgaggacctgaagaacgtgttcccacctgaggtggccgtgttcgagcctagcaaggccgagatcgcccacacccagaaagccaccctcgtgtgcctggctaccggcttctaccccgaccatgtggaactgtcttggtgggtcaacggcaaagaggtgcacagcggcgtgtgtaccgacccccagccactgaaagaacagcccgccctgaacgacagccggtactgcctgagcagcagactgagagtgtccgccaccttctggcagaacccccggaaccacttcagatgccaggtgcagttctacggcctgagcgagaacgacgagtggacccaggacagagccaagcccgtgacccagatcgtgtctgccgaagcctggggcagagccgattgcggcatcaccagcgccagctaccaccagggcgtgctgagcgccaccatcctgtacgagatcctgctgggcaaggccaccctgtacgccgtgctggtgtctgccctggtgctgatggctatggtcaagcggaaggacagccgggga

SEQ ID NO: 37779 - DNA, 2310 bp, synthetic construct
  source 1..2310: mol_type = other DNA
atggccttaccagtgaccgccttgctcctgccgctggccttgctgctccacgccgccaggccgcaggttcagctgcaagagtctggccctggcctggtcaagcctagccaaacactgagcctgacctgtaccgtgtctggcggctctatcaccaccggcgagttctactggaactggttcagacagcctcctggcaaaggactggaatggatgggagccattgccgccagcggcagcacaacatacagccctagcttcgagagccggaccagcatcagcagagacaccagcaagaatcagttcagcctgaagctgagcagcgtgacagccgccgatacagccgtgtattactgcggcagatcctttggagtggccgccgtgacaaccggccagaatagaggacagggcaccctggtcacagtgtctagcggtaccggcggaggcggatctggcggcggaggtagcggtggcggaggatctgaattcgacatcgtgatgacacagagccctgatagcctggccgtgtctctgggagagagagccaccatcaactgcaagagcagccagagcctgctgaacagcggcaacaacaagaactacgtgacatggtatcagcagaagcccggccagcctcctaagctgctgatctactggggcagcaccagatccacaggcgtgcccgatagattttctggctctggcagcggcaccgacttcaccctgacaatttctagcctgcaagccgaggacgtggccgtgtactactgccagaacgactacacataccccttcaccttcggccagggcaccaagctggaaatcaaactcgagatccagaaccctgatcctgccgtgtaccagctgcgggatagcaagagcagcgacaagagcgtgtgtctgttcaccgacttcgacagccagaccaacgtgtcccagagcaaggactccgacgtgtacatcaccgataagtgcgtgctggacatgcggagcatggacttcaagagcaactccgccgtggcctggtccaacaagtccgatttcgcctgcgccaacgccttcaacaacagcattatccccgaggacacattcttcccaagcagcgacgtgccctgcgacgtgaagctggtggaaaagagcttcgagacagacaccaacctgaacttccagaacctgagcgtgatcggcttcagaatcctgctgctgaaagtggccggctttaacctgctgatgaccctgcggctgtggtccagccgcgccaagagaagcggatctggcgtgaagcagaccctgaatttcgacctgctgaagctggctggcgacgtggaatccaacccaggccctactagtaccatggactggatttggcgcatccttttccttgtcggcgctgctaccggcgcccattccttcgaacaagttcagctggttcagagcggagccgaagtgaagaaacctggggcctctgtgaaggtgtcctgcaaggcttccggctataccttcaccagcttttggctgaactgggtccgacaggcccctggacaaggactggaatggatgggcaacatctaccccagcgacagctacaccgtgtacaaccagaaattcaaggaccgcgtgaccatgaccagggacaccagcacaagcacagtgtacatggaactgagcagcctgcggagcgaggataccgccgtgtattattgcgccagaacctggcggggcaacagcttcgattattggggccagggaaccaccgtgaccgtgtcatctacgcgtgaggacctgaagaacgtgttcccacctgaggtggccgtgttcgagcctagcaaggccgagatcgcccacacccagaaagccaccctcgtgtgcctggctaccggcttctaccccgaccatgtggaactgtcttggtgggtcaacggcaaagaggtgcacagcggcgtgtgtaccgacccccagccactgaaagaacagcccgccctgaacgacagccggtactgcctgagcagcagactgagagtgtccgccaccttctggcagaacccccggaaccacttcagatgccaggtgcagttctacggcctgagcgagaacgacgagtggacccaggacagagccaagcccgtgacccagatcgtgtctgccgaagcctggggcagagccgattgcggcatcaccagcgccagctaccaccagggcgtgctgagcgccaccatcctgtacgagatcctgctgggcaaggccaccctgtacgccgtgctggtgtctgccctggtgctgatggctatggtcaagcggaaggacagccgggga

SEQ ID NO: 37780 - DNA, 2709 bp, synthetic construct
  source 1..2709: mol_type = other DNA
atggccttaccagtgaccgccttgctcctgccgctggccttgctgctccacgccgccaggccggaagtgcagctggttgaatctggcggaggactggttcaggctggcggatctctgagactgtcttgtgccgccagcggcagaacctttagcatgggctggtttagacaggcccctggcaaagagagagagttcgtcgccgccatcacatactctggcggcagcccttactacgccgactctgtgaagggcagattcaccatcagccgggacaacgccaagaacaccgtgtacctccagatgaacagcctgaagcctgaggacaccgccgtgtactactgcgccgccaatccaacatacggcagcgactggaacgccgagaattggggccagggaacccaagtgacagtgtctagcggtaccggcggaggcggatctggcggcggaggtagcggtggcggaggatctgaattcgacatcgtgatgacacagagccctgatagcctggccgtgtctctgggagagagagccaccatcaactgcaagagcagccagagcctgctgaacagcggcaacaacaagaactacgtgacatggtatcagcagaagcccggccagcctcctaagctgctgatctactggggcagcaccagatccacaggcgtgcccgatagattttctggctctggcagcggcaccgacttcaccctgacaatttctagcctgcaagccgaggacgtggccgtgtactactgccagaacgactacacataccccttcaccttcggccagggcaccaagctggaaatcaaactcgaggacctgaagaacgtgttcccacctgaggtggccgtgttcgagcctagcgaggccgagatcagccacacccagaaagccaccctcgtgtgcctggctaccggcttctaccccgaccatgtggaactgtcttggtgggtcaacggcaaagaggtgcacagcggcgtgtgtaccgacccccagccactgaaagaacagcccgccctgaacgacagccggtactgcctgagcagcagactgagagtgtccgccaccttctggcagaacccccggaaccacttcagatgccaggtgcagttctacggcctgagcgagaacgacgagtggacccaggacagagccaagcccgtgacccagatcgtgtctgccgaagcctggggcagagccgattgcggctttaccagcgagagctaccagcagggcgtgctgagcgccaccatcctgtacgagatcctgctgggcaaggccaccctgtacgccgtgctggtgtctgccctggtgctgatggctatggtcaagcggaaggacagccggggaagggccaagcgatctggatctggagcaacaaacttctcactactcaaacaagcaggtgacgtggaggagaatcccgggcctactagtaccatggactggatttggcgcatccttttccttgtcggcgctgctaccggcgcccattccgggccccaggtgcagctccaagaaagcggacccggactggttaagccctctcagaccctgtctctgacctgcacagttagcggagccagcattaccacaggcgagtattattggaattggtttcggcagccaccaggcaaggggcttgagtggatgggtgctattgctgcctctggcagcaccacctactctcccagctttgagagcagaacctccatcagccgggacacctccaaaaaccagttctctctgaagctgtcctccgtgaccgctgctgacaccgccgtctattattgtggccggtctttcggcgtggcagctgtgaccacaggacagaacagaggccagggaacacttgtgaccgtgtcctctggatccggcggcggaggatctggcggaggcggatctgggggcggaggctctttcgaacaagttcagctggttcagagcggagccgaagtgaagaaacctggggcctctgtgaaggtgtcctgcaaggcttccggctataccttcaccagcttttggctgaactgggtccgacaggcccctggacaaggactggaatggatgggcaacatctaccccagcgacagctacaccgtgtacaaccagaaattcaaggaccgcgtgaccatgaccagggacaccagcacaagcacagtgtacatggaactgagcagcctgcggagcgaggataccgccgtgtattattgcgccagaacctggcggggcaacagcttcgattattggggccagggaaccaccgtgaccgtgtcatctacgcgtatccagaaccctgatcctgccgtgtaccagctgcgggatagcaagagcagcgacaagagcgtgtgtctgttcaccgacttcgacagccagaccaacgtgtcccagagcaaggactccgacgtgtacatcaccgataagtgcgtgctggacatgcggagcatggacttcaagagcaactccgccgtggcctggtccaacaagtccgatttcgcctgcgccaacgccttcaacaacagcattatccccgaggacacattcttcccaagccccgagagcagctgcgacgtgaagctggtggaaaagagcttcgagacagacaccaacctgaacttccagaacctgagcgtgatcggcttcagaatcctgctgctgaaagtggccggctttaacctgctgatgaccctgcggctgtggtccagc

SEQ ID NO: 37781 - DNA, 2730 bp, synthetic construct
  source 1..2730: mol_type = other DNA
atggccttaccagtgaccgccttgctcctgccgctggccttgctgctccacgccgccaggccggaagtgcagctggttgaatctggcggaggactggttcaggctggcggatctctgagactgtcttgtgccgccagcggcagaacctttagcatgggctggtttagacaggcccctggcaaagagagagagttcgtcgccgccatcacatactctggcggcagcccttactacgccgactctgtgaagggcagattcaccatcagccgggacaacgccaagaacaccgtgtacctccagatgaacagcctgaagcctgaggacaccgccgtgtactactgcgccgccaatccaacatacggcagcgactggaacgccgagaattggggccagggaacccaagtgacagtgtctagcggtaccggcggaggcggatctggcggcggaggtagcggtggcggaggatctgaattcgacatcgtgatgacacagagccctgatagcctggccgtgtctctgggagagagagccaccatcaactgcaagagcagccagagcctgctgaacagcggcaacaacaagaactacgtgacatggtatcagcagaagcccggccagcctcctaagctgctgatctactggggcagcaccagatccacaggcgtgcccgatagattttctggctctggcagcggcaccgacttcaccctgacaatttctagcctgcaagccgaggacgtggccgtgtactactgccagaacgactacacataccccttcaccttcggccagggcaccaagctggaaatcaaactcgagatccagaaccctgatcctgccgtgtaccagctgcgggatagcaagagcagcgacaagagcgtgtgtctgttcaccgacttcgacagccagaccaacgtgtcccagagcaaggactccgacgtgtacatcaccgataagtgcgtgctggacatgcggagcatggacttcaagagcaactccgccgtggcctggtccaacaagtccgatttcgcctgcgccaacgccttcaacaacagcattatccccgaggacacattcttcccaagcagcgacgtgccctgcgacgtgaagctggtggaaaagagcttcgagacagacaccaacctgaacttccagaacctgagcgtgatcggcttcagaatcctgctgctgaaagtggccggctttaacctgctgatgaccctgcggctgtggtccagccgcgccaagagaagcggatctggcgtgaagcagaccctgaatttcgacctgctgaagctggctggcgacgtggaatccaacccaggccctactagtaccatggactggatttggcgcatccttttccttgtcggcgctgctaccggcgcccattccgggccccaggtgcagctggttgaatctggcggaggactggttcagcctggcggatctctgagactgtcttgtgccgccagcggcaacatcaacagcagaaactgcatgggctggttcagacaggcccctggcaagggaagagaaggcgtggcagctatcggccaagtgaccggcagaacctactacgtggacagcgtgaagggcagattcaccatcagcctggacaacagcaagaacaccctgtacctccagatgaacagcctgagagccgaggacaccgccgtgtactattgtgctgctgcccctggctgtctgctgtctgcacttagaagcgccgactacagaaactggggccagggcacactggtcaccgtttcttctggatccggcggcggaggatctggcggaggcggatctgggggcggaggctctttcgaacaagttcagctggttcagagcggagccgaagtgaagaaacctggggcctctgtgaaggtgtcctgcaaggcttccggctataccttcaccagcttttggctgaactgggtccgacaggcccctggacaaggactggaatggatgggcaacatctaccccagcgacagctacaccgtgtacaaccagaaattcaaggaccgcgtgaccatgaccagggacaccagcacaagcacagtgtacatggaactgagcagcctgcggagcgaggataccgccgtgtattattgcgccagaacctggcggggcaacagcttcgattattggggccagggaaccaccgtgaccgtgtcatctacgcgtgaggacctgaagaacgtgttcccacctgaggtggccgtgttcgagcctagcaaggccgagatcgcccacacccagaaagccaccctcgtgtgcctggctaccggcttctaccccgaccatgtggaactgtcttggtgggtcaacggcaaagaggtgcacagcggcgtgtgtaccgacccccagccactgaaagaacagcccgccctgaacgacagccggtactgcctgagcagcagactgagagtgtccgccaccttctggcagaacccccggaaccacttcagatgccaggtgcagttctacggcctgagcgagaacgacgagtggacccaggacagagccaagcccgtgacccagatcgtgtctgccgaagcctggggcagagccgattgcggcatcaccagcgccagctaccaccagggcgtgctgagcgccaccatcctgtacgagatcctgctgggcaaggccaccctgtacgccgtgctggtgtctgccctggtgctgatggctatggtcaagcggaaggacagccgggga

SEQ ID NO: 37782 - DNA, 2718 bp, synthetic construct
  source 1..2718: mol_type = other DNA
atggccttaccagtgaccgccttgctcctgccgctggccttgctgctccacgccgccaggccggaagtgcagctggttgaatctggcggaggactggttcaggctggcggatctctgagactgtcttgtgccgccagcggcagaacctttagcatgggctggtttagacaggcccctggcaaagagagagagttcgtcgccgccatcacatactctggcggcagcccttactacgccgactctgtgaagggcagattcaccatcagccgggacaacgccaagaacaccgtgtacctccagatgaacagcctgaagcctgaggacaccgccgtgtactactgcgccgccaatccaacatacggcagcgactggaacgccgagaattggggccagggaacccaagtgacagtgtctagcggtaccggcggaggcggatctggcggcggaggtagcggtggcggaggatctgaattcgacatcgtgatgacacagagccctgatagcctggccgtgtctctgggagagagagccaccatcaactgcaagagcagccagagcctgctgaacagcggcaacaacaagaactacgtgacatggtatcagcagaagcccggccagcctcctaagctgctgatctactggggcagcaccagatccacaggcgtgcccgatagattttctggctctggcagcggcaccgacttcaccctgacaatttctagcctgcaagccgaggacgtggccgtgtactactgccagaacgactacacataccccttcaccttcggccagggcaccaagctggaaatcaaactcgaggacctgaagaacgtgttcccacctgaggtggccgtgttcgagcctagcgaggccgagatcagccacacccagaaagccaccctcgtgtgcctggctaccggcttctaccccgaccatgtggaactgtcttggtgggtcaacggcaaagaggtgcacagcggcgtgtgtaccgacccccagccactgaaagaacagcccgccctgaacgacagccggtactgcctgagcagcagactgagagtgtccgccaccttctggcagaacccccggaaccacttcagatgccaggtgcagttctacggcctgagcgagaacgacgagtggacccaggacagagccaagcccgtgacccagatcgtgtctgccgaagcctggggcagagccgattgcggctttaccagcgagagctaccagcagggcgtgctgagcgccaccatcctgtacgagatcctgctgggcaaggccaccctgtacgccgtgctggtgtctgccctggtgctgatggctatggtcaagcggaaggacagccggggaagggccaagcgatctggatctggagcaacaaacttctcactactcaaacaagcaggtgacgtggaggagaatcccgggcctactagtaccatggactggatttggcgcatccttttccttgtcggcgctgctaccggcgcccattccgggccccaggtgcagctggttgaatctggcggaggactggttcagcctggcggatctctgagactgtcttgtgccgccagcggcaacatcaacagcagaaactgcatgggctggttcagacaggcccctggcaagggaagagaaggcgtggcagctatcggccaagtgaccggcagaacctactacgtggacagcgtgaagggcagattcaccatcagcctggacaacagcaagaacaccctgtacctccagatgaacagcctgagagccgaggacaccgccgtgtactattgtgctgctgcccctggctgtctgctgtctgcacttagaagcgccgactacagaaactggggccagggcacactggtcaccgtttcttctggatccggcggcggaggatctggcggaggcggatctgggggcggaggctctttcgaacaagttcagctggttcagagcggagccgaagtgaagaaacctggggcctctgtgaaggtgtcctgcaaggcttccggctataccttcaccagcttttggctgaactgggtccgacaggcccctggacaaggactggaatggatgggcaacatctaccccagcgacagctacaccgtgtacaaccagaaattcaaggaccgcgtgaccatgaccagggacaccagcacaagcacagtgtacatggaactgagcagcctgcggagcgaggataccgccgtgtattattgcgccagaacctggcggggcaacagcttcgattattggggccagggaaccaccgtgaccgtgtcatctacgcgtatccagaaccctgatcctgccgtgtaccagctgcgggatagcaagagcagcgacaagagcgtgtgtctgttcaccgacttcgacagccagaccaacgtgtcccagagcaaggactccgacgtgtacatcaccgataagtgcgtgctggacatgcggagcatggacttcaagagcaactccgccgtggcctggtccaacaagtccgatttcgcctgcgccaacgccttcaacaacagcattatccccgaggacacattcttcccaagccccgagagcagctgcgacgtgaagctggtggaaaagagcttcgagacagacaccaacctgaacttccagaacctgagcgtgatcggcttcagaatcctgctgctgaaagtggccggctttaacctgctgatgaccctgcggctgtggtccagc

SEQ ID NO: 37783 - DNA, 2718 bp, synthetic construct
  source 1..2718: mol_type = other DNA
atggccttaccagtgaccgccttgctcctgccgctggccttgctgctccacgccgccaggccggaagtgcaactggttgaatccggtggcggcctggtgcaagcaggcggatctctcagacttagctgtgccgcctccggcagaaccttcacaatgggatggtttaggcaggctccagggaaagagagagagttcgtcgccgccatctctctgtctcccacactggcctactacgccgactctgtgaaaggccggttcaccatctccagagataatgccaagaacaccgtggtgctgcaaatgaactctctgaaacccgaggatacagccctgtactattgtgccgctgaccggaagtccgtgatgagcatcagacccgattactggggacagggcacacaagtcacagtgtcctctggtaccggcggaggcggatctggcggcggaggtagcggtggcggaggatctgaattcgacatcgtgatgacacagagccctgatagcctggccgtgtctctgggagagagagccaccatcaactgcaagagcagccagagcctgctgaacagcggcaacaacaagaactacgtgacatggtatcagcagaagcccggccagcctcctaagctgctgatctactggggcagcaccagatccacaggcgtgcccgatagattttctggctctggcagcggcaccgacttcaccctgacaatttctagcctgcaagccgaggacgtggccgtgtactactgccagaacgactacacataccccttcaccttcggccagggcaccaagctggaaatcaaactcgaggacctgaagaacgtgttcccacctgaggtggccgtgttcgagcctagcgaggccgagatcagccacacccagaaagccaccctcgtgtgcctggctaccggcttctaccccgaccatgtggaactgtcttggtgggtcaacggcaaagaggtgcacagcggcgtgtgtaccgacccccagccactgaaagaacagcccgccctgaacgacagccggtactgcctgagcagcagactgagagtgtccgccaccttctggcagaacccccggaaccacttcagatgccaggtgcagttctacggcctgagcgagaacgacgagtggacccaggacagagccaagcccgtgacccagatcgtgtctgccgaagcctggggcagagccgattgcggctttaccagcgagagctaccagcagggcgtgctgagcgccaccatcctgtacgagatcctgctgggcaaggccaccctgtacgccgtgctggtgtctgccctggtgctgatggctatggtcaagcggaaggacagccggggaagggccaagcgatctggatctggagcaacaaacttctcactactcaaacaagcaggtgacgtggaggagaatcccgggcctactagtaccatggactggatttggcgcatccttttccttgtcggcgctgctaccggcgcccattccgggccccaggtgcagctggttgaatctggcggaggactggttcagcctggcggatctctgagactgtcttgtgccgccagcggcaacatcaacagcagaaactgcatgggctggttcagacaggcccctggcaagggaagagaaggcgtggcagctatcggccaagtgaccggcagaacctactacgtggacagcgtgaagggcagattcaccatcagcctggacaacagcaagaacaccctgtacctccagatgaacagcctgagagccgaggacaccgccgtgtactattgtgctgctgcccctggctgtctgctgtctgcacttagaagcgccgactacagaaactggggccagggcacactggtcaccgtttcttctggatccggcggcggaggatctggcggaggcggatctgggggcggaggctctttcgaacaagttcagctggttcagagcggagccgaagtgaagaaacctggggcctctgtgaaggtgtcctgcaaggcttccggctataccttcaccagcttttggctgaactgggtccgacaggcccctggacaaggactggaatggatgggcaacatctaccccagcgacagctacaccgtgtacaaccagaaattcaaggaccgcgtgaccatgaccagggacaccagcacaagcacagtgtacatggaactgagcagcctgcggagcgaggataccgccgtgtattattgcgccagaacctggcggggcaacagcttcgattattggggccagggaaccaccgtgaccgtgtcatctacgcgtatccagaaccctgatcctgccgtgtaccagctgcgggatagcaagagcagcgacaagagcgtgtgtctgttcaccgacttcgacagccagaccaacgtgtcccagagcaaggactccgacgtgtacatcaccgataagtgcgtgctggacatgcggagcatggacttcaagagcaactccgccgtggcctggtccaacaagtccgatttcgcctgcgccaacgccttcaacaacagcattatccccgaggacacattcttcccaagccccgagagcagctgcgacgtgaagctggtggaaaagagcttcgagacagacaccaacctgaacttccagaacctgagcgtgatcggcttcagaatcctgctgctgaaagtggccggctttaacctgctgatgaccctgcggctgtggtccagc

SEQ ID NO: 37784 - DNA, 2730 bp, synthetic construct
  source 1..2730: mol_type = other DNA
atggccttaccagtgaccgccttgctcctgccgctggccttgctgctccacgccgccaggccgcaggttcagctgcaagagtctggccctggcctggtcaagcctagccaaacactgagcctgacctgtaccgtgtctggcggctctatcaccaccggcgagttctactggaactggttcagacagcctcctggcaaaggactggaatggatgggagccattgccgccagcggcagcacaacatacagccctagcttcgagagccggaccagcatcagcagagacaccagcaagaatcagttcagcctgaagctgagcagcgtgacagccgccgatacagccgtgtattactgcggcagatcctttggagtggccgccgtgacaaccggccagaatagaggacagggcaccctggtcacagtgtctagcggtaccggcggaggcggatctggcggcggaggtagcggtggcggaggatctgaattcgacatcgtgatgacacagagccctgatagcctggccgtgtctctgggagagagagccaccatcaactgcaagagcagccagagcctgctgaacagcggcaacaacaagaactacgtgacatggtatcagcagaagcccggccagcctcctaagctgctgatctactggggcagcaccagatccacaggcgtgcccgatagattttctggctctggcagcggcaccgacttcaccctgacaatttctagcctgcaagccgaggacgtggccgtgtactactgccagaacgactacacataccccttcaccttcggccagggcaccaagctggaaatcaaactcgaggacctgaagaacgtgttcccacctgaggtggccgtgttcgagcctagcgaggccgagatcagccacacccagaaagccaccctcgtgtgcctggctaccggcttctaccccgaccatgtggaactgtcttggtgggtcaacggcaaagaggtgcacagcggcgtgtgtaccgacccccagccactgaaagaacagcccgccctgaacgacagccggtactgcctgagcagcagactgagagtgtccgccaccttctggcagaacccccggaaccacttcagatgccaggtgcagttctacggcctgagcgagaacgacgagtggacccaggacagagccaagcccgtgacccagatcgtgtctgccgaagcctggggcagagccgattgcggctttaccagcgagagctaccagcagggcgtgctgagcgccaccatcctgtacgagatcctgctgggcaaggccaccctgtacgccgtgctggtgtctgccctggtgctgatggctatggtcaagcggaaggacagccggggaagggccaagcgatctggatctggagcaacaaacttctcactactcaaacaagcaggtgacgtggaggagaatcccgggcctactagtaccatggactggatttggcgcatccttttccttgtcggcgctgctaccggcgcccattccgggccccaggtgcagctggttgaatctggcggaggactggttcagcctggcggatctctgagactgtcttgtgccgccagcggcaacatcaacagcagaaactgcatgggctggttcagacaggcccctggcaagggaagagaaggcgtggcagctatcggccaagtgaccggcagaacctactacgtggacagcgtgaagggcagattcaccatcagcctggacaacagcaagaacaccctgtacctccagatgaacagcctgagagccgaggacaccgccgtgtactattgtgctgctgcccctggctgtctgctgtctgcacttagaagcgccgactacagaaactggggccagggcacactggtcaccgtttcttctggatccggcggcggaggatctggcggaggcggatctgggggcggaggctctttcgaacaagttcagctggttcagagcggagccgaagtgaagaaacctggggcctctgtgaaggtgtcctgcaaggcttccggctataccttcaccagcttttggctgaactgggtccgacaggcccctggacaaggactggaatggatgggcaacatctaccccagcgacagctacaccgtgtacaaccagaaattcaaggaccgcgtgaccatgaccagggacaccagcacaagcacagtgtacatggaactgagcagcctgcggagcgaggataccgccgtgtattattgcgccagaacctggcggggcaacagcttcgattattggggccagggaaccaccgtgaccgtgtcatctacgcgtatccagaaccctgatcctgccgtgtaccagctgcgggatagcaagagcagcgacaagagcgtgtgtctgttcaccgacttcgacagccagaccaacgtgtcccagagcaaggactccgacgtgtacatcaccgataagtgcgtgctggacatgcggagcatggacttcaagagcaactccgccgtggcctggtccaacaagtccgatttcgcctgcgccaacgccttcaacaacagcattatccccgaggacacattcttcccaagccccgagagcagctgcgacgtgaagctggtggaaaagagcttcgagacagacaccaacctgaacttccagaacctgagcgtgatcggcttcagaatcctgctgctgaaagtggccggctttaacctgctgatgaccctgcggctgtggtccagc

SEQ ID NO: 37785 - DNA, 1461 bp, synthetic construct
  source 1..1461: mol_type = other DNA
atggccttaccagtgaccgccttgctcctgccgctggccttgctgctccacgccgccaggccggacatccagttgacccagtcccccagctcactcagcgccagtgtgggggaccgggtgaccattacctgtaaagccagtcagagtgtggactatgacggggatagcttcctgaattggtatcagcagaagcctggcaaagccccaaagctgctgatctacgctgcatctaatctggagtcaggcgtgccttccaggttctccggtagtgggtctgggaccgatttcacattgaccatttcatccctccaacccgaggatttcgctacatattactgtcagcagtccaatgaggaccctctcacctttggccagggcaccaaagttgaaattaagagaggcggaggcggaagtggaggcggaggatctggcggcggaggctctgaagtccaacttgtggagtctggagggggcctggtgcagcccggcggctctctcagactgtcttgtgcggcaagcggctacaccttcacctcttactggatagaatgggtgaggcaggcacctggaaagggactggagtggattggagagattctgccaggagggggagatacaaattacaatgaaatcttcaaggggcgggccaccttttcagcggataccagcaagaatacagcttacctgcagatgaatagcctccgggcagaagataccgctgtttattattgcacgagacgggtgccaataagactggactattgggggcaagggactcttgtcaccgtcagttcaacgcgtaaaattgaagttatgtatcctcctccttacctagacaatgagaagagcaatggaaccattatccatgtgaaagggaaacacctttgtccaagtcccctatttcccggaccttctaagcccttttgggtgctggtggtggttgggggagtcctggcttgctatagcttgctagtaacagtggcctttattattttctgggtgaggagtaagaggagcaggctcctgcacagtgactacatgaacatgactccacgccgccccggacccacccgcaagcattaccagccctatgccccaccacgcgacttcgcagcctatcgctccagagtgaagttcagcaggagcgcagacgcccccgcgtaccagcagggccagaaccagctctataacgagctcaatctaggacgaagagaggagtacgatgttttggacaagagacgtggccgggaccctgagatggggggaaagccgagaaggaagaaccctcaggaaggcctgtacaatgaactgcagaaagataagatggcggaggcctacagtgagattgggatgaaaggcgagcgccggaggggcaaggggcacgatggcctttaccagggtctcagtacagccaccaaggacacctacgacgcccttcacatgcaggccctgccccctcgc

SEQ ID NO: 37786 - DNA, 1479 bp, synthetic construct
  source 1..1479: mol_type = other DNA
atggccttaccagtgaccgccttgctcctgccgctggccttgctgctccacgccgccaggccggacatccagttgacccagtcccccagctcactcagcgccagtgtgggggaccgggtgaccattacctgtaaagccagtcagagtgtggactatgacggggatagcttcctgaattggtatcagcagaagcctggcaaagccccaaagctgctgatctacgctgcatctaatctggagtcaggcgtgccttccaggttctccggtagtgggtctgggaccgatttcacattgaccatttcatccctccaacccgaggatttcgctacatattactgtcagcagtccaatgaggaccctctcacctttggccagggcaccaaagttgaaattaagagaggcggaggcggaagtggaggcggaggatctggcggcggaggctctgaagtccaacttgtggagtctggagggggcctggtgcagcccggcggctctctcagactgtcttgtgcggcaagcggctacaccttcacctcttactggatagaatgggtgaggcaggcacctggaaagggactggagtggattggagagattctgccaggagggggagatacaaattacaatgaaatcttcaaggggcgggccaccttttcagcggataccagcaagaatacagcttacctgcagatgaatagcctccgggcagaagataccgctgtttattattgcacgagacgggtgccaataagactggactattgggggcaagggactcttgtcaccgtcagttcaacgcgtgcgaagcccaccacgacgccagcgccgcgaccaccaacaccggcgcccaccatcgcgtcgcagcccctgtccctgcgcccagaggcgtgccggccagcggcggggggcgcagtgcacacgagggggctggacttcgcctgtgacatctacatctgggcgcccttggccgggacttgtggggtccttctcctgtcactggttatcaccctttactgcaaacggggcagaaagaaactcctgtatatattcaaacaaccatttatgagaccagtacaaactactcaagaggaagatggctgtagctgccgatttccagaagaagaagaaggaggatgtgaactgagagtgaagttcagcaggagcgcagacgcccccgcgtaccagcagggccagaaccagctctataacgagctgaatctaggacgaagagaggagtacgatgttttggacaagagacgtggccgggaccctgagatggggggaaagccgagaaggaagaaccctcaggaaggcctgtacaatgaactgcagaaagataagatggcggaggcctacagtgagattgggatgaaaggcgagcgccggaggggcaaggggcacgatggcctttaccagggtctcagtacagccaccaaggacacctacgacgcccttcacatgcaggccctgccccctcgc

SEQ ID NO: 37787 - DNA, 1479 bp, synthetic construct
  source 1..1479: mol_type = other DNA
atggccttaccagtgaccgccttgctcctgccgctggccttgctgctccacgccgccaggccggaagtccaacttgtggagtctggagggggcctggtgcagcccggcggctctctcagactgtcttgtgcggcaagcggctacaccttcacctcttactggatagaatgggtgaggcaggcacctggaaagggactggagtggattggagagattctgccaggagggggagatacaaattacaatgaaatcttcaaggggcgggccaccttttcagcggataccagcaagaatacagcttacctgcagatgaatagcctccgggcagaagataccgctgtttattattgcacgagacgggtgccaataagactggactattgggggcaagggactcttgtcaccgtcagttcaggcggaggcggaagtggaggcggaggatctggcggcggaggctctgacatccagttgacccagtcccccagctcactcagcgccagtgtgggggaccgggtgaccattacctgtaaagccagtcagagtgtggactatgacggggatagcttcctgaattggtatcagcagaagcctggcaaagccccaaagctgctgatctacgctgcatctaatctggagtcaggcgtgccttccaggttctccggtagtgggtctgggaccgatttcacattgaccatttcatccctccaacccgaggatttcgctacatattactgtcagcagtccaatgaggaccctctcacctttggccagggcaccaaagttgaaattaagagaacgcgtgcgaagcccaccacgacgccagcgccgcgaccaccaacaccggcgcccaccatcgcgtcgcagcccctgtccctgcgcccagaggcgtgccggccagcggcggggggcgcagtgcacacgagggggctggacttcgcctgtgacatctacatctgggcgcccttggccgggacttgtggggtccttctcctgtcactggttatcaccctttactgcaaacggggcagaaagaaactcctgtatatattcaaacaaccatttatgagaccagtacaaactactcaagaggaagatggctgtagctgccgatttccagaagaagaagaaggaggatgtgaactgagagtgaagttcagcaggagcgcagacgcccccgcgtaccagcagggccagaaccagctctataacgagctgaatctaggacgaagagaggagtacgatgttttggacaagagacgtggccgggaccctgagatggggggaaagccgagaaggaagaaccctcaggaaggcctgtacaatgaactgcagaaagataagatggcggaggcctacagtgagattgggatgaaaggcgagcgccggaggggcaaggggcacgatggcctttaccagggtctcagtacagccaccaaggacacctacgacgcccttcacatgcaggccctgccccctcgc

SEQ ID NO: 37788 - DNA, 1878 bp, synthetic construct
  source 1..1878: mol_type = other DNA
atggccttaccagtgaccgccttgctcctgccgctggccttgctgctccacgccgccaggccggacatccagttgacccagtcccccagctcactcagcgccagtgtgggggaccgggtgaccattacctgtaaagccagtcagagtgtggactatgacggggatagcttcctgaattggtatcagcagaagcctggcaaagccccaaagctgctgatctacgctgcatctaatctggagtcaggcgtgccttccaggttctccggtagtgggtctgggaccgatttcacattgaccatttcatccctccaacccgaggatttcgctacatattactgtcagcagtccaatgaggaccctctcacctttggccagggcaccaaagttgaaattaagagactcgagatccagaaccctgatcctgccgtgtaccagctgcgggatagcaagagcagcgacaagagcgtgtgtctgttcaccgacttcgacagccagaccaacgtgtcccagagcaaggactccgacgtgtacatcaccgataagtgcgtgctggacatgcggagcatggacttcaagagcaactccgccgtggcctggtccaacaagtccgatttcgcctgcgccaacgccttcaacaacagcattatccccgaggacacattcttcccaagcagcgacgtgccctgcgacgtgaagctggtggaaaagagcttcgagacagacaccaacctgaacttccagaacctgagcgtgatcggcttcagaatcctgctgctgaaagtggccggctttaacctgctgatgaccctgcggctgtggtccagccgcgccaagagaagcggatctggcgtgaagcagaccctgaatttcgacctgctgaagctggctggcgacgtggaatccaacccaggccctactagtatggactggatttggcgcatccttttccttgtcggcgctgctaccggcgcgcattccttcgaagaagtccaacttgtggagtctggagggggcctggtgcagcccggcggctctctcagactgtcttgtgcggcaagcggctacaccttcacctcttactggatagaatgggtgaggcaggcacctggaaagggactggagtggattggagagattctgccaggagggggagatacaaattacaatgaaatcttcaaggggcgggccaccttttcagcggataccagcaagaatacagcttacctgcagatgaatagcctccgggcagaagataccgctgtttattattgcacgagacgggtgccaataagactggactattgggggcaagggactcttgtcaccgtcagttcaacgcgtgaggacctgaagaacgtgttcccacctgaggtggccgtgttcgagcctagcaaggccgagatcgcccacacccagaaagccaccctcgtgtgcctggctaccggcttctaccccgaccatgtggaactgtcttggtgggtcaacggcaaagaggtgcacagcggcgtgtgtaccgacccccagccactgaaagaacagcccgccctgaacgacagccggtactgcctgagcagcagactgagagtgtccgccaccttctggcagaacccccggaaccacttcagatgccaggtgcagttctacggcctgagcgagaacgacgagtggacccaggacagagccaagcccgtgacccagatcgtgtctgccgaagcctggggcagagccgattgcggcatcaccagcgccagctaccaccagggcgtgctgagcgccaccatcctgtacgagatcctgctgggcaaggccaccctgtacgccgtgctggtgtctgccctggtgctgatggctatggtcaagcggaaggacagccgggga

SEQ ID NO: 37789 - DNA, 1866 bp, synthetic construct
  source 1..1866: mol_type = other DNA
atggccttaccagtgaccgccttgctcctgccgctggccttgctgctccacgccgccaggccggacatccagttgacccagtcccccagctcactcagcgccagtgtgggggaccgggtgaccattacctgtaaagccagtcagagtgtggactatgacggggatagcttcctgaattggtatcagcagaagcctggcaaagccccaaagctgctgatctacgctgcatctaatctggagtcaggcgtgccttccaggttctccggtagtgggtctgggaccgatttcacattgaccatttcatccctccaacccgaggatttcgctacatattactgtcagcagtccaatgaggaccctctcacctttggccagggcaccaaagttgaaattaagagactcgaggacctgaagaacgtgttcccacctgaggtggccgtgttcgagcctagcaaggccgagatcgcccacacccagaaagccaccctcgtgtgcctggctaccggcttctaccccgaccatgtggaactgtcttggtgggtcaacggcaaagaggtgcacagcggcgtgtgtaccgacccccagccactgaaagaacagcccgccctgaacgacagccggtactgcctgagcagcagactgagagtgtccgccaccttctggcagaacccccggaaccacttcagatgccaggtgcagttctacggcctgagcgagaacgacgagtggacccaggacagagccaagcccgtgacccagatcgtgtctgccgaagcctggggcagagccgattgcggcatcaccagcgccagctaccaccagggcgtgctgagcgccaccatcctgtacgagatcctgctgggcaaggccaccctgtacgccgtgctggtgtctgccctggtgctgatggctatggtcaagcggaaggacagccggggaagggccaagcgatctggatctggagcaacaaacttctcactactcaaacaagcaggtgacgtggaggagaatcccgggcctactagtatggactggatttggcgcatccttttccttgtcggcgctgctaccggcgcgcattccttcgaagaagtccaacttgtggagtctggagggggcctggtgcagcccggcggctctctcagactgtcttgtgcggcaagcggctacaccttcacctcttactggatagaatgggtgaggcaggcacctggaaagggactggagtggattggagagattctgccaggagggggagatacaaattacaatgaaatcttcaaggggcgggccaccttttcagcggataccagcaagaatacagcttacctgcagatgaatagcctccgggcagaagataccgctgtttattattgcacgagacgggtgccaataagactggactattgggggcaagggactcttgtcaccgtcagttcaacgcgtatccagaaccctgatcctgccgtgtaccagctgcgggatagcaagagcagcgacaagagcgtgtgtctgttcaccgacttcgacagccagaccaacgtgtcccagagcaaggactccgacgtgtacatcaccgataagtgcgtgctggacatgcggagcatggacttcaagagcaactccgccgtggcctggtccaacaagtccgatttcgcctgcgccaacgccttcaacaacagcattatccccgaggacacattcttcccaagcagcgacgtgccctgcgacgtgaagctggtggaaaagagcttcgagacagacaccaacctgaacttccagaacctgagcgtgatcggcttcagaatcctgctgctgaaagtggccggctttaacctgctgatgaccctgcggctgtggtccagc

SEQ ID NO: 37790 - DNA, 1866 bp, synthetic construct
  source 1..1866: mol_type = other DNA
atggccttaccagtgaccgccttgctcctgccgctggccttgctgctccacgccgccaggccggacatccagttgacccagtcccccagctcactcagcgccagtgtgggggaccgggtgaccattacctgtaaagccagtcagagtgtggactatgacggggatagcttcctgaattggtatcagcagaagcctggcaaagccccaaagctgctgatctacgctgcatctaatctggagtcaggcgtgccttccaggttctccggtagtgggtctgggaccgatttcacattgaccatttcatccctccaacccgaggatttcgctacatattactgtcagcagtccaatgaggaccctctcacctttggccagggcaccaaagttgaaattaagagactcgaggacctgaagaacgtgttcccacctgaggtggccgtgttcgagcctagcgaggccgagatcagccacacccagaaagccaccctcgtgtgcctggctaccggcttctaccccgaccatgtggaactgtcttggtgggtcaacggcaaagaggtgcacagcggcgtgtgtaccgacccccagccactgaaagaacagcccgccctgaacgacagccggtactgcctgagcagcagactgagagtgtccgccaccttctggcagaacccccggaaccacttcagatgccaggtgcagttctacggcctgagcgagaacgacgagtggacccaggacagagccaagcccgtgacccagatcgtgtctgccgaagcctggggcagagccgattgcggctttaccagcgagagctaccagcagggcgtgctgagcgccaccatcctgtacgagatcctgctgggcaaggccaccctgtacgccgtgctggtgtctgccctggtgctgatggctatggtcaagcggaaggacagccggggaagggccaagcgatctggatctggagcaacaaacttctcactactcaaacaagcaggtgacgtggaggagaatcccgggcctactagtatggactggatttggcgcatccttttccttgtcggcgctgctaccggcgcgcattccttcgaagaagtccaacttgtggagtctggagggggcctggtgcagcccggcggctctctcagactgtcttgtgcggcaagcggctacaccttcacctcttactggatagaatgggtgaggcaggcacctggaaagggactggagtggattggagagattctgccaggagggggagatacaaattacaatgaaatcttcaaggggcgggccaccttttcagcggataccagcaagaatacagcttacctgcagatgaatagcctccgggcagaagataccgctgtttattattgcacgagacgggtgccaataagactggactattgggggcaagggactcttgtcaccgtcagttcaacgcgtatccagaaccctgatcctgccgtgtaccagctgcgggatagcaagagcagcgacaagagcgtgtgtctgttcaccgacttcgacagccagaccaacgtgtcccagagcaaggactccgacgtgtacatcaccgataagtgcgtgctggacatgcggagcatggacttcaagagcaactccgccgtggcctggtccaacaagtccgatttcgcctgcgccaacgccttcaacaacagcattatccccgaggacacattcttcccaagccccgagagcagctgcgacgtgaagctggtggaaaagagcttcgagacagacaccaacctgaacttccagaacctgagcgtgatcggcttcagaatcctgctgctgaaagtggccggctttaacctgctgatgaccctgcggctgtggtccagc

SEQ ID NO: 37791 - DNA, 1878 bp, synthetic construct
  source 1..1878: mol_type = other DNA
atggccttaccagtgaccgccttgctcctgccgctggccttgctgctccacgccgccaggccggacatccagttgacccagtcccccagctcactcagcgccagtgtgggggaccgggtgaccattacctgtaaagccagtcagagtgtggactatgacggggatagcttcctgaattggtatcagcagaagcctggcaaagccccaaagctgctgatctacgctgcatctaatctggagtcaggcgtgccttccaggttctccggtagtgggtctgggaccgatttcacattgaccatttcatccctccaacccgaggatttcgctacatattactgtcagcagtccaatgaggaccctctcacctttggccagggcaccaaagttgaaattaagagactcgagatccagaaccctgatcctgccgtgtaccagctgcgggatagcaagagcagcgacaagagcgtgtgtctgttcaccgacttcgacagccagaccaacgtgtcccagagcaaggactccgacgtgtacatcaccgataagtgcgtgctggacatgcggagcatggacttcaagagcaactccgccgtggcctggtccaacaagtccgatttcgcctgcgccaacgccttcaacaacagcattatccccgaggacacattcttcccaagccccgagagcagctgcgacgtgaagctggtggaaaagagcttcgagacagacaccaacctgaacttccagaacctgagcgtgatcggcttcagaatcctgctgctgaaagtggccggctttaacctgctgatgaccctgcggctgtggtccagccgcgccaagagaagcggatctggcgtgaagcagaccctgaatttcgacctgctgaagctggctggcgacgtggaatccaacccaggccctactagtatggactggatttggcgcatccttttccttgtcggcgctgctaccggcgcgcattccttcgaagaagtccaacttgtggagtctggagggggcctggtgcagcccggcggctctctcagactgtcttgtgcggcaagcggctacaccttcacctcttactggatagaatgggtgaggcaggcacctggaaagggactggagtggattggagagattctgccaggagggggagatacaaattacaatgaaatcttcaaggggcgggccaccttttcagcggataccagcaagaatacagcttacctgcagatgaatagcctccgggcagaagataccgctgtttattattgcacgagacgggtgccaataagactggactattgggggcaagggactcttgtcaccgtcagttcaacgcgtgaggacctgaagaacgtgttcccacctgaggtggccgtgttcgagcctagcgaggccgagatcagccacacccagaaagccaccctcgtgtgcctggctaccggcttctaccccgaccatgtggaactgtcttggtgggtcaacggcaaagaggtgcacagcggcgtgtgtaccgacccccagccactgaaagaacagcccgccctgaacgacagccggtactgcctgagcagcagactgagagtgtccgccaccttctggcagaacccccggaaccacttcagatgccaggtgcagttctacggcctgagcgagaacgacgagtggacccaggacagagccaagcccgtgacccagatcgtgtctgccgaagcctggggcagagccgattgcggctttaccagcgagagctaccagcagggcgtgctgagcgccaccatcctgtacgagatcctgctgggcaaggccaccctgtacgccgtgctggtgtctgccctggtgctgatggctatggtcaagcggaaggacagccgggga

SEQ ID NO: 37792 - DNA, 1914 bp, synthetic construct
  source 1..1914: mol_type = other DNA
atggccttaccagtgaccgccttgctcctgccgctggccttgctgctccacgccgccaggccgctcgaggaggacctgaagaacgtgttcccacctgaggtggccgtgttcgagcctagcaaggccgagatcgcccacacccagaaagccaccctcgtgtgcctggctaccggcttctaccccgaccatgtggaactgtcttggtgggtcaacggcaaagaggtgcacagcggcgtgtgtaccgacccccagccactgaaagaacagcccgccctgaacgacagccggtactgcctgagcagcagactgagagtgtccgccaccttctggcagaacccccggaaccacttcagatgccaggtgcagttctacggcctgagcgagaacgacgagtggacccaggacagagccaagcccgtgacccagatcgtgtctgccgaagcctggggcagagccgattgcggcatcaccagcgccagctaccaccagggcgtgctgagcgccaccatcctgtacgagatcctgctgggcaaggccaccctgtacgccgtgctggtgtctgccctggtgctgatggctatggtcaagcggaaggacagccggggaagggccaagcgatctggatctggagcaacaaacttctcactactcaaacaagcaggtgacgtggaggagaatcccgggcctactagcatggccttaccagtgaccgccttgctcctgccgctggccttgctgctccacgccgccaggccggacatccagttgacccagtcccccagctcactcagcgccagtgtgggggaccgggtgaccattacctgtaaagccagtcagagtgtggactatgacggggatagcttcctgaattggtatcagcagaagcctggcaaagccccaaagctgctgatctacgctgcatctaatctggagtcaggcgtgccttccaggttctccggtagtgggtctgggaccgatttcacattgaccatttcatccctccaacccgaggatttcgctacatattactgtcagcagtccaatgaggaccctctcacctttggccagggcaccaaagttgaaattaagagaggcggaggcggaagtggaggcggaggatctggcggcggaggctctgaagtccaacttgtggagtctggagggggcctggtgcagcccggcggctctctcagactgtcttgtgcggcaagcggctacaccttcacctcttactggatagaatgggtgaggcaggcacctggaaagggactggagtggattggagagattctgccaggagggggagatacaaattacaatgaaatcttcaaggggcgggccaccttttcagcggataccagcaagaatacagcttacctgcagatgaatagcctccgggcagaagataccgctgtttattattgcacgagacgggtgccaataagactggactattgggggcaagggactcttgtcaccgtcagttcaacgcgtatccagaaccctgatcctgccgtgtaccagctgcgggatagcaagagcagcgacaagagcgtgtgtctgttcaccgacttcgacagccagaccaacgtgtcccagagcaaggactccgacgtgtacatcaccgataagtgcgtgctggacatgcggagcatggacttcaagagcaactccgccgtggcctggtccaacaagtccgatttcgcctgcgccaacgccttcaacaacagcattatccccgaggacacattcttcccaagcagcgacgtgccctgcgacgtgaagctggtggaaaagagcttcgagacagacaccaacctgaacttccagaacctgagcgtgatcggcttcagaatcctgctgctgaaagtggccggctttaacctgctgatgaccctgcggctgtggtccagc

SEQ ID NO: 37793 - DNA, 1935 bp, synthetic construct
  source 1..1935: mol_type = other DNA
atggccttaccagtgaccgccttgctcctgccgctggccttgctgctccacgccgccaggccgctcgagggctccggcgatcgccctgatcctgccgtgtaccagctgcgggatagcaagagcagcgacaagagcgtgtgtctgttcaccgacttcgacagccagaccaacgtgtcccagagcaaggactccgacgtgtacatcaccgataagtgcgtgctggacatgcggagcatggacttcaagagcaactccgccgtggcctggtccaacaagtccgatttcgcctgcgccaacgccttcaacaacagcattatccccgaggacacattcttcccaagccccgagagcagctgcgacgtgaagctggtggaaaagagcttcgagacagacaccaacctgaacttccagaacctgagcgtgatcggcttcagaatcctgctgctgaaagtggccggctttaacctgctgatgaccctgcggctgtggtccagctctagtcgcgccaagagaagcggatctggcgtgaagcagaccctgaatttcgacctgctgaagctggctggcgacgtggaatccaacccaggccccactagcatggccttaccagtgaccgccttgctcctgccgctggccttgctgctccacgccgccaggccggacatccagttgacccagtcccccagctcactcagcgccagtgtgggggaccgggtgaccattacctgtaaagccagtcagagtgtggactatgacggggatagcttcctgaattggtatcagcagaagcctggcaaagccccaaagctgctgatctacgctgcatctaatctggagtcaggcgtgccttccaggttctccggtagtgggtctgggaccgatttcacattgaccatttcatccctccaacccgaggatttcgctacatattactgtcagcagtccaatgaggaccctctcacctttggccagggcaccaaagttgaaattaagagaggcggaggcggaagtggaggcggaggatctggcggcggaggctctgaagtccaacttgtggagtctggagggggcctggtgcagcccggcggctctctcagactgtcttgtgcggcaagcggctacaccttcacctcttactggatagaatgggtgaggcaggcacctggaaagggactggagtggattggagagattctgccaggagggggagatacaaattacaatgaaatcttcaaggggcgggccaccttttcagcggataccagcaagaatacagcttacctgcagatgaatagcctccgggcagaagataccgctgtttattattgcacgagacgggtgccaataagactggactattgggggcaagggactcttgtcaccgtcagttcaacgcgtgaggacctgaagaacgtgttcccacctgaggtggccgtgttcgagcctagcgaggccgagatcagccacacccagaaagccaccctcgtgtgcctggctaccggcttctaccccgaccatgtggaactgtcttggtgggtcaacggcaaagaggtgcacagcggcgtgtgtaccgacccccagccactgaaagaacagcccgccctgaacgacagccggtactgcctgagcagcagactgagagtgtccgccaccttctggcagaacccccggaaccacttcagatgccaggtgcagttctacggcctgagcgagaacgacgagtggacccaggacagagccaagcccgtgacccagatcgtgtctgccgaagcctggggcagagccgattgcggctttaccagcgagagctaccagcagggcgtgctgagcgccaccatcctgtacgagatcctgctgggcaaggccaccctgtacgccgtgctggtgtctgccctggtgctgatggctatggtcaagcggaaggacagccgggga

SEQ ID NO: 37794 - DNA, 1866 bp, synthetic construct
  source 1..1866: mol_type = other DNA
atggccttaccagtgaccgccttgctcctgccgctggccttgctgctccacgccgccaggccggacatccagttgacccagtcccccagctcactcagcgccagtgtgggggaccgggtgaccattacctgtaaagccagtcagagtgtggactatgacggggatagcttcctgaattggtatcagcagaagcctggcaaagccccaaagctgctgatctacgctgcatctaatctggagtcaggcgtgccttccaggttctccggtagtgggtctgggaccgatttcacattgaccatttcatccctccaacccgaggatttcgctacatattactgtcagcagtccaatgaggaccctctcacctttggccagggcaccaaagttgaaattaagagactcgaggacctgaagaacgtgttcccacctgaggtggccgtgttcgagcctagcgaggccgagatcagccacacccagaaagccaccctcgtgtgcctggctaccggcttctaccccgaccatgtggaactgtcttggtgggtcaacggcaaagaggtgcacagcggcgtgtctaccgacccccagccactgaaagaacagcccgccctgaacgacagccggtactgcctgagcagcagactgagagtgtccgccaccttctggcagaacccccggaaccacttcagatgccaggtgcagttctacggcctgagcgagaacgacgagtggacccaggacagagccaagcccgtgacccagatcgtgtctgccgaagcctggggcagagccgattgcggctttaccagcgagagctaccagcagggcgtgctgagcgccaccatcctgtacgagatcctgctgggcaaggccaccctgtacgccgtgctggtgtctgccctggtgctgatggctatggtcaagcggaaggacagccggggaagggccaagcgatctggatctggagcaacaaacttctcactactcaaacaagcaggtgacgtggaggagaatcccgggcctactagtatggactggatttggcgcatccttttccttgtcggcgctgctaccggcgcgcattccttcgaagaagtccaacttgtggagtctggagggggcctggtgcagcccggcggctctctcagactgtcttgtgcggcaagcggctacaccttcacctcttactggatagaatgggtgaggcaggcacctggaaagggactggagtggattggagagattctgccaggagggggagatacaaattacaatgaaatcttcaaggggcgggccaccttttcagcggataccagcaagaatacagcttacctgcagatgaatagcctccgggcagaagataccgctgtttattattgcacgagacgggtgccaataagactggactattgggggcaagggactcttgtcaccgtcagttcaacgcgtatccagaaccctgatcctgccgtgtaccagctgcgggatagcaagagcagcgacaagagcgtgtgtctgttcaccgacttcgacagccagaccaacgtgtcccagagcaaggactccgacgtgtacatcaccgataagaccgtgctggacatgcggagcatggacttcaagagcaactccgccgtggcctggtccaacaagtccgatttcgcctgcgccaacgccttcaacaacagcattatccccgaggacacattcttcccaagccccgagagcagctgcgacgtgaagctggtggaaaagagcttcgagacagacaccaacctgaacttccagaacctgagcgtgatcggcttcagaatcctgctgctgaaagtggccggctttaacctgctgatgaccctgcggctgtggtccagc

SEQ ID NO: 37795 - DNA, 1890 bp, synthetic construct
  source 1..1890: mol_type = other DNA
atggccttaccagtgaccgccttgctcctgccgctggccttgctgctccacgccgccaggccggacatccagttgacccagtcccccagctcactcagcgccagtgtgggggaccgggtgaccattacctgtaaagccagtcagagtgtggactatgacggggatagcttcctgaattggtatcagcagaagcctggcaaagccccaaagctgctgatctacgctgcatctaatctggagtcaggcgtgccttccaggttctccggtagtgggtctgggaccgatttcacattgaccatttcatccctccaacccgaggatttcgctacatattactgtcagcagtccaatgaggaccctctcacctttggccagggcaccaaagttgaaattaagagactcgaggacaagcagctggacgccgacgtgtcccccaagcctaccatcttcctgccctctatcgccgagacaaagctccagaaggccggcacctacctgtgcctgctggaaaagttcttcccagatgtgattaagatccactggcaggaaaagaagtccaacaccatcctgggcagccaggaaggcaacaccatgaagaccaacgacacctacatgaagttcagctggctgaccgtgcccgagaagtccctggacaaagaacacagatgcatcgtgcggcacgaaaacaacaagaacggcgtggaccaggaaatcatcttcccacccatcaagaccgatgtgattacaatggaccccaaggacaactgctccaaggacgccaacgataccctgctgctccagctgaccaacaccagcgcctactacatgtacttgttgctgctgctgaagtccgtggtgtacttcgccatcatcacatgctgcctgctgcggagaaccgccttctgctgcaacggcgagaagtctagggccaagcgatctggatctggagcaacaaacttctcactactcaaacaagcaggtgacgtggaggagaatcccgggcctactagtatggactggatttggcgcatccttttccttgtcggcgctgctaccggcgcgcattccttcgaagaagtccaacttgtggagtctggagggggcctggtgcagcccggcggctctctcagactgtcttgtgcggcaagcggctacaccttcacctcttactggatagaatgggtgaggcaggcacctggaaagggactggagtggattggagagattctgccaggagggggagatacaaattacaatgaaatcttcaaggggcgggccaccttttcagcggataccagcaagaatacagcttacctgcagatgaatagcctccgggcagaagataccgctgtttattattgcacgagacgggtgccaataagactggactattgggggcaagggactcttgtcaccgtcagttcaacgcgtagccagcctcacaccaagcccagcgtgttcgtgatgaagaacggcaccaacgtggcctgcctcgtgaaagagttctaccccaaggacatcaggatcaacctggtgtccagcaagaagatcaccgagttcgaccccgccatcgtgatctcccccagcggcaagtacaacgccgtgaagctggggaagtacgaggacagcaacagcgtgacctgctccgtgcagcacgacaacaagaccgtgcacagcaccgactttgaagtgaaaaccgactccaccgaccacgtgaagcccaaagagacagagaacaccaagcagcccagcaagagctgccacaagcccaaggccatcgtgcacaccgagaaagtgaacatgatgagcctgaccgtgctgggcctgcggatgctgttcgccaaaaccgtggccgtgaacttcctgctgaccgccaagctgttcttcctc

SEQ ID NO: 37796 - DNA, 1890 bp, synthetic construct
  source 1..1890: mol_type = other DNA
atggccttaccagtgaccgccttgctcctgccgctggccttgctgctccacgccgccaggccggacatccagttgacccagtcccccagctcactcagcgccagtgtgggggaccgggtgaccattacctgtaaagccagtcagagtgtggactatgacggggatagcttcctgaattggtatcagcagaagcctggcaaagccccaaagctgctgatctacgctgcatctaatctggagtcaggcgtgccttccaggttctccggtagtgggtctgggaccgatttcacattgaccatttcatccctccaacccgaggatttcgctacatattactgtcagcagtccaatgaggaccctctcacctttggccagggcaccaaagttgaaattaagagactcgagagccagcctcacaccaagcccagcgtgttcgtgatgaagaacggcaccaacgtggcctgcctcgtgaaagagttctaccccaaggacatcaggatcaacctggtgtccagcaagaagatcaccgagttcgaccccgccatcgtgatctcccccagcggcaagtacaacgccgtgaagctggggaagtacgaggacagcaacagcgtgacctgctccgtgcagcacgacaacaagaccgtgcacagcaccgactttgaagtgaaaaccgactccaccgaccacgtgaagcccaaagagacagagaacaccaagcagcccagcaagagctgccacaagcccaaggccatcgtgcacaccgagaaagtgaacatgatgagcctgaccgtgctgggcctgcggatgctgttcgccaaaaccgtggccgtgaacttcctgctgaccgccaagctgttcttcctcagggccaagcgatctggatctggagcaacaaacttctcactactcaaacaagcaggtgacgtggaggagaatcccgggcctactagtatggactggatttggcgcatccttttccttgtcggcgctgctaccggcgcgcattccttcgaagaagtccaacttgtggagtctggagggggcctggtgcagcccggcggctctctcagactgtcttgtgcggcaagcggctacaccttcacctcttactggatagaatgggtgaggcaggcacctggaaagggactggagtggattggagagattctgccaggagggggagatacaaattacaatgaaatcttcaaggggcgggccaccttttcagcggataccagcaagaatacagcttacctgcagatgaatagcctccgggcagaagataccgctgtttattattgcacgagacgggtgccaataagactggactattgggggcaagggactcttgtcaccgtcagttcaacgcgtgacaagcagctggacgccgacgtgtcccccaagcctaccatcttcctgccctctatcgccgagacaaagctccagaaggccggcacctacctgtgcctgctggaaaagttcttcccagatgtgattaagatccactggcaggaaaagaagtccaacaccatcctgggcagccaggaaggcaacaccatgaagaccaacgacacctacatgaagttcagctggctgaccgtgcccgagaagtccctggacaaagaacacagatgcatcgtgcggcacgaaaacaacaagaacggcgtggaccaggaaatcatcttcccacccatcaagaccgatgtgattacaatggaccccaaggacaactgctccaaggacgccaacgataccctgctgctccagctgaccaacaccagcgcctactacatgtacttgttgctgctgctgaagtccgtggtgtacttcgccatcatcacatgctgcctgctgcggagaaccgccttctgctgcaacggcgagaagtct

SEQ ID NO: 37797 - DNA, 1935 bp, synthetic construct
  source 1..1935: mol_type = other DNA
atggccttaccagtgaccgccttgctcctgccgctggccttgctgctccacgccgccaggccgctcgaggacaagcagctggacgccgacgtgtcccccaagcctaccatcttcctgccctctatcgccgagacaaagctccagaaggccggcacctacctgtgcctgctggaaaagttcttcccagatgtgattaagatccactggcaggaaaagaagtccaacaccatcctgggcagccaggaaggcaacaccatgaagaccaacgacacctacatgaagttcagctggctgaccgtgcccgagaagtccctggacaaagaacacagatgcatcgtgcggcacgaaaacaacaagaacggcgtggaccaggaaatcatcttcccacccatcaagaccgatgtgattacaatggaccccaaggacaactgctccaaggacgccaacgataccctgctgctccagctgaccaacaccagcgcctactacatgtacttgttgctgctgctgaagtccgtggtgtacttcgccatcatcacatgctgcctgctgcggagaaccgccttctgctgcaacggcgagaagtctagggccaagcgatctggatctggagcaacaaacttctcactactcaaacaagcaggtgacgtggaggagaatcccgggcctactagcatggccttaccagtgaccgccttgctcctgccgctggccttgctgctccacgccgccaggccggacatccagttgacccagtcccccagctcactcagcgccagtgtgggggaccgggtgaccattacctgtaaagccagtcagagtgtggactatgacggggatagcttcctgaattggtatcagcagaagcctggcaaagccccaaagctgctgatctacgctgcatctaatctggagtcaggcgtgccttccaggttctccggtagtgggtctgggaccgatttcacattgaccatttcatccctccaacccgaggatttcgctacatattactgtcagcagtccaatgaggaccctctcacctttggccagggcaccaaagttgaaattaagagaggcggaggcggaagtggaggcggaggatctggcggcggaggctctgaagtccaacttgtggagtctggagggggcctggtgcagcccggcggctctctcagactgtcttgtgcggcaagcggctacaccttcacctcttactggatagaatgggtgaggcaggcacctggaaagggactggagtggattggagagattctgccaggagggggagatacaaattacaatgaaatcttcaaggggcgggccaccttttcagcggataccagcaagaatacagcttacctgcagatgaatagcctccgggcagaagataccgctgtttattattgcacgagacgggtgccaataagactggactattgggggcaagggactcttgtcaccgtcagttcaacgcgtagccagcctcacaccaagcccagcgtgttcgtgatgaagaacggcaccaacgtggcctgcctcgtgaaagagttctaccccaaggacatcaggatcaacctggtgtccagcaagaagatcaccgagttcgaccccgccatcgtgatctcccccagcggcaagtacaacgccgtgaagctggggaagtacgaggacagcaacagcgtgacctgctccgtgcagcacgacaacaagaccgtgcacagcaccgactttgaagtgaaaaccgactccaccgaccacgtgaagcccaaagagacagagaacaccaagcagcccagcaagagctgccacaagcccaaggccatcgtgcacaccgagaaagtgaacatgatgagcctgaccgtgctgggcctgcggatgctgttcgccaaaaccgtggccgtgaacttcctgctgaccgccaagctgttcttcctc

SEQ ID NO: 37798 - DNA, 2397 bp, synthetic construct
  source 1..2397: mol_type = other DNA
atggccttaccagtgaccgccttgctcctgccgctggccttgctgctccacgccgccaggccggacatccagttgacccagtcccccagctcactcagcgccagtgtgggggaccgggtgaccattacctgtaaagccagtcagagtgtggactatgacggggatagcttcctgaattggtatcagcagaagcctggcaaagccccaaagctgctgatctacgctgcatctaatctggagtcaggcgtgccttccaggttctccggtagtgggtctgggaccgatttcacattgaccatttcatccctccaacccgaggatttcgctacatattactgtcagcagtccaatgaggaccctctcacctttggccagggcaccaaagttgaaattaagagaggacagcctaaggccaatcctaccgtgacactgttccctccaagcagcgaagaactccaggccaacaaggccacacttgtgtgcctgatctccgacttctaccctggggctgtgacagtggcttggaaggccgatggatctcctgtgaaagccggcgtggaaaccaccaagccatccaagcagagcaacaacaaatacgccgccagctcctacctgagcctgacacctgagcagtggaagtcccacagatcctacagctgccaagtgacccacgaaggcagcaccgtggaaaagacagtggcccctacagagtgcagcggatcccagagcttcggcctgctggaccccaagctgtgctacctgctggatggcatcctgttcatctacggcgtgatcctgaccgccctgttcctgagagtgaagttcagcagaagcgccgacgcccctgcctaccagcagggacagaaccaactgtacaacgagctgaacctgggcagacgggaagagtacgacgtgctggacaagcggagaggcagggaccctgagatgggcggaaagccccagcggagaaagaacccccaggaaggactgtataacgaactccagaaagacaagatggccgaagcctacagcgagatcggcatgaagggcgagcggagaagaggcaagggccacgatggcctgtaccagggcctgagcaccgccaccaaggacacctatgacgccctgcacatgcaggccctgcctccaagaagggccaagcgatctggatctggagcaacaaacttctcactactcaaacaagcaggtgacgtggaggagaatcccgggcctactagtatggactggatttggcgcatccttttccttgtcggcgctgctaccggcgcgcattccttcgaagaagtccaacttgtggagtctggagggggcctggtgcagcccggcggctctctcagactgtcttgtgcggcaagcggctacaccttcacctcttactggatagaatgggtgaggcaggcacctggaaagggactggagtggattggagagattctgccaggagggggagatacaaattacaatgaaatcttcaaggggcgggccaccttttcagcggataccagcaagaatacagcttacctgcagatgaatagcctccgggcagaagataccgctgtttattattgcacgagacgggtgccaataagactggactattgggggcaagggactcttgtcaccgtcagttcagcctctacaaagggaccctccgtgtttcctctggctcccagcagcaagtctacaagcggaggaacagccgctctgggctgcctggtcaaggattactttcccgagcctgtgaccgtgtcctggaatagcggagcactgacaagcggcgtgcacacctttccagccgtgctgcaaagcagcggcctgtactctctgagcagcgtggtcacagtgcctagctctagcctgggcacccagacctacatctgcaatgtgaaccacaagcctagcaacaccaaggtggacaagagagtggaacccaagagctgtggtacccagagttttgggttgttggaccctaaattgtgctatctgttggacggaatcctgttcatttacggagtgatcctgaccgcattgttcctgcgggttaagttttccagatccgcagacgcacccgcttaccaacaagggcagaaccaactctacaatgaacttaatttggggcggagggaagagtacgacgttctggacaaaaggaggggacgagatcccgagatgggcggaaagcctcagcgaaggaagaatccgcaagaggggctttataacgaactccagaaagataaaatggcagaagcctatagtgagattgggatgaagggagaaaggaggaggggtaaaggtcacgatgggttgtaccaaggattgagcacagccactaaagatacctatgatgcgctccacatgcaggccctgccgccaaga

SEQ ID NO: 37799 - DNA, 2454 bp, synthetic construct
  source 1..2454: mol_type = other DNA
atggccttaccagtgaccgccttgctcctgccgctggccttgctgctccacgccgccaggccggacatccagttgacccagtcccccagctcactcagcgccagtgtgggggaccgggtgaccattacctgtaaagccagtcagagtgtggactatgacggggatagcttcctgaattggtatcagcagaagcctggcaaagccccaaagctgctgatctacgctgcatctaatctggagtcaggcgtgccttccaggttctccggtagtgggtctgggaccgatttcacattgaccatttcatccctccaacccgaggatttcgctacatattactgtcagcagtccaatgaggaccctctcacctttggccagggcaccaaagttgaaattaagagactcgaggacctgaagaacgtgttcccacctgaggtggccgtgttcgagcctagcgaggccgagatcagccacacccagaaagccaccctcgtgtgcctggctaccggcttctaccccgaccatgtggaactgtcttggtgggtcaacggcaaagaggtgcacagcggcgtgtctaccgacccccagccactgaaagaacagcccgccctgaacgacagccggtactgcctgagcagcagactgagagtgtccgccaccttctggcagaacccccggaaccacttcagatgccaggtgcagttctacggcctgagcgagaacgacgagtggacccaggacagagccaagcccgtgacccagatcgtgtctgccgaagcctggggcagagccgattgcggatcccagagcttcggcctgctggaccccaagctgtgctacctgctggatggcatcctgttcatctacggcgtgatcctgaccgccctgttcctgagagtgaagttcagcagaagcgccgacgcccctgcctaccagcagggacagaaccaactgtacaacgagctgaacctgggcagacgggaagagtacgacgtgctggacaagcggagaggcagggaccctgagatgggcggaaagccccagcggagaaagaacccccaggaaggactgtataacgaactccagaaagacaagatggccgaagcctacagcgagatcggcatgaagggcgagcggagaagaggcaagggccacgatggcctgtaccagggcctgagcaccgccaccaaggacacctatgacgccctgcacatgcaggccctgcctccaagaagggccaagcgatctggatctggagcaacaaacttctcactactcaaacaagcaggtgacgtggaggagaatcccgggcctactagtatggactggatttggcgcatccttttccttgtcggcgctgctaccggcgcgcattccttcgaagaagtccaacttgtggagtctggagggggcctggtgcagcccggcggctctctcagactgtcttgtgcggcaagcggctacaccttcacctcttactggatagaatgggtgaggcaggcacctggaaagggactggagtggattggagagattctgccaggagggggagatacaaattacaatgaaatcttcaaggggcgggccaccttttcagcggataccagcaagaatacagcttacctgcagatgaatagcctccgggcagaagataccgctgtttattattgcacgagacgggtgccaataagactggactattgggggcaagggactcttgtcaccgtcagttcaacgcgtatccagaaccctgatcctgccgtgtaccagctgcgggatagcaagagcagcgacaagagcgtgtgtctgttcaccgacttcgacagccagaccaacgtgtcccagagcaaggactccgacgtgtacatcaccgataagaccgtgctggacatgcggagcatggacttcaagagcaactccgccgtggcctggtccaacaagtccgatttcgcctgcgccaacgccttcaacaacagcattatccccgaggacacattcttcccaagccccgagagcagctgcggtacccagagttttgggttgttggaccctaaattgtgctatctgttggacggaatcctgttcatttacggagtgatcctgaccgcattgttcctgcgggttaagttttccagatccgcagacgcacccgcttaccaacaagggcagaaccaactctacaatgaacttaatttggggcggagggaagagtacgacgttctggacaaaaggaggggacgagatcccgagatgggcggaaagcctcagcgaaggaagaatccgcaagaggggctttataacgaactccagaaagataaaatggcagaagcctatagtgagattgggatgaagggagaaaggaggaggggtaaaggtcacgatgggttgtaccaaggattgagcacagccactaaagatacctatgatgcgctccacatgcaggccctgccgccaaga

SEQ ID NO: 37800 - DNA, 2580 bp, synthetic construct
  source 1..2580: mol_type = other DNA
atggccttaccagtgaccgccttgctcctgccgctggccttgctgctccacgccgccaggccggacatccagttgacccagtcccccagctcactcagcgccagtgtgggggaccgggtgaccattacctgtaaagccagtcagagtgtggactatgacggggatagcttcctgaattggtatcagcagaagcctggcaaagccccaaagctgctgatctacgctgcatctaatctggagtcaggcgtgccttccaggttctccggtagtgggtctgggaccgatttcacattgaccatttcatccctccaacccgaggatttcgctacatattactgtcagcagtccaatgaggaccctctcacctttggccagggcaccaaagttgaaattaagagactcgaggaggacctgaagaacgtgttcccacctgaggtggccgtgttcgagcctagcgaggccgagatcagccacacccagaaagccaccctcgtgtgcctggctaccggcttctaccccgaccatgtggaactgtcttggtgggtcaacggcaaagaggtgcacagcggcgtgtctaccgacccccagccactgaaagaacagcccgccctgaacgacagccggtactgcctgagcagcagactgagagtgtccgccaccttctggcagaacccccggaaccacttcagatgccaggtgcagttctacggcctgagcgagaacgacgagtggacccaggacagagccaagcccgtgacccagatcgtgtctgccgaagcctggggcagagccgattgcggatcccagagcttcggcctgctggaccccaagctgtgctacctgctggatggcatcctgttcatctacggcgtgatcctgaccgccctgttcctgagagtgaagttcagcagaagcgccgacgcccctgcctaccagcagggacagaaccaactgtacaacgagctgaacctgggcagacgggaagagtacgacgtgctggacaagcggagaggcagggaccctgagatgggcggaaagccccagcggagaaagaacccccaggaaggactgtataacgaactccagaaagacaagatggccgaagcctacagcgagatcggcatgaagggcgagcggagaagaggcaagggccacgatggcctgtaccagggcctgagcaccgccaccaaggacacctatgacgccctgcacatgcaggccctgcctccaagaagggccaagcgatctggatctggagcaacaaacttctcactactcaaacaagcaggtgacgtggaggagaatcccgggcctactagtatggactggatttggcgcatccttttccttgtcggcgctgctaccggcgcgcattccttcgaagaagtccaacttgtggagtctggagggggcctggtgcagcccggcggctctctcagactgtcttgtgcggcaagcggctacaccttcacctcttactggatagaatgggtgaggcaggcacctggaaagggactggagtggattggagagattctgccaggagggggagatacaaattacaatgaaatcttcaaggggcgggccaccttttcagcggataccagcaagaatacagcttacctgcagatgaatagcctccgggcagaagataccgctgtttattattgcacgagacgggtgccaataagactggactattgggggcaagggactcttgtcaccgtcagttcaacgcgtatccagaaccctgatcctgccgtgtaccagctgcgggatagcaagagcagcgacaagagcgtgtgtctgttcaccgacttcgacagccagaccaacgtgtcccagagcaaggactccgacgtgtacatcaccgataagaccgtgctggacatgcggagcatggacttcaagagcaactccgccgtggcctggtccaacaagtccgatttcgcctgcgccaacgccttcaacaacagcattatccccgaggacacattcttcccaagccccgagagcagctgcggtacccagagttttgggttgttggaccctaaattgtgctatctgttggacggaatcctgttcatttacggagtgatcctgaccgcattgttcctgaggagcaagcggtcacggctgctccacagcgattacatgaatatgacaccacgaagaccgggtcctactcgcaaacactaccaaccctacgcacctccccgcgactttgcagcgtaccgatctcgggttaagttttccagatccgcagacgcacccgcttaccaacaagggcagaaccaactctacaatgaacttaatttggggcggagggaagagtacgacgttctggacaaaaggaggggacgagatcccgagatgggcggaaagcctcagcgaaggaagaatccgcaagaggggctttataacgaactccagaaagataaaatggcagaagcctatagtgagattgggatgaagggagaaaggaggaggggtaaaggtcacgatgggttgtaccaaggattgagcacagccactaaagatacctatgatgcgctccacatgcaggccctgccgccaaga

SEQ ID NO: 37801 - DNA, 2709 bp, synthetic construct
  source 1..2709: mol_type = other DNA
atggccttaccagtgaccgccttgctcctgccgctggccttgctgctccacgccgccaggccggacatccagttgacccagtcccccagctcactcagcgccagtgtgggggaccgggtgaccattacctgtaaagccagtcagagtgtggactatgacggggatagcttcctgaattggtatcagcagaagcctggcaaagccccaaagctgctgatctacgctgcatctaatctggagtcaggcgtgccttccaggttctccggtagtgggtctgggaccgatttcacattgaccatttcatccctccaacccgaggatttcgctacatattactgtcagcagtccaatgaggaccctctcacctttggccagggcaccaaagttgaaattaagagactcgaggaggacctgaagaacgtgttcccacctgaggtggccgtgttcgagcctagcgaggccgagatcagccacacccagaaagccaccctcgtgtgcctggctaccggcttctaccccgaccatgtggaactgtcttggtgggtcaacggcaaagaggtgcacagcggcgtgtctaccgacccccagccactgaaagaacagcccgccctgaacgacagccggtactgcctgagcagcagactgagagtgtccgccaccttctggcagaacccccggaaccacttcagatgccaggtgcagttctacggcctgagcgagaacgacgagtggacccaggacagagccaagcccgtgacccagatcgtgtctgccgaagcctggggcagagccgattgcggatcccagagcttcggcctgctggaccccaagctgtgctacctgctggatggcatcctgttcatctacggcgtgatcctgaccgccctgttcctgaaacggggcagaaagaaactcctgtatatattcaaacaaccatttatgagaccagtacaaactactcaagaggaagatggctgtagctgccgatttccagaagaagaagaaggaggatgtgaactgagagtgaagttcagcagaagcgccgacgcccctgcctaccagcagggacagaaccaactgtacaacgagctgaacctgggcagacgggaagagtacgacgtgctggacaagcggagaggcagggaccctgagatgggcggaaagccccagcggagaaagaacccccaggaaggactgtataacgaactccagaaagacaagatggccgaagcctacagcgagatcggcatgaagggcgagcggagaagaggcaagggccacgatggcctgtaccagggcctgagcaccgccaccaaggacacctatgacgccctgcacatgcaggccctgcctccaagaagggccaagcgatctggatctggagcaacaaacttctcactactcaaacaagcaggtgacgtggaggagaatcccgggcctactagtatggactggatttggcgcatccttttccttgtcggcgctgctaccggcgcgcattccttcgaagaagtccaacttgtggagtctggagggggcctggtgcagcccggcggctctctcagactgtcttgtgcggcaagcggctacaccttcacctcttactggatagaatgggtgaggcaggcacctggaaagggactggagtggattggagagattctgccaggagggggagatacaaattacaatgaaatcttcaaggggcgggccaccttttcagcggataccagcaagaatacagcttacctgcagatgaatagcctccgggcagaagataccgctgtttattattgcacgagacgggtgccaataagactggactattgggggcaagggactcttgtcaccgtcagttcaacgcgtatccagaaccctgatcctgccgtgtaccagctgcgggatagcaagagcagcgacaagagcgtgtgtctgttcaccgacttcgacagccagaccaacgtgtcccagagcaaggactccgacgtgtacatcaccgataagaccgtgctggacatgcggagcatggacttcaagagcaactccgccgtggcctggtccaacaagtccgatttcgcctgcgccaacgccttcaacaacagcattatccccgaggacacattcttcccaagccccgagagcagctgcggtacccagagttttgggttgttggaccctaaattgtgctatctgttggacggaatcctgttcatttacggagtgatcctgaccgcattgttcctgaagagaggccggaagaagctgctgtacatcttcaagcagcctttcatgcggcccgtgcagaccacccaggaagaggacggctgctcctgccggttccccgaggaagaagaaggcggctgcgagctgcgggttaagttttccagatccgcagacgcacccgcttaccaacaagggcagaaccaactctacaatgaacttaatttggggcggagggaagagtacgacgttctggacaaaaggaggggacgagatcccgagatgggcggaaagcctcagcgaaggaagaatccgcaagaggggctttataacgaactccagaaagataaaatggcagaagcctatagtgagattgggatgaagggagaaaggaggaggggtaaaggtcacgatgggttgtaccaaggattgagcacagccactaaagatacctatgatgcgctccacatgcaggccctgccgccaaga

SEQ ID NO: 37802 - DNA, 1770 bp, synthetic construct
  source 1..1770: mol_type = other DNA
atggccttaccagtgaccgccttgctcctgccgctggccttgctgctccacgccgccaggccggacatccagttgacccagtcccccagctcactcagcgccagtgtgggggaccgggtgaccattacctgtaaagccagtcagagtgtggactatgacggggatagcttcctgaattggtatcagcagaagcctggcaaagccccaaagctgctgatctacgctgcatctaatctggagtcaggcgtgccttccaggttctccggtagtgggtctgggaccgatttcacattgaccatttcatccctccaacccgaggatttcgctacatattactgtcagcagtccaatgaggaccctctcacctttggccagggcaccaaagttgaaattaagagactcgagcagagcttcggcctgctggaccccaagctgtgctacctgctggatggcatcctgttcatctacggcgtgatcctgaccgccctgttcctgagagtgaagttcagcagaagcgccgacgcccctgcctaccagcagggacagaaccaactgtacaacgagctgaacctgggcagacgggaagagtacgacgtgctggacaagcggagaggcagggaccctgagatgggcggaaagccccagcggagaaagaacccccaggaaggactgtataacgaactccagaaagacaagatggccgaagcctacagcgagatcggcatgaagggcgagcggagaagaggcaagggccacgatggcctgtaccagggcctgagcaccgccaccaaggacacctatgacgccctgcacatgcaggccctgcctccaagaagggccaagcgatctggatctggagcaacaaacttctcactactcaaacaagcaggtgacgtggaggagaatcccgggcctactagtatggactggatttggcgcatccttttccttgtcggcgctgctaccggcgcgcattccttcgaagaagtccaacttgtggagtctggagggggcctggtgcagcccggcggctctctcagactgtcttgtgcggcaagcggctacaccttcacctcttactggatagaatgggtgaggcaggcacctggaaagggactggagtggattggagagattctgccaggagggggagatacaaattacaatgaaatcttcaaggggcgggccaccttttcagcggataccagcaagaatacagcttacctgcagatgaatagcctccgggcagaagataccgctgtttattattgcacgagacgggtgccaataagactggactattgggggcaagggactcttgtcaccgtcagttcaacgcgtcagagttttgggttgttggaccctaaattgtgctatctgttggacggaatcctgttcatttacggagtgatcctgaccgcattgttcctgcgggttaagttttccagatccgcagacgcacccgcttaccaacaagggcagaaccaactctacaatgaacttaatttggggcggagggaagagtacgacgttctggacaaaaggaggggacgagatcccgagatgggcggaaagcctcagcgaaggaagaatccgcaagaggggctttataacgaactccagaaagataaaatggcagaagcctatagtgagattgggatgaagggagaaaggaggaggggtaaaggtcacgatgggttgtaccaaggattgagcacagccactaaagatacctatgatgcgctccacatgcaggccctgccgccaaga

SEQ ID NO: 37803 - DNA, 1944 bp, synthetic construct
  source 1..1944: mol_type = other DNA
atggccttaccagtgaccgccttgctcctgccgctggccttgctgctccacgccgccaggccggacatccagttgacccagtcccccagctcactcagcgccagtgtgggggaccgggtgaccattacctgtaaagccagtcagagtgtggactatgacggggatagcttcctgaattggtatcagcagaagcctggcaaagccccaaagctgctgatctacgctgcatctaatctggagtcaggcgtgccttccaggttctccggtagtgggtctgggaccgatttcacattgaccatttcatccctccaacccgaggatttcgctacatattactgtcagcagtccaatgaggaccctctcacctttggccagggcaccaaagttgaaattaagagactcgagggacagcctaaggccaatcctaccgtgacactgttccctccaagcagcgaagaactccaggccaacaaggccacacttgtgtgcctgatctccgacttctaccctggggctgtgacagtggcttggaaggccgatggatctcctgtgaaagccggcgtggaaaccaccaagccatccaagcagagcaacaacaaatacgccgccagctcctacctgagcctgacacctgagcagtggaagtcccacagatcctacagctgccaagtgacccacgaaggcagcaccgtggaaaagacagtggcccctacagagtgcagccccatcaagaccgatgtgattacaatggaccccaaggacaactgctccaaggacgccaacgataccctgctgctccagctgaccaacaccagcgcctactacatgtacttgttgctgctgctgaagtccgtggtgtacttcgccatcatcacatgctgcctgctgcggagaaccgccttctgctgcaacggcgagaagtctagggccaagcgatctggatctggagcaacaaacttctcactactcaaacaagcaggtgacgtggaggagaatcccgggcctactagtatggactggatttggcgcatccttttccttgtcggcgctgctaccggcgcgcattccttcgaagaagtccaacttgtggagtctggagggggcctggtgcagcccggcggctctctcagactgtcttgtgcggcaagcggctacaccttcacctcttactggatagaatgggtgaggcaggcacctggaaagggactggagtggattggagagattctgccaggagggggagatacaaattacaatgaaatcttcaaggggcgggccaccttttcagcggataccagcaagaatacagcttacctgcagatgaatagcctccgggcagaagataccgctgtttattattgcacgagacgggtgccaataagactggactattgggggcaagggactcttgtcaccgtcagttcaacgcgtgcctctacaaagggaccctccgtgtttcctctggctcccagcagcaagtctacaagcggaggaacagccgctctgggctgcctggtcaaggattactttcccgagcctgtgaccgtgtcctggaatagcggagcactgacaagcggcgtgcacacctttccagccgtgctgcaaagcagcggcctgtactctctgagcagcgtggtcacagtgcctagctctagcctgggcacccagacctacatctgcaatgtgaaccacaagcctagcaacaccaaggtggacaagagagtggaacccaagagctgtgaagtgaaaaccgactccaccgaccacgtgaagcccaaagagacagagaacaccaagcagcccagcaagagctgccacaagcccaaggccatcgtgcacaccgagaaagtgaacatgatgagcctgaccgtgctgggcctgcggatgctgttcgccaaaaccgtggccgtgaacttcctgctgaccgccaagctgttcttcctc

SEQ ID NO: 37804 - DNA, 1878 bp, synthetic construct
  source 1..1878: mol_type = other DNA
atggccttaccagtgaccgccttgctcctgccgctggccttgctgctccacgccgccaggccggacatccagttgacccagtcccccagctcactcagcgccagtgtgggggaccgggtgaccattacctgtaaagccagtcagagtgtggactatgacggggatagcttcctgaattggtatcagcagaagcctggcaaagccccaaagctgctgatctacgctgcatctaatctggagtcaggcgtgccttccaggttctccggtagtgggtctgggaccgatttcacattgaccatttcatccctccaacccgaggatttcgctacatattactgtcagcagtccaatgaggaccctctcacctttggccagggcaccaaagttgaaattaagagactcgagggacagcctaaggccaatcctaccgtgacactgttccctccaagcagcgaagaactccaggccaacaaggccacacttgtgtgcctgatctccgacttctaccctggggctgtgacagtggcttggaaggccgatggatctcctgtgaaagccggcgtggaaaccaccaagccatccaagcagagcaacaacaaatacgccgccagctcctacctgagcctgacacctgagcagtggaagtcccacagatcctacagctgccaagtgacccacgaaggcagcaccgtggaaaagacagtggcccctacagagtgcagcggcagagccgattgcggcatcaccagcgccagctaccaccagggcgtgctgagcgccaccatcctgtacgagatcctgctgggcaaggccaccctgtacgccgtgctggtgtctgccctggtgctgatggctatggtcaagcggaaggacagccggggaagggccaagcgatctggatctggagcaacaaacttctcactactcaaacaagcaggtgacgtggaggagaatcccgggcctactagtatggactggatttggcgcatccttttccttgtcggcgctgctaccggcgcgcattccttcgaagaagtccaacttgtggagtctggagggggcctggtgcagcccggcggctctctcagactgtcttgtgcggcaagcggctacaccttcacctcttactggatagaatgggtgaggcaggcacctggaaagggactggagtggattggagagattctgccaggagggggagatacaaattacaatgaaatcttcaaggggcgggccaccttttcagcggataccagcaagaatacagcttacctgcagatgaatagcctccgggcagaagataccgctgtttattattgcacgagacgggtgccaataagactggactattgggggcaagggactcttgtcaccgtcagttcaacgcgtgcctctacaaagggaccctccgtgtttcctctggctcccagcagcaagtctacaagcggaggaacagccgctctgggctgcctggtcaaggattactttcccgagcctgtgaccgtgtcctggaatagcggagcactgacaagcggcgtgcacacctttccagccgtgctgcaaagcagcggcctgtactctctgagcagcgtggtcacagtgcctagctctagcctgggcacccagacctacatctgcaatgtgaaccacaagcctagcaacaccaaggtggacaagagagtggaacccaagagctgtatccccgaggacacattcttcccaagcagcgacgtgccctgcgacgtgaagctggtggaaaagagcttcgagacagacaccaacctgaacttccagaacctgagcgtgatcggcttcagaatcctgctgctgaaagtggccggctttaacctgctgatgaccctgcggctgtggtccagc

SEQ ID NO: 37805 - DNA, 1878 bp, synthetic construct
  source 1..1878: mol_type = other DNA
atggccttaccagtgaccgccttgctcctgccgctggccttgctgctccacgccgccaggccggacatccagttgacccagtcccccagctcactcagcgccagtgtgggggaccgggtgaccattacctgtaaagccagtcagagtgtggactatgacggggatagcttcctgaattggtatcagcagaagcctggcaaagccccaaagctgctgatctacgctgcatctaatctggagtcaggcgtgccttccaggttctccggtagtgggtctgggaccgatttcacattgaccatttcatccctccaacccgaggatttcgctacatattactgtcagcagtccaatgaggaccctctcacctttggccagggcaccaaagttgaaattaagagactcgagggacagcctaaggccaatcctaccgtgacactgttccctccaagcagcgaagaactccaggccaacaaggccacacttgtgtgcctgatctccgacttctaccctggggctgtgacagtggcttggaaggccgatggatctcctgtgaaagccggcgtggaaaccaccaagccatccaagcagagcaacaacaaatacgccgccagctcctacctgagcctgacacctgagcagtggaagtcccacagatcctacagctgccaagtgacccacgaaggcagcaccgtggaaaagacagtggcccctacagagtgcagcggcagagccgattgcggctttaccagcgagagctaccagcagggcgtgctgagcgccaccatcctgtacgagatcctgctgggcaaggccaccctgtacgccgtgctggtgtctgccctggtgctgatggctatggtcaagcggaaggacagccggggaagggccaagcgatctggatctggagcaacaaacttctcactactcaaacaagcaggtgacgtggaggagaatcccgggcctactagtatggactggatttggcgcatccttttccttgtcggcgctgctaccggcgcgcattccttcgaagaagtccaacttgtggagtctggagggggcctggtgcagcccggcggctctctcagactgtcttgtgcggcaagcggctacaccttcacctcttactggatagaatgggtgaggcaggcacctggaaagggactggagtggattggagagattctgccaggagggggagatacaaattacaatgaaatcttcaaggggcgggccaccttttcagcggataccagcaagaatacagcttacctgcagatgaatagcctccgggcagaagataccgctgtttattattgcacgagacgggtgccaataagactggactattgggggcaagggactcttgtcaccgtcagttcaacgcgtgcctctacaaagggaccctccgtgtttcctctggctcccagcagcaagtctacaagcggaggaacagccgctctgggctgcctggtcaaggattactttcccgagcctgtgaccgtgtcctggaatagcggagcactgacaagcggcgtgcacacctttccagccgtgctgcaaagcagcggcctgtactctctgagcagcgtggtcacagtgcctagctctagcctgggcacccagacctacatctgcaatgtgaaccacaagcctagcaacaccaaggtggacaagagagtggaacccaagagctgtatccccgaggacacattcttcccaagccccgagagcagctgcgacgtgaagctggtggaaaagagcttcgagacagacaccaacctgaacttccagaacctgagcgtgatcggcttcagaatcctgctgctgaaagtggccggctttaacctgctgatgaccctgcggctgtggtccagc

SEQ ID NO: 37806 - DNA, 1356 bp, synthetic construct
  source 1..1356: mol_type = other DNA
atggccttaccagtgaccgccttgctcctgccgctggccttgctgctccacgccgccaggccggacatccagttgacccagtcccccagctcactcagcgccagtgtgggggaccgggtgaccattacctgtaaagccagtcagagtgtggactatgacggggatagcttcctgaattggtatcagcagaagcctggcaaagccccaaagctgctgatctacgctgcatctaatctggagtcaggcgtgccttccaggttctccggtagtgggtctgggaccgatttcacattgaccatttcatccctccaacccgaggatttcgctacatattactgtcagcagtccaatgaggaccctctcacctttggccagggcaccaaagttgaaattaagagaggcggaggcggaagtggaggcggaggatctggcggcggaggctctgaagtccaacttgtggagtctggagggggcctggtgcagcccggcggctctctcagactgtcttgtgcggcaagcggctacaccttcacctcttactggatagaatgggtgaggcaggcacctggaaagggactggagtggattggagagattctgccaggagggggagatacaaattacaatgaaatcttcaaggggcgggccaccttttcagcggataccagcaagaatacagcttacctgcagatgaatagcctccgggcagaagataccgctgtttattattgcacgagacgggtgccaataagactggactattgggggcaagggactcttgtcaccgtcagttcaacgcgtgacggtaacgaggagatgggaggaatcactcaaaccccttacaaagtctcaatttcaggaacaactgttatccttacatgtccccagtatcctggcagcgagatcctttggcagcataacgacaagaatatagggggagatgaagacgataagaatatcggatctgacgaggatcacttgagcctgaaagagttctccgagcttgaacaaagcggatattatgtgtgctatccgcgcgggtcaaagccggaagacgctaacttttacctttatctccgagccagagtgtgcgaaaattgcatggaaatggacgttatgtccgttgctacaatagttatcgtagatatatgcatcacgggtggactgcttctgctggtttattattggtccaagaatagaaaggccaaagctaaacccgtgaccagaggcgctggcgcaggcggaaggcaaaggggacaaaacaaagaacggccaccaccagtgccaaatccagattatgagcctattcggaaaggacagagggacctgtactctggcctgaatcagagaagaatc

SEQ ID NO: 37807 - DNA, 1251 bp, synthetic construct
  source 1..1251: mol_type = other DNA
atggccttaccagtgaccgccttgctcctgccgctggccttgctgctccacgccgccaggccggacatccagttgacccagtcccccagctcactcagcgccagtgtgggggaccgggtgaccattacctgtaaagccagtcagagtgtggactatgacggggatagcttcctgaattggtatcagcagaagcctggcaaagccccaaagctgctgatctacgctgcatctaatctggagtcaggcgtgccttccaggttctccggtagtgggtctgggaccgatttcacattgaccatttcatccctccaacccgaggatttcgctacatattactgtcagcagtccaatgaggaccctctcacctttggccagggcaccaaagttgaaattaagagaggcggaggcggaagtggaggcggaggatctggcggcggaggctctgaagtccaacttgtggagtctggagggggcctggtgcagcccggcggctctctcagactgtcttgtgcggcaagcggctacaccttcacctcttactggatagaatgggtgaggcaggcacctggaaagggactggagtggattggagagattctgccaggagggggagatacaaattacaatgaaatcttcaaggggcgggccaccttttcagcggataccagcaagaatacagcttacctgcagatgaatagcctccgggcagaagataccgctgtttattattgcacgagacgggtgccaataagactggactattgggggcaagggactcttgtcaccgtcagttcaacgcgtttcaagatccccatcgaggaactggaagatcgggtgttcgtgaactgcaacacctctatcacctgggtggaaggcaccgtgggaacactgctgagcgacatcaccagactggacctcggcaagcggattctggaccctcggggcatctacagatgcaacggcaccgacatctacaaggacaaagaaagcaccgtgcaggtccactacagaatgtgccagtcctgcgtggaactggaccctgctacagtggccggcatcatcgtgaccgatgtgatcgctactctgctgctggctctgggagtgttctgcttcgccggacacgaaacaggcagactgtctggcgctgccgatacacaggccctgctgagaaacgaccaagtgtatcagcccctgcgcgacagagatgatgcccagtattctcacctcggcggcaactgggctagaaacaag

SEQ ID NO: 37808 - DNA, 1281 bp, synthetic construct
  source 1..1281: mol_type = other DNA
atggccttaccagtgaccgccttgctcctgccgctggccttgctgctccacgccgccaggccggacatccagttgacccagtcccccagctcactcagcgccagtgtgggggaccgggtgaccattacctgtaaagccagtcagagtgtggactatgacggggatagcttcctgaattggtatcagcagaagcctggcaaagccccaaagctgctgatctacgctgcatctaatctggagtcaggcgtgccttccaggttctccggtagtgggtctgggaccgatttcacattgaccatttcatccctccaacccgaggatttcgctacatattactgtcagcagtccaatgaggaccctctcacctttggccagggcaccaaagttgaaattaagagaggcggaggcggaagtggaggcggaggatctggcggcggaggctctgaagtccaacttgtggagtctggagggggcctggtgcagcccggcggctctctcagactgtcttgtgcggcaagcggctacaccttcacctcttactggatagaatgggtgaggcaggcacctggaaagggactggagtggattggagagattctgccaggagggggagatacaaattacaatgaaatcttcaaggggcgggccaccttttcagcggataccagcaagaatacagcttacctgcagatgaatagcctccgggcagaagataccgctgtttattattgcacgagacgggtgccaataagactggactattgggggcaagggactcttgtcaccgtcagttcaacgcgtcagagcatcaagggcaaccacctggtcaaggtgtacgactaccaagaggacggcagcgtgctgctgacatgtgatgccgaggccaagaacatcacctggtttaaggacggcaagatgatcggcttcctgaccgaggacaagaagaagtggaacctgggcagcaacgctaaggaccccagaggcatgtatcagtgcaagggcagccagaacaagagcaagcccctccaggtgtactaccggatgtgccagaactgcatcgagctgaacgccgctaccatcagcggctttctgttcgccgagatcgtgtccatcttcgtgctggccgtgggcgtgtactttatcgctggacaggatggcgtgcggcagagcagagcttccgataagcaaaccctgctgcctaacgaccagctgtaccagcctctgaaggacagagaggacgaccagtacagccacctccagggcaatcagctgagaagaaac

SEQ ID NO: 37809 - DNA, 1230 bp, synthetic construct
  source 1..1230: mol_type = other DNA
atggccttaccagtgaccgccttgctcctgccgctggccttgctgctccacgccgccaggccggacatccagttgacccagtcccccagctcactcagcgccagtgtgggggaccgggtgaccattacctgtaaagccagtcagagtgtggactatgacggggatagcttcctgaattggtatcagcagaagcctggcaaagccccaaagctgctgatctacgctgcatctaatctggagtcaggcgtgccttccaggttctccggtagtgggtctgggaccgatttcacattgaccatttcatccctccaacccgaggatttcgctacatattactgtcagcagtccaatgaggaccctctcacctttggccagggcaccaaagttgaaattaagagaggcggaggcggaagtggaggcggaggatctggcggcggaggctctgaagtccaacttgtggagtctggagggggcctggtgcagcccggcggctctctcagactgtcttgtgcggcaagcggctacaccttcacctcttactggatagaatgggtgaggcaggcacctggaaagggactggagtggattggagagattctgccaggagggggagatacaaattacaatgaaatcttcaaggggcgggccaccttttcagcggataccagcaagaatacagcttacctgcagatgaatagcctccgggcagaagataccgctgtttattattgcacgagacgggtgccaataagactggactattgggggcaagggactcttgtcaccgtcagttcaacgcgtcagagttttgggttgttggaccctaaattgtgctatctgttggacggaatcctgttcatttacggagtgatcctgaccgcattgttcctgcgggttaagttttccagatccgcagacgcacccgcttaccaacaagggcagaaccaactctacaatgaacttaatttggggcggagggaagagtacgacgttctggacaaaaggaggggacgagatcccgagatgggcggaaagcctcagcgaaggaagaatccgcaagaggggctttataacgaactccagaaagataaaatggcagaagcctatagtgagattgggatgaagggagaaaggaggaggggtaaaggtcacgatgggttgtaccaaggattgagcacagccactaaagatacctatgatgcgctccacatgcaggccctgccgccaaga

SEQ ID NO: 37810 - DNA, 1515 bp, synthetic construct
  source 1..1515: mol_type = other DNA
atggccttaccagtgaccgccttgctcctgccgctggccttgctgctccacgccgccaggccggacatccagttgacccagtcccccagctcactcagcgccagtgtgggggaccgggtgaccattacctgtaaagccagtcagagtgtggactatgacggggatagcttcctgaattggtatcagcagaagcctggcaaagccccaaagctgctgatctacgctgcatctaatctggagtcaggcgtgccttccaggttctccggtagtgggtctgggaccgatttcacattgaccatttcatccctccaacccgaggatttcgctacatattactgtcagcagtccaatgaggaccctctcacctttggccagggcaccaaagttgaaattaagagaggcggaggcggaagtggaggcggaggatctggcggcggaggctctgaagtccaacttgtggagtctggagggggcctggtgcagcccggcggctctctcagactgtcttgtgcggcaagcggctacaccttcacctcttactggatagaatgggtgaggcaggcacctggaaagggactggagtggattggagagattctgccaggagggggagatacaaattacaatgaaatcttcaaggggcgggccaccttttcagcggataccagcaagaatacagcttacctgcagatgaatagcctccgggcagaagataccgctgtttattattgcacgagacgggtgccaataagactggactattgggggcaagggactcttgtcaccgtcagttcaacgcgtggaatgaggactgaggatcttcccaaagctgtcgtctttctcgaaccccaatggtatcgggtgctcgaaaaagactctgtgacactgaaatgccaaggggcctactctcccgaggacaactccacacagtggtttcataatgagtccctcatcagctctcaggccagctcttatttcattgatgccgctacagtggacgactccggcgagtatcggtgtcagaccaatctgtctacactgtctgaccccgtgcagcttgaggtccacattggatggttgctcttgcaagccccacgctgggttttcaaagaggaagatccaatccatctgcggtgccacagctggaaaaacaccgctctccacaaagtcacatacctgcaaaatggcaaaggacgcaaatacttccatcacaattccgatttttacattccgaaggctaccctgaaagacagcggcagctatttctgccggggactcgtcggctccaagaatgtgtcctccgaaaccgtgaatatcacgattacccaaggactggctgtgcctacaatctctagcttctttccgcctggataccaagtctccttctgtcttgtgatggtcctcctgtttgctgtggacacaggactgtacttttccgtgaaaacgaacatccgcagctccacacgcgattggaaagatcacaagtttaaatggcgcaaagatccccaggacaag

SEQ ID NO: 37811 - DNA, 1440 bp, synthetic construct
  source 1..1440: mol_type = other DNA
atggccttaccagtgaccgccttgctcctgccgctggccttgctgctccacgccgccaggccggacatccagttgacccagtcccccagctcactcagcgccagtgtgggggaccgggtgaccattacctgtaaagccagtcagagtgtggactatgacggggatagcttcctgaattggtatcagcagaagcctggcaaagccccaaagctgctgatctacgctgcatctaatctggagtcaggcgtgccttccaggttctccggtagtgggtctgggaccgatttcacattgaccatttcatccctccaacccgaggatttcgctacatattactgtcagcagtccaatgaggaccctctcacctttggccagggcaccaaagttgaaattaagagaggcggaggcggaagtggaggcggaggatctggcggcggaggctctgaagtccaacttgtggagtctggagggggcctggtgcagcccggcggctctctcagactgtcttgtgcggcaagcggctacaccttcacctcttactggatagaatgggtgaggcaggcacctggaaagggactggagtggattggagagattctgccaggagggggagatacaaattacaatgaaatcttcaaggggcgggccaccttttcagcggataccagcaagaatacagcttacctgcagatgaatagcctccgggcagaagataccgctgtttattattgcacgagacgggtgccaataagactggactattgggggcaagggactcttgtcaccgtcagttcaacgcgtggaatgaggactgaggatcttcccaaagctgtcgtctttctcgaaccccaatggtatcgggtgctcgaaaaagactctgtgacactgaaatgccaaggggcctactctcccgaggacaactccacacagtggtttcataatgagtccctcatcagctctcaggccagctcttatttcattgatgccgctacagtggacgactccggcgagtatcggtgtcagaccaatctgtctacactgtctgaccccgtgcagcttgaggtccacattggatggttgctcttgcaagccccacgctgggttttcaaagaggaagatccaatccatctgcggtgccacagctggaaaaacaccgctctccacaaagtcacatacctgcaaaatggcaaaggacgcaaatacttccatcacaattccgatttttacattccgaaggctaccctgaaagacagcggcagctatttctgccggggactcgtcggctccaagaatgtgtcctccgaaaccgtgaatatcacgattacccaaggactggctgtgcctacaatctctagcttctttccgcctggataccaagtctccttctgtcttgtgatggtcctcctgtttgctgtggacacaggactgtacttttccgtg

SEQ ID NO: 37812 - DNA, 1443 bp, synthetic construct
  source 1..1443: mol_type = other DNA
atggccttaccagtgaccgccttgctcctgccgctggccttgctgctccacgccgccaggccggacatccagttgacccagtcccccagctcactcagcgccagtgtgggggaccgggtgaccattacctgtaaagccagtcagagtgtggactatgacggggatagcttcctgaattggtatcagcagaagcctggcaaagccccaaagctgctgatctacgctgcatctaatctggagtcaggcgtgccttccaggttctccggtagtgggtctgggaccgatttcacattgaccatttcatccctccaacccgaggatttcgctacatattactgtcagcagtccaatgaggaccctctcacctttggccagggcaccaaagttgaaattaagagaggcggaggcggaagtggaggcggaggatctggcggcggaggctctgaagtccaacttgtggagtctggagggggcctggtgcagcccggcggctctctcagactgtcttgtgcggcaagcggctacaccttcacctcttactggatagaatgggtgaggcaggcacctggaaagggactggagtggattggagagattctgccaggagggggagatacaaattacaatgaaatcttcaaggggcgggccaccttttcagcggataccagcaagaatacagcttacctgcagatgaatagcctccgggcagaagataccgctgtttattattgcacgagacgggtgccaataagactggactattgggggcaagggactcttgtcaccgtcagttcaacgcgtggaatgaggactgaggatcttcccaaagctgtcgtctttctcgaaccccaatggtatcgggtgctcgaaaaagactctgtgacactgaaatgccaaggggcctactctcccgaggacaactccacacagtggtttcataatgagtccctcatcagctctcaggccagctcttatttcattgatgccgctacagtggacgactccggcgagtatcggtgtcagaccaatctgtctacactgtctgaccccgtgcagcttgaggtccacattggatggttgctcttgcaagccccacgctgggttttcaaagaggaagatccaatccatctgcggtgccacagctggaaaaacaccgctctccacaaagtcacatacctgcaaaatggcaaaggacgcaaatacttccatcacaattccgatttttacattccgaaggctaccctgaaagacagcggcagctatttctgccggggactcgtcggctccaagaatgtgtcctccgaaaccgtgaatatcacgattacccaaggactggctgtgcctacaatctctagcttctttccgcctggataccaagtctccttctgtcttgtgatggtcctcctgtttgctgtggacacaggactgtacttttccgtgaaa

SEQ ID NO: 37813 - DNA, 2175 bp, synthetic construct
  source 1..2175: mol_type = other DNA
atggccttaccagtgaccgccttgctcctgccgctggccttgctgctccacgccgccaggccggacatccagttgacccagtcccccagctcactcagcgccagtgtgggggaccgggtgaccattacctgtaaagccagtcagagtgtggactatgacggggatagcttcctgaattggtatcagcagaagcctggcaaagccccaaagctgctgatctacgctgcatctaatctggagtcaggcgtgccttccaggttctccggtagtgggtctgggaccgatttcacattgaccatttcatccctccaacccgaggatttcgctacatattactgtcagcagtccaatgaggaccctctcacctttggccagggcaccaaagttgaaattaagagactcgagggacagcctaaggccaatcctaccgtgacactgttccctccaagcagcgaagaactccaggccaacaaggccacacttgtgtgcctgatctccgacttctaccctggggctgtgacagtggcttggaaggccgatggatctcctgtgaaagccggcgtggaaaccaccaagccatccaagcagagcaacaacaaatacgccgccagctcctacctgagcctgacacctgagcagtggaagtcccacagatcctacagctgccaagtgacccacgaaggcagcaccgtggaaaagacagtggcccctacagagtgcagcggatcccagagcttcggcctgctggaccccaagctgtgctacctgctggatggcatcctgttcatctacggcgtgatcctgaccgccctgttcctgagagtgaagttcagcagaagcgccgacgcccctgcctaccagcagggacagaaccaactgtacaacgagctgaacctgggcagacgggaagagtacgacgtgctggacaagcggagaggcagggaccctgagatgggcggaaagccccagcggagaaagaacccccaggaaggactgtataacgaactccagaaagacaagatggccgaagcctacagcgagatcggcatgaagggcgagcggagaagaggcaagggccacgatggcctgtaccagggcctgagcaccgccaccaaggacacctatgacgccctgcacatgcaggccctgcctccaagaagggccaagcgatctggatctggagcaacaaacttctcactactcaaacaagcaggtgacgtggaggagaatcccgggcctactagtatggactggatttggcgcatccttttccttgtcggcgctgctaccggcgcgcattccttcgaagaagtccaacttgtggagtctggagggggcctggtgcagcccggcggctctctcagactgtcttgtgcggcaagcggctacaccttcacctcttactggatagaatgggtgaggcaggcacctggaaagggactggagtggattggagagattctgccaggagggggagatacaaattacaatgaaatcttcaaggggcgggccaccttttcagcggataccagcaagaatacagcttacctgcagatgaatagcctccgggcagaagataccgctgtttattattgcacgagacgggtgccaataagactggactattgggggcaagggactcttgtcaccgtcagttcaacgcgtgcctctacaaagggaccctccgtgtttcctctggctcccagcagcaagtctacaagcggaggaacagccgctctgggctgcctggtcaaggattactttcccgagcctgtgaccgtgtcctggaatagcggagcactgacaagcggcgtgcacacctttccagccgtgctgcaaagcagcggcctgtactctctgagcagcgtggtcacagtgcctagctctagcctgggcacccagacctacatctgcaatgtgaaccacaagcctagcaacaccaaggtggacaagagagtggaacccaagagctgtggtaccatcactcaaggtttggcagtgtcaaccatctcatcattctttccacctggctaccaagtgtccttctgcctggtcatggtgctgctgttcgccgtggataccggcctgtacttcagcgtcaagaccaacatccggtccagcaccagagactggaaggaccacaagttcaagtggcggaaggaccctcaggacaag

SEQ ID NO: 37814 - DNA, 2220 bp, synthetic construct
  source 1..2220: mol_type = other DNA
atggccttaccagtgaccgccttgctcctgccgctggccttgctgctccacgccgccaggccggacatccagttgacccagtcccccagctcactcagcgccagtgtgggggaccgggtgaccattacctgtaaagccagtcagagtgtggactatgacggggatagcttcctgaattggtatcagcagaagcctggcaaagccccaaagctgctgatctacgctgcatctaatctggagtcaggcgtgccttccaggttctccggtagtgggtctgggaccgatttcacattgaccatttcatccctccaacccgaggatttcgctacatattactgtcagcagtccaatgaggaccctctcacctttggccagggcaccaaagttgaaattaagagactcgaggacctgaagaacgtgttcccacctgaggtggccgtgttcgagcctagcgaggccgagatcagccacacccagaaagccaccctcgtgtgcctggctaccggcttctaccccgaccatgtggaactgtcttggtgggtcaacggcaaagaggtgcacagcggcgtgtctaccgacccccagccactgaaagaacagcccgccctgaacgacagccggtactgcctgagcagcagactgagagtgtccgccaccttctggcagaacccccggaaccacttcagatgccaggtgcagttctacggcctgagcgagaacgacgagtggacccaggacagagccaagcccgtgacccagatcgtgtctgccgaagcctggggcagagccgattgcggatcccagagcttcggcctgctggaccccaagctgtgctacctgctggatggcatcctgttcatctacggcgtgatcctgaccgccctgttcctgagagtgaagttcagcagaagcgccgacgcccctgcctaccagcagggacagaaccaactgtacaacgagctgaacctgggcagacgggaagagtacgacgtgctggacaagcggagaggcagggaccctgagatgggcggaaagccccagcggagaaagaacccccaggaaggactgtataacgaactccagaaagacaagatggccgaagcctacagcgagatcggcatgaagggcgagcggagaagaggcaagggccacgatggcctgtaccagggcctgagcaccgccaccaaggacacctatgacgccctgcacatgcaggccctgcctccaagaagggccaagcgatctggatctggagcaacaaacttctcactactcaaacaagcaggtgacgtggaggagaatcccgggcctactagtatggactggatttggcgcatccttttccttgtcggcgctgctaccggcgcgcattccttcgaagaagtccaacttgtggagtctggagggggcctggtgcagcccggcggctctctcagactgtcttgtgcggcaagcggctacaccttcacctcttactggatagaatgggtgaggcaggcacctggaaagggactggagtggattggagagattctgccaggagggggagatacaaattacaatgaaatcttcaaggggcgggccaccttttcagcggataccagcaagaatacagcttacctgcagatgaatagcctccgggcagaagataccgctgtttattattgcacgagacgggtgccaataagactggactattgggggcaagggactcttgtcaccgtcagttcaacgcgtatccagaaccctgatcctgccgtgtaccagctgcgggatagcaagagcagcgacaagagcgtgtgtctgttcaccgacttcgacagccagaccaacgtgtcccagagcaaggactccgacgtgtacatcaccgataagaccgtgctggacatgcggagcatggacttcaagagcaactccgccgtggcctggtccaacaagtccgatttcgcctgcgccaacgccttcaacaacagcattatccccgaggacacattcttcccaagccccgagagcagctgcggtaccatcactcaaggtttggcagtgtcaaccatctcatcattctttccacctggctaccaagtgtccttctgcctggtcatggtgctgctgttcgccgtggataccggcctgtacttcagcgtcaagaccaacatccggtccagcaccagagactggaaggaccacaagttcaagtggcggaaggaccctcaggacaag

SEQ ID NO: 37815 - DNA, 2145 bp, synthetic construct
  source 1..2145: mol_type = other DNA
atggccttaccagtgaccgccttgctcctgccgctggccttgctgctccacgccgccaggccggacatccagttgacccagtcccccagctcactcagcgccagtgtgggggaccgggtgaccattacctgtaaagccagtcagagtgtggactatgacggggatagcttcctgaattggtatcagcagaagcctggcaaagccccaaagctgctgatctacgctgcatctaatctggagtcaggcgtgccttccaggttctccggtagtgggtctgggaccgatttcacattgaccatttcatccctccaacccgaggatttcgctacatattactgtcagcagtccaatgaggaccctctcacctttggccagggcaccaaagttgaaattaagagactcgaggacctgaagaacgtgttcccacctgaggtggccgtgttcgagcctagcgaggccgagatcagccacacccagaaagccaccctcgtgtgcctggctaccggcttctaccccgaccatgtggaactgtcttggtgggtcaacggcaaagaggtgcacagcggcgtgtctaccgacccccagccactgaaagaacagcccgccctgaacgacagccggtactgcctgagcagcagactgagagtgtccgccaccttctggcagaacccccggaaccacttcagatgccaggtgcagttctacggcctgagcgagaacgacgagtggacccaggacagagccaagcccgtgacccagatcgtgtctgccgaagcctggggcagagccgattgcggatcccagagcttcggcctgctggaccccaagctgtgctacctgctggatggcatcctgttcatctacggcgtgatcctgaccgccctgttcctgagagtgaagttcagcagaagcgccgacgcccctgcctaccagcagggacagaaccaactgtacaacgagctgaacctgggcagacgggaagagtacgacgtgctggacaagcggagaggcagggaccctgagatgggcggaaagccccagcggagaaagaacccccaggaaggactgtataacgaactccagaaagacaagatggccgaagcctacagcgagatcggcatgaagggcgagcggagaagaggcaagggccacgatggcctgtaccagggcctgagcaccgccaccaaggacacctatgacgccctgcacatgcaggccctgcctccaagaagggccaagcgatctggatctggagcaacaaacttctcactactcaaacaagcaggtgacgtggaggagaatcccgggcctactagtatggactggatttggcgcatccttttccttgtcggcgctgctaccggcgcgcattccttcgaagaagtccaacttgtggagtctggagggggcctggtgcagcccggcggctctctcagactgtcttgtgcggcaagcggctacaccttcacctcttactggatagaatgggtgaggcaggcacctggaaagggactggagtggattggagagattctgccaggagggggagatacaaattacaatgaaatcttcaaggggcgggccaccttttcagcggataccagcaagaatacagcttacctgcagatgaatagcctccgggcagaagataccgctgtttattattgcacgagacgggtgccaataagactggactattgggggcaagggactcttgtcaccgtcagttcaacgcgtatccagaaccctgatcctgccgtgtaccagctgcgggatagcaagagcagcgacaagagcgtgtgtctgttcaccgacttcgacagccagaccaacgtgtcccagagcaaggactccgacgtgtacatcaccgataagaccgtgctggacatgcggagcatggacttcaagagcaactccgccgtggcctggtccaacaagtccgatttcgcctgcgccaacgccttcaacaacagcattatccccgaggacacattcttcccaagccccgagagcagctgcggtaccatcactcaaggtttggcagtgtcaaccatctcatcattctttccacctggctaccaagtgtccttctgcctggtcatggtgctgctgttcgccgtggataccggcctgtacttcagcgtc

SEQ ID NO: 37816 - DNA, 2148 bp, synthetic construct
  source 1..2148: mol_type = other DNA
atggccttaccagtgaccgccttgctcctgccgctggccttgctgctccacgccgccaggccggacatccagttgacccagtcccccagctcactcagcgccagtgtgggggaccgggtgaccattacctgtaaagccagtcagagtgtggactatgacggggatagcttcctgaattggtatcagcagaagcctggcaaagccccaaagctgctgatctacgctgcatctaatctggagtcaggcgtgccttccaggttctccggtagtgggtctgggaccgatttcacattgaccatttcatccctccaacccgaggatttcgctacatattactgtcagcagtccaatgaggaccctctcacctttggccagggcaccaaagttgaaattaagagactcgaggacctgaagaacgtgttcccacctgaggtggccgtgttcgagcctagcgaggccgagatcagccacacccagaaagccaccctcgtgtgcctggctaccggcttctaccccgaccatgtggaactgtcttggtgggtcaacggcaaagaggtgcacagcggcgtgtctaccgacccccagccactgaaagaacagcccgccctgaacgacagccggtactgcctgagcagcagactgagagtgtccgccaccttctggcagaacccccggaaccacttcagatgccaggtgcagttctacggcctgagcgagaacgacgagtggacccaggacagagccaagcccgtgacccagatcgtgtctgccgaagcctggggcagagccgattgcggatcccagagcttcggcctgctggaccccaagctgtgctacctgctggatggcatcctgttcatctacggcgtgatcctgaccgccctgttcctgagagtgaagttcagcagaagcgccgacgcccctgcctaccagcagggacagaaccaactgtacaacgagctgaacctgggcagacgggaagagtacgacgtgctggacaagcggagaggcagggaccctgagatgggcggaaagccccagcggagaaagaacccccaggaaggactgtataacgaactccagaaagacaagatggccgaagcctacagcgagatcggcatgaagggcgagcggagaagaggcaagggccacgatggcctgtaccagggcctgagcaccgccaccaaggacacctatgacgccctgcacatgcaggccctgcctccaagaagggccaagcgatctggatctggagcaacaaacttctcactactcaaacaagcaggtgacgtggaggagaatcccgggcctactagtatggactggatttggcgcatccttttccttgtcggcgctgctaccggcgcgcattccttcgaagaagtccaacttgtggagtctggagggggcctggtgcagcccggcggctctctcagactgtcttgtgcggcaagcggctacaccttcacctcttactggatagaatgggtgaggcaggcacctggaaagggactggagtggattggagagattctgccaggagggggagatacaaattacaatgaaatcttcaaggggcgggccaccttttcagcggataccagcaagaatacagcttacctgcagatgaatagcctccgggcagaagataccgctgtttattattgcacgagacgggtgccaataagactggactattgggggcaagggactcttgtcaccgtcagttcaacgcgtatccagaaccctgatcctgccgtgtaccagctgcgggatagcaagagcagcgacaagagcgtgtgtctgttcaccgacttcgacagccagaccaacgtgtcccagagcaaggactccgacgtgtacatcaccgataagaccgtgctggacatgcggagcatggacttcaagagcaactccgccgtggcctggtccaacaagtccgatttcgcctgcgccaacgccttcaacaacagcattatccccgaggacacattcttcccaagccccgagagcagctgcggtaccatcactcaaggtttggcagtgtcaaccatctcatcattctttccacctggctaccaagtgtccttctgcctggtcatggtgctgctgttcgccgtggataccggcctgtacttcagcgtcaag

SEQ ID NO: 37817 - DNA, 2151 bp, synthetic construct
  source 1..2151: mol_type = other DNA
atggccttaccagtgaccgccttgctcctgccgctggccttgctgctccacgccgccaggccggacatccagttgacccagtcccccagctcactcagcgccagtgtgggggaccgggtgaccattacctgtaaagccagtcagagtgtggactatgacggggatagcttcctgaattggtatcagcagaagcctggcaaagccccaaagctgctgatctacgctgcatctaatctggagtcaggcgtgccttccaggttctccggtagtgggtctgggaccgatttcacattgaccatttcatccctccaacccgaggatttcgctacatattactgtcagcagtccaatgaggaccctctcacctttggccagggcaccaaagttgaaattaagagactcgaggacctgaagaacgtgttcccacctgaggtggccgtgttcgagcctagcgaggccgagatcagccacacccagaaagccaccctcgtgtgcctggctaccggcttctaccccgaccatgtggaactgtcttggtgggtcaacggcaaagaggtgcacagcggcgtgtctaccgacccccagccactgaaagaacagcccgccctgaacgacagccggtactgcctgagcagcagactgagagtgtccgccaccttctggcagaacccccggaaccacttcagatgccaggtgcagttctacggcctgagcgagaacgacgagtggacccaggacagagccaagcccgtgacccagatcgtgtctgccgaagcctggggcagagccgattgcggatcccagagcttcggcctgctggaccccaagctgtgctacctgctggatggcatcctgttcatctacggcgtgatcctgaccgccctgttcctgagagtgaagttcagcagaagcgccgacgcccctgcctaccagcagggacagaaccaactgtacaacgagctgaacctgggcagacgggaagagtacgacgtgctggacaagcggagaggcagggaccctgagatgggcggaaagccccagcggagaaagaacccccaggaaggactgtataacgaactccagaaagacaagatggccgaagcctacagcgagatcggcatgaagggcgagcggagaagaggcaagggccacgatggcctgtaccagggcctgagcaccgccaccaaggacacctatgacgccctgcacatgcaggccctgcctccaagaagggccaagcgatctggatctggagcaacaaacttctcactactcaaacaagcaggtgacgtggaggagaatcccgggcctactagtatggactggatttggcgcatccttttccttgtcggcgctgctaccggcgcgcattccttcgaagaagtccaacttgtggagtctggagggggcctggtgcagcccggcggctctctcagactgtcttgtgcggcaagcggctacaccttcacctcttactggatagaatgggtgaggcaggcacctggaaagggactggagtggattggagagattctgccaggagggggagatacaaattacaatgaaatcttcaaggggcgggccaccttttcagcggataccagcaagaatacagcttacctgcagatgaatagcctccgggcagaagataccgctgtttattattgcacgagacgggtgccaataagactggactattgggggcaagggactcttgtcaccgtcagttcaacgcgtatccagaaccctgatcctgccgtgtaccagctgcgggatagcaagagcagcgacaagagcgtgtgtctgttcaccgacttcgacagccagaccaacgtgtcccagagcaaggactccgacgtgtacatcaccgataagaccgtgctggacatgcggagcatggacttcaagagcaactccgccgtggcctggtccaacaagtccgatttcgcctgcgccaacgccttcaacaacagcattatccccgaggacacattcttcccaagccccgagagcagctgcggtaccatcactcaaggtttggcagtgtcaaccatctcatcattctttccacctggctaccaagtgtccttctgcctggtcatggtgctgctgttcgccgtggataccggcctgtacttcagcgtcaagacc

SEQ ID NO: 37818 - DNA, 1962 bp, synthetic construct
  source 1..1962: mol_type = other DNA
atggccttaccagtgaccgccttgctcctgccgctggccttgctgctccacgccgccaggccggacatccagttgacccagtcccccagctcactcagcgccagtgtgggggaccgggtgaccattacctgtaaagccagtcagagtgtggactatgacggggatagcttcctgaattggtatcagcagaagcctggcaaagccccaaagctgctgatctacgctgcatctaatctggagtcaggcgtgccttccaggttctccggtagtgggtctgggaccgatttcacattgaccatttcatccctccaacccgaggatttcgctacatattactgtcagcagtccaatgaggaccctctcacctttggccagggcaccaaagttgaaattaagagactcgagggacagcctaaggccaatcctaccgtgacactgttccctccaagcagcgaagaactccaggccaacaaggccacacttgtgtgcctgatctccgacttctaccctggggctgtgacagtggcttggaaggccgatggatctcctgtgaaagccggcgtggaaaccaccaagccatccaagcagagcaacaacaaatacgccgccagctcctacctgagcctgacacctgagcagtggaagtcccacagatcctacagctgccaagtgacccacgaaggcagcaccgtggaaaagacagtggcccctacagagtgcagcggatccctgggagagcctcagctgtgctatatcctggacgccatcctgtttctgtacggcatcgtgctgaccctgctgtactgccggctgaagatccaagtgcggaaggccgccatcaccagctacgagaaatccgacggcgtgtacaccggcctgagcaccagaaatcaagagacatacgagacactgaagcacgaaaagcctccacaaagggccaagcgatctggatctggagcaacaaacttctcactactcaaacaagcaggtgacgtggaggagaatcccgggcctactagtatggactggatttggcgcatccttttccttgtcggcgctgctaccggcgcgcattccttcgaagaagtccaacttgtggagtctggagggggcctggtgcagcccggcggctctctcagactgtcttgtgcggcaagcggctacaccttcacctcttactggatagaatgggtgaggcaggcacctggaaagggactggagtggattggagagattctgccaggagggggagatacaaattacaatgaaatcttcaaggggcgggccaccttttcagcggataccagcaagaatacagcttacctgcagatgaatagcctccgggcagaagataccgctgtttattattgcacgagacgggtgccaataagactggactattgggggcaagggactcttgtcaccgtcagttcaacgcgtgcctctacaaagggaccctccgtgtttcctctggctcccagcagcaagtctacaagcggaggaacagccgctctgggctgcctggtcaaggattactttcccgagcctgtgaccgtgtcctggaatagcggagcactgacaagcggcgtgcacacctttccagccgtgctgcaaagcagcggcctgtactctctgagcagcgtggtcacagtgcctagctctagcctgggcacccagacctacatctgcaatgtgaaccacaagcctagcaacaccaaggtggacaagagagtggaacccaagagctgtggtaccctcggagaaccacagctctgttacattctggatgctatcctgttcctctatgggatcgtcctgacactcctgtattgcagactcaaaattcaagttcgcaaagccgccattacctcttacgagaagagtgatggggtgtacacaggactgtctacccggaatcaagaaacctacgaaaccctcaaacatgagaagccacctcagtaa

SEQ ID NO: 37819 - DNA, 1869 bp, synthetic construct
  source 1..1869: mol_type = other DNA
atggccttaccagtgaccgccttgctcctgccgctggccttgctgctccacgccgccaggccggacatccagttgacccagtcccccagctcactcagcgccagtgtgggggaccgggtgaccattacctgtaaagccagtcagagtgtggactatgacggggatagcttcctgaattggtatcagcagaagcctggcaaagccccaaagctgctgatctacgctgcatctaatctggagtcaggcgtgccttccaggttctccggtagtgggtctgggaccgatttcacattgaccatttcatccctccaacccgaggatttcgctacatattactgtcagcagtccaatgaggaccctctcacctttggccagggcaccaaagttgaaattaagagactcgaggacctgaagaacgtgttcccacctgaggtggccgtgttcgagcctagcgaggccgagatcagccacacccagaaagccaccctcgtgtgcctggctaccggcttctaccccgaccatgtggaactgtcttggtgggtcaacggcaaagaggtgcacagcggcgtgtgtaccgacccccagccactgaaagaacagcccgccctgaacgacagccggtactgcctgagcagcagactgagagtgtccgccaccttctggcagaacccccggaaccacttcagatgccaggtgcagttctacggcctgagcgagaacgacgagtggacccaggacagagccaagcccgtgacccagatcgtgtctgccgaagcctggggcagagccgattgcggctttaccagcgagagctaccagcagggcgtgctgagcgcctactacatgtacttgttgctgctgctgaagtccgtggtgtacttcgccatcatcacatgctgcctgctgcggagaaccgccttctgctgcaacggcgagaagtctagggccaagcgatctggatctggagcaacaaacttctcactactcaaacaagcaggtgacgtggaggagaatcccgggcctactagtatggactggatttggcgcatccttttccttgtcggcgctgctaccggcgcgcattccttcgaagaagtccaacttgtggagtctggagggggcctggtgcagcccggcggctctctcagactgtcttgtgcggcaagcggctacaccttcacctcttactggatagaatgggtgaggcaggcacctggaaagggactggagtggattggagagattctgccaggagggggagatacaaattacaatgaaatcttcaaggggcgggccaccttttcagcggataccagcaagaatacagcttacctgcagatgaatagcctccgggcagaagataccgctgtttattattgcacgagacgggtgccaataagactggactattgggggcaagggactcttgtcaccgtcagttcaacgcgtatccagaaccctgatcctgccgtgtaccagctgcgggatagcaagagcagcgacaagagcgtgtgtctgttcaccgacttcgacagccagaccaacgtgtcccagagcaaggactccgacgtgtacatcaccgataagtgcgtgctggacatgcggagcatggacttcaagagcaactccgccgtggcctggtccaacaagtccgatttcgcctgcgccaacgccttcaacaacagcattatccccgaggacacattcttcccaagccccgagagcagctgcgacgtgaagctggtggaaaagagcttcgagacagacaccaacctgaacttccagaacctgagcgtgatcggcttcagaatcctgctgctgaaagtggccggctttaacctgctgatgaccctgcggctgtggtccagc

SEQ ID NO: 37820 - DNA, 1890 bp, synthetic construct
  source 1..1890: mol_type = other DNA
atggccttaccagtgaccgccttgctcctgccgctggccttgctgctccacgccgccaggccggacatccagttgacccagtcccccagctcactcagcgccagtgtgggggaccgggtgaccattacctgtaaagccagtcagagtgtggactatgacggggatagcttcctgaattggtatcagcagaagcctggcaaagccccaaagctgctgatctacgctgcatctaatctggagtcaggcgtgccttccaggttctccggtagtgggtctgggaccgatttcacattgaccatttcatccctccaacccgaggatttcgctacatattactgtcagcagtccaatgaggaccctctcacctttggccagggcaccaaagttgaaattaagagactcgaggacaagcagctggacgccgacgtgtcccccaagcctaccatcttcctgccctctatcgccgagacaaagctccagaaggccggcacctacctgtgcctgctggaaaagttcttcccagatgtgattaagatccactggcaggaaaagaagtccaacaccatcctgggcagccaggaaggcaacaccatgaagaccaacgacacctacatgaagttcagctggctgaccgtgcccgagaagtccctggacaaagaacacagatgcatcgtgcggcacgaaaacaacaagaacggcgtggaccaggaaatcatcttcccacccatcaagaccgatgtgattacaatggaccccaaggacaactgctccaaggacgccaacgataccctgctgctccagctgaccaacaccagcgcctactacatgtacgagatcctgctgggcaaggccaccctgtacgccgtgctggtgtctgccctggtgctgatggctatggtcaagcggaaggacagccggggaagggccaagcgatctggatctggagcaacaaacttctcactactcaaacaagcaggtgacgtggaggagaatcccgggcctactagtatggactggatttggcgcatccttttccttgtcggcgctgctaccggcgcgcattccttcgaagaagtccaacttgtggagtctggagggggcctggtgcagcccggcggctctctcagactgtcttgtgcggcaagcggctacaccttcacctcttactggatagaatgggtgaggcaggcacctggaaagggactggagtggattggagagattctgccaggagggggagatacaaattacaatgaaatcttcaaggggcgggccaccttttcagcggataccagcaagaatacagcttacctgcagatgaatagcctccgggcagaagataccgctgtttattattgcacgagacgggtgccaataagactggactattgggggcaagggactcttgtcaccgtcagttcaacgcgtagccagcctcacaccaagcccagcgtgttcgtgatgaagaacggcaccaacgtggcctgcctcgtgaaagagttctaccccaaggacatcaggatcaacctggtgtccagcaagaagatcaccgagttcgaccccgccatcgtgatctcccccagcggcaagtacaacgccgtgaagctggggaagtatgaggacagcaacagcgtgacctgctccgtgcagcacgacaacaagaccgtgcacagcaccgactttgaagtgaaaaccgactccaccgaccacgtgaagcccaaagagacagagaacaccaagcagcccagcaagagctgccacaagcccaaggccatcgtgcacaccgagaaagtgaacatgatgagcctgaccgtgatcggcttcagaatcctgctgctgaaagtggccggctttaacctgctgatgaccctgcggctgtggtccagctaa

SEQ ID NO: 37821 - DNA, 1890 bp, synthetic construct
  source 1..1890: mol_type = other DNA
atggccttaccagtgaccgccttgctcctgccgctggccttgctgctccacgccgccaggccggacatccagttgacccagtcccccagctcactcagcgccagtgtgggggaccgggtgaccattacctgtaaagccagtcagagtgtggactatgacggggatagcttcctgaattggtatcagcagaagcctggcaaagccccaaagctgctgatctacgctgcatctaatctggagtcaggcgtgccttccaggttctccggtagtgggtctgggaccgatttcacattgaccatttcatccctccaacccgaggatttcgctacatattactgtcagcagtccaatgaggaccctctcacctttggccagggcaccaaagttgaaattaagagactcgaggacaagcagctggacgccgacgtgtcccccaagcctaccatcttcctgccctctatcgccgagacaaagctccagaaggccggcacctacctgtgcctgctggaaaagttcttcccagatgtgattaagatccactggcaggaaaagaagtccaacaccatcctgggcagccaggaaggcaacaccatgaagaccaacgacacctacatgaagttcagctggctgaccgtgcccgagaagtccctggacaaagaacacagatgcatcgtgcggcacgaaaacaacaagaacggcgtggaccaggaaatcatcttcccacccatcaagaccgatgtgattacaatggaccccaaggacaactgctccaaggacgccaacgataccctgctgctccagctgaccaacaccagcgccaccatcctgtacgagatcctgctgggcaaggccaccctgtacgccgtgctggtgtctgccctggtgctgatggctatggtcaagcggaaggacagccggggaagggccaagcgatctggatctggagcaacaaacttctcactactcaaacaagcaggtgacgtggaggagaatcccgggcctactagtatggactggatttggcgcatccttttccttgtcggcgctgctaccggcgcgcattccttcgaagaagtccaacttgtggagtctggagggggcctggtgcagcccggcggctctctcagactgtcttgtgcggcaagcggctacaccttcacctcttactggatagaatgggtgaggcaggcacctggaaagggactggagtggattggagagattctgccaggagggggagatacaaattacaatgaaatcttcaaggggcgggccaccttttcagcggataccagcaagaatacagcttacctgcagatgaatagcctccgggcagaagataccgctgtttattattgcacgagacgggtgccaataagactggactattgggggcaagggactcttgtcaccgtcagttcaacgcgtagccagcctcacaccaagcccagcgtgttcgtgatgaagaacggcaccaacgtggcctgcctcgtgaaagagttctaccccaaggacatcaggatcaacctggtgtccagcaagaagatcaccgagttcgaccccgccatcgtgatctcccccagcggcaagtacaacgccgtgaagctggggaagtatgaggacagcaacagcgtgacctgctccgtgcagcacgacaacaagaccgtgcacagcaccgactttgaagtgaaaaccgactccaccgaccacgtgaagcccaaagagacagagaacaccaagcagcccagcaagagctgccacaagcccaaggccatcgtgcacaccgagaaagtgaacatgatgagcctgaccgtgatcggcttcagaatcctgctgctgaaagtggccggctttaacctgctgatgaccctgcggctgtggtccagctaa

SEQ ID NO: 37822 - DNA, 1890 bp, synthetic construct
  source 1..1890: mol_type = other DNA
atggccttaccagtgaccgccttgctcctgccgctggccttgctgctccacgccgccaggccggacatccagttgacccagtcccccagctcactcagcgccagtgtgggggaccgggtgaccattacctgtaaagccagtcagagtgtggactatgacggggatagcttcctgaattggtatcagcagaagcctggcaaagccccaaagctgctgatctacgctgcatctaatctggagtcaggcgtgccttccaggttctccggtagtgggtctgggaccgatttcacattgaccatttcatccctccaacccgaggatttcgctacatattactgtcagcagtccaatgaggaccctctcacctttggccagggcaccaaagttgaaattaagagactcgaggacaagcagctggacgccgacgtgtcccccaagcctaccatcttcctgccctctatcgccgagacaaagctccagaaggccggcacctacctgtgcctgctggaaaagttcttcccagatgtgattaagatccactggcaggaaaagaagtccaacaccatcctgggcagccaggaaggcaacaccatgaagaccaacgacacctacatgaagttcagctggctgaccgtgcccgagaagtccctggacaaagaacacagatgcatcgtgcggcacgaaaacaacaagaacggcgtggaccaggaaatcatcttcccacccatcaagaccgatgtgattacaatggaccccaaggacaactgctccaaggacgccaacgataccctgctgctccagctgaccaacaccagcgcctactacatgtacgagatcctgctgggcaaggccaccctgtacgccgtgctggtgtctgccctggtgctgatggctatggtcaagcggaaggacagccggggaagggccaagcgatctggatctggagcaacaaacttctcactactcaaacaagcaggtgacgtggaggagaatcccgggcctactagtatggactggatttggcgcatccttttccttgtcggcgctgctaccggcgcgcattccttcgaagaagtccaacttgtggagtctggagggggcctggtgcagcccggcggctctctcagactgtcttgtgcggcaagcggctacaccttcacctcttactggatagaatgggtgaggcaggcacctggaaagggactggagtggattggagagattctgccaggagggggagatacaaattacaatgaaatcttcaaggggcgggccaccttttcagcggataccagcaagaatacagcttacctgcagatgaatagcctccgggcagaagataccgctgtttattattgcacgagacgggtgccaataagactggactattgggggcaagggactcttgtcaccgtcagttcaacgcgtagccagcctcacaccaagcccagcgtgttcgtgatgaagaacggcaccaacgtggcctgcctcgtgaaagagttctaccccaaggacatcaggatcaacctggtgtccagcaagaagatcaccgagttcgaccccgccatcgtgatctcccccagcggcaagtacaacgccgtgaagctggggaagtacgaggacagcaacagcgtgacctgctccgtgcagcacgacaacaagaccgtgcacagcaccgactttgaagtgaaaaccgactccaccgaccacgtgaagcccaaagagacagagaacaccaagcagcccagcaagagctgccacaagcccaaggccatcgtgcacaccgagaaagtgaacatgatgagcctgaccgtgctgggcttcagaatcctgctgctgaaagtggccggctttaacctgctgatgaccctgcggctgtggtccagctaa

SEQ ID NO: 37823 - DNA, 1890 bp, synthetic construct
  source 1..1890: mol_type = other DNA
atggccttaccagtgaccgccttgctcctgccgctggccttgctgctccacgccgccaggccggacatccagttgacccagtcccccagctcactcagcgccagtgtgggggaccgggtgaccattacctgtaaagccagtcagagtgtggactatgacggggatagcttcctgaattggtatcagcagaagcctggcaaagccccaaagctgctgatctacgctgcatctaatctggagtcaggcgtgccttccaggttctccggtagtgggtctgggaccgatttcacattgaccatttcatccctccaacccgaggatttcgctacatattactgtcagcagtccaatgaggaccctctcacctttggccagggcaccaaagttgaaattaagagactcgaggacaagcagctggacgccgacgtgtcccccaagcctaccatcttcctgccctctatcgccgagacaaagctccagaaggccggcacctacctgtgcctgctggaaaagttcttcccagatgtgattaagatccactggcaggaaaagaagtccaacaccatcctgggcagccaggaaggcaacaccatgaagaccaacgacacctacatgaagttcagctggctgaccgtgcccgagaagtccctggacaaagaacacagatgcatcgtgcggcacgaaaacaacaagaacggcgtggaccaggaaatcatcttcccacccatcaagaccgatgtgattacaatggaccccaaggacaactgctccaaggacgccaacgataccctgctgctccagctgaccaacaccagcgccaccatcctgtacgagatcctgctgggcaaggccaccctgtacgccgtgctggtgtctgccctggtgctgatggctatggtcaagcggaaggacagccggggaagggccaagcgatctggatctggagcaacaaacttctcactactcaaacaagcaggtgacgtggaggagaatcccgggcctactagtatggactggatttggcgcatccttttccttgtcggcgctgctaccggcgcgcattccttcgaagaagtccaacttgtggagtctggagggggcctggtgcagcccggcggctctctcagactgtcttgtgcggcaagcggctacaccttcacctcttactggatagaatgggtgaggcaggcacctggaaagggactggagtggattggagagattctgccaggagggggagatacaaattacaatgaaatcttcaaggggcgggccaccttttcagcggataccagcaagaatacagcttacctgcagatgaatagcctccgggcagaagataccgctgtttattattgcacgagacgggtgccaataagactggactattgggggcaagggactcttgtcaccgtcagttcaacgcgtagccagcctcacaccaagcccagcgtgttcgtgatgaagaacggcaccaacgtggcctgcctcgtgaaagagttctaccccaaggacatcaggatcaacctggtgtccagcaagaagatcaccgagttcgaccccgccatcgtgatctcccccagcggcaagtacaacgccgtgaagctggggaagtacgaggacagcaacagcgtgacctgctccgtgcagcacgacaacaagaccgtgcacagcaccgactttgaagtgaaaaccgactccaccgaccacgtgaagcccaaagagacagagaacaccaagcagcccagcaagagctgccacaagcccaaggccatcgtgcacaccgagaaagtgaacatgatgagcctgaccgtgctgggcttcagaatcctgctgctgaaagtggccggctttaacctgctgatgaccctgcggctgtggtccagctaa

SEQ ID NO: 37824 - DNA, 1872 bp, synthetic construct
  source 1..1872: mol_type = other DNA
atggccttaccagtgaccgccttgctcctgccgctggccttgctgctccacgccgccaggccggacatccagttgacccagtcccccagctcactcagcgccagtgtgggggaccgggtgaccattacctgtaaagccagtcagagtgtggactatgacggggatagcttcctgaattggtatcagcagaagcctggcaaagccccaaagctgctgatctacgctgcatctaatctggagtcaggcgtgccttccaggttctccggtagtgggtctgggaccgatttcacattgaccatttcatccctccaacccgaggatttcgctacatattactgtcagcagtccaatgaggaccctctcacctttggccagggcaccaaagttgaaattaagagactcgaggacctgaagaacgtgttcccacctgaggtggccgtgttcgagcctagcgaggccgagatcagccacacccagaaagccaccctcgtgtgcctggctaccggcttctaccccgaccatgtggaactgtcttggtgggtcaacggcaaagaggtgcacagcggcgtgtgtaccgacccccagccactgaaagaacagcccgccctgaacgacagccggtactgcctgagcagcagactgagagtgtccgccaccttctggcagaacccccggaaccacttcagatgccaggtgcagttctacggcctgagcgagaacgacgagtggacccaggacagagccaagcccgtgacccagatcgtgtctgccgaagcctggggcagagccgattgcggctttaccagcgagagctaccagcagggcgtgctgagcgccaccatcctgtacttgttgctgctgctgaagtccgtggtgtacttcgccatcatcacatgctgcctgctgcggagaaccgccttctgctgcaacggcgagaagtctagggccaagcgatctggatctggagcaacaaacttctcactactcaaacaagcaggtgacgtggaggagaatcccgggcctactagtatggactggatttggcgcatccttttccttgtcggcgctgctaccggcgcgcattccttcgaagaagtccaacttgtggagtctggagggggcctggtgcagcccggcggctctctcagactgtcttgtgcggcaagcggctacaccttcacctcttactggatagaatgggtgaggcaggcacctggaaagggactggagtggattggagagattctgccaggagggggagatacaaattacaatgaaatcttcaaggggcgggccaccttttcagcggataccagcaagaatacagcttacctgcagatgaatagcctccgggcagaagataccgctgtttattattgcacgagacgggtgccaataagactggactattgggggcaagggactcttgtcaccgtcagttcaacgcgtatccagaaccctgatcctgccgtgtaccagctgcgggatagcaagagcagcgacaagagcgtgtgtctgttcaccgacttcgacagccagaccaacgtgtcccagagcaaggactccgacgtgtacatcaccgataagtgcgtgctggacatgcggagcatggacttcaagagcaactccgccgtggcctggtccaacaagtccgatttcgcctgcgccaacgccttcaacaacagcattatccccgaggacacattcttcccaagccccgagagcagctgcgacgtgaagctggtggaaaagagcttcgagacagacaccaacctgaacttccagaacctgagcgtgatcggcctgcggatgctgttcgccaaaaccgtggccgtgaacttcctgctgaccgccaagctgttcttcctctaa

SEQ ID NO: 37825 - DNA, 1959 bp, synthetic construct
  source 1..1959: mol_type = other DNA
atggccttaccagtgaccgccttgctcctgccgctggccttgctgctccacgccgccaggccggacatccagttgacccagtcccccagctcactcagcgccagtgtgggggaccgggtgaccattacctgtaaagccagtcagagtgtggactatgacggggatagcttcctgaattggtatcagcagaagcctggcaaagccccaaagctgctgatctacgctgcatctaatctggagtcaggcgtgccttccaggttctccggtagtgggtctgggaccgatttcacattgaccatttcatccctccaacccgaggatttcgctacatattactgtcagcagtccaatgaggaccctctcacctttggccagggcaccaaagttgaaattaagagactcgaggacctgaagaacgtgttcccacctgaggtggccgtgttcgagcctagcgaggccgagatcagccacacccagaaagccaccctcgtgtgcctggctaccggcttctaccccgaccatgtggaactgtcttggtgggtcaacggcaaagaggtgcacagcggcgtgtctaccgacccccagccactgaaagaacagcccgccctgaacgacagccggtactgcctgagcagcagactgagagtgtccgccaccttctggcagaacccccggaaccacttcagatgccaggtgcagttctacggcctgagcgagaacgacgagtggacccaggacagagccaagcccgtgacccagatcgtgtctgccgaagcctggggcagagccgattgcggatcctccaaggacgccaacgataccctgctgctccagctgaccaacaccagcgcctactacatgtacttgttgctgctgctgaagtccgtggtgtacttcgccatcatcacatgctgcctgctgcggagaaccgccttctgctgcaacggcgagaagtctagggccaagcgatctggatctggagcaacaaacttctcactactcaaacaagcaggtgacgtggaggagaatcccgggcctactagtatggactggatttggcgcatccttttccttgtcggcgctgctaccggcgcgcattccttcgaagaagtccaacttgtggagtctggagggggcctggtgcagcccggcggctctctcagactgtcttgtgcggcaagcggctacaccttcacctcttactggatagaatgggtgaggcaggcacctggaaagggactggagtggattggagagattctgccaggagggggagatacaaattacaatgaaatcttcaaggggcgggccaccttttcagcggataccagcaagaatacagcttacctgcagatgaatagcctccgggcagaagataccgctgtttattattgcacgagacgggtgccaataagactggactattgggggcaagggactcttgtcaccgtcagttcaacgcgtatccagaaccctgatcctgccgtgtaccagctgcgggatagcaagagcagcgacaagagcgtgtgtctgttcaccgacttcgacagccagaccaacgtgtcccagagcaaggactccgacgtgtacatcaccgataagaccgtgctggacatgcggagcatggacttcaagagcaactccgccgtggcctggtccaacaagtccgatttcgcctgcgccaacgccttcaacaacagcattatccccgaggacacattcttcccaagccccgagagcagctgcggtaccgaagtgaaaaccgactccaccgaccacgtgaagcccaaagagacagagaacaccaagcagcccagcaagagctgccacaagcccaaggccatcgtgcacaccgagaaagtgaacatgatgagcctgaccgtgctgggcctgcggatgctgttcgccaaaaccgtggccgtgaacttcctgctgaccgccaagctgttcttcctctaa

SEQ ID NO: 37826 - DNA, 1869 bp, synthetic construct
  source 1..1869: mol_type = other DNA
atggccttaccagtgaccgccttgctcctgccgctggccttgctgctccacgccgccaggccggacatccagttgacccagtcccccagctcactcagcgccagtgtgggggaccgggtgaccattacctgtaaagccagtcagagtgtggactatgacggggatagcttcctgaattggtatcagcagaagcctggcaaagccccaaagctgctgatctacgctgcatctaatctggagtcaggcgtgccttccaggttctccggtagtgggtctgggaccgatttcacattgaccatttcatccctccaacccgaggatttcgctacatattactgtcagcagtccaatgaggaccctctcacctttggccagggcaccaaagttgaaattaagagactcgaggacctgaagaacgtgttcccacctgaggtggccgtgttcgagcctagcgaggccgagatcagccacacccagaaagccaccctcgtgtgcctggctaccggcttctaccccgaccatgtggaactgtcttggtgggtcaacggcaaagaggtgcacagcggcgtgtgtaccgacccccagccactgaaagaacagcccgccctgaacgacagccggtactgcctgagcagcagactgagagtgtccgccaccttctggcagaacccccggaaccacttcagatgccaggtgcagttctacggcctgagcgagaacgacgagtggacccaggacagagccaagcccgtgacccagatcgtgtctgccgaagcctggggcagagccgattgcgacgtgaagctggtggaaaagagcttcgagacagacaccaacctgaacttccagaacctgagcgtgatcggcttcagaatcctgctgctgaaagtggccggctttaacctgctgatgaccctgcggctgtggtccagcagggccaagcgatctggatctggagcaacaaacttctcactactcaaacaagcaggtgacgtggaggagaatcccgggcctactagtatggactggatttggcgcatccttttccttgtcggcgctgctaccggcgcgcattccttcgaagaagtccaacttgtggagtctggagggggcctggtgcagcccggcggctctctcagactgtcttgtgcggcaagcggctacaccttcacctcttactggatagaatgggtgaggcaggcacctggaaagggactggagtggattggagagattctgccaggagggggagatacaaattacaatgaaatcttcaaggggcgggccaccttttcagcggataccagcaagaatacagcttacctgcagatgaatagcctccgggcagaagataccgctgtttattattgcacgagacgggtgccaataagactggactattgggggcaagggactcttgtcaccgtcagttcaacgcgtatccagaaccctgatcctgccgtgtaccagctgcgggatagcaagagcagcgacaagagcgtgtgtctgttcaccgacttcgacagccagaccaacgtgtcccagagcaaggactccgacgtgtacatcaccgataagtgcgtgctggacatgcggagcatggacttcaagagcaactccgccgtggcctggtccaacaagtccgatttcgcctgcgccaacgccttcaacaacagcattatccccgaggacacattcttcccaagccccgagagcagctgcggctttaccagcgagagctaccagcagggcgtgctgagcgccaccatcctgtacgagatcctgctgggcaaggccaccctgtacgccgtgctggtgtctgccctggtgctgatggctatggtcaagcggaaggacagccggggataa

SEQ ID NO: 37827 - DNA, 1869 bp, synthetic construct
  source 1..1869: mol_type = other DNA
atggccttaccagtgaccgccttgctcctgccgctggccttgctgctccacgccgccaggccggacatccagttgacccagtcccccagctcactcagcgccagtgtgggggaccgggtgaccattacctgtaaagccagtcagagtgtggactatgacggggatagcttcctgaattggtatcagcagaagcctggcaaagccccaaagctgctgatctacgctgcatctaatctggagtcaggcgtgccttccaggttctccggtagtgggtctgggaccgatttcacattgaccatttcatccctccaacccgaggatttcgctacatattactgtcagcagtccaatgaggaccctctcacctttggccagggcaccaaagttgaaattaagagactcgaggacctgaagaacgtgttcccacctgaggtggccgtgttcgagcctagcgaggccgagatcagccacacccagaaagccaccctcgtgtgcctggctaccggcttctaccccgaccatgtggaactgtcttggtgggtcaacggcaaagaggtgcacagcggcgtgtgtaccgacccccagccactgaaagaacagcccgccctgaacgacagccggtactgcctgagcagcagactgagagtgtccgccaccttctggcagaacccccggaaccacttcagatgccaggtgcagttctacggcctgagcgagaacgacgagtggacccaggacagagccaagcccgtgacccagatcgtgtctgccgaagcctggggcagagccgattgcggctttaccagcgagagctaccagcagggcgtgctgagcgccaccaacctgagcgtgatcggcttcagaatcctgctgctgaaagtggccggctttaacctgctgatgaccctgcggctgtggtccagcagggccaagcgatctggatctggagcaacaaacttctcactactcaaacaagcaggtgacgtggaggagaatcccgggcctactagtatggactggatttggcgcatccttttccttgtcggcgctgctaccggcgcgcattccttcgaagaagtccaacttgtggagtctggagggggcctggtgcagcccggcggctctctcagactgtcttgtgcggcaagcggctacaccttcacctcttactggatagaatgggtgaggcaggcacctggaaagggactggagtggattggagagattctgccaggagggggagatacaaattacaatgaaatcttcaaggggcgggccaccttttcagcggataccagcaagaatacagcttacctgcagatgaatagcctccgggcagaagataccgctgtttattattgcacgagacgggtgccaataagactggactattgggggcaagggactcttgtcaccgtcagttcaacgcgtatccagaaccctgatcctgccgtgtaccagctgcgggatagcaagagcagcgacaagagcgtgtgtctgttcaccgacttcgacagccagaccaacgtgtcccagagcaaggactccgacgtgtacatcaccgataagtgcgtgctggacatgcggagcatggacttcaagagcaactccgccgtggcctggtccaacaagtccgatttcgcctgcgccaacgccttcaacaacagcattatccccgaggacacattcttcccaagccccgagagcagctgcgacgtgaagctggtggaaaagagcttcgagacagacaccaacctgaacttccagatcctgtacgagatcctgctgggcaaggccaccctgtacgccgtgctggtgtctgccctggtgctgatggctatggtcaagcggaaggacagccggggataa

SEQ ID NO: 37828 - DNA, 1869 bp, synthetic construct; identical to SEQ ID NO: 37826
  source 1..1869: mol_type = other DNA

SEQ ID NO: 37829 - DNA, 1869 bp, synthetic construct; identical to SEQ ID NO: 37827
  source 1..1869: mol_type = other DNA

SEQ ID NO: 37830 - DNA, 1866 bp, synthetic construct
  source 1..1866: mol_type = other DNA
atggccttaccagtgaccgccttgctcctgccgctggccttgctgctccacgccgccaggccggacatccagttgacccagtcccccagctcactcagcgccagtgtgggggaccgggtgaccattacctgtaaagccagtcagagtgtggactatgacggggatagcttcctgaattggtatcagcagaagcctggcaaagccccaaagctgctgatctacgctgcatctaatctggagtcaggcgtgccttccaggttctccggtagtgggtctgggaccgatttcacattgaccatttcatccctccaacccgaggatttcgctacatattactgtcagcagtccaatgaggaccctctcacctttggccagggcaccaaagttgaaattaagagactcgaggacctgaagaacgtgttcccacctgaggtggccgtgttcgagcctagcgaggccgagatcagccacacccagaaagccaccctcgtgtgcctggctaccggcttctaccccgaccatgtggaactgtcttggtgggtcaacggcaaagaggtgcacagcggcgtgtgtaccgacccccagccactgaaagaacagcccgccctgaacgacagccggtactgcctgagcagcagactgagagtgtccgccaccttctggcagaacccccggaaccacttcagatgccaggtgcagttctacggcctgagcgagaacgacgagtggacccaggacagagccaagcccgtgacccagatcgtgtctgccgaagcctggggcagagccgattgcgacgtgaagctggtggaaaagagcttcgagacagacaccaacctgaacttccagaacctgagcgtgatcggcttcagaatcctgctgctgaaagtggccggctttaacctgctgatgaccctgcggctgtggtccagcagggccaagcgatctggatctggagcaacaaacttctcactactcaaacaagcaggtgacgtggaggagaatcccgggcctactagtatggactggatttggcgcatccttttccttgtcggcgctgctaccggcgcgcattccttcgaagaagtccaacttgtggagtctggagggggcctggtgcagcccggcggctctctcagactgtcttgtgcggcaagcggctacaccttcacctcttactggatagaatgggtgaggcaggcacctggaaagggactggagtggattggagagattctgccaggagggggagatacaaattacaatgaaatcttcaaggggcgggccaccttttcagcggataccagcaagaatacagcttacctgcagatgaatagcctccgggcagaagataccgctgtttattattgcacgagacgggtgccaataagactggactattgggggcaagggactcttgtcaccgtcagttcaacgcgtatccagaaccctgatcctgccgtgtaccagctgcgggatagcaagagcagcgacaagagcgtgtgtctgttcaccgacttcgacagccagaccaacgtgtcccagagcaaggactccgacgtgtacatcaccgataagtgcgtgctggacatgcggagcatggacttcaagagcaactccgccgtggcctggtccaacaagtccgatttcgcctgcgccaacgccttcaacaacagcattatccccgaggacacattcttcccaagccccgagagcagctgcggctttaccagcgagagctaccagcagggcgtgctgagcgccaccatcctgtacgagatcctgctgggcaaggccaccctgtacgccgtgctggtgtctgccctggtgctgatggctatggtcaagcggaaggacagccgggga

SEQ ID NO: 37831 - DNA, 1878 bp, synthetic construct
  source 1..1878: mol_type = other DNA
atggccttaccagtgaccgccttgctcctgccgctggccttgctgctccacgccgccaggccggacatccagttgacccagtcccccagctcactcagcgccagtgtgggggaccgggtgaccattacctgtaaagccagtcagagtgtggactatgacggggatagcttcctgaattggtatcagcagaagcctggcaaagccccaaagctgctgatctacgctgcatctaatctggagtcaggcgtgccttccaggttctccggtagtgggtctgggaccgatttcacattgaccatttcatccctccaacccgaggatttcgctacatattactgtcagcagtccaatgaggaccctctcacctttggccagggcaccaaagttgaaattaagagactcgaggccgacgtgtcccccaagcctaccatcttcctgccctctatcgccgagacaaagctccagaaggccggcacctacctgtgcctgctggaaaagttcttcccagatgtgattaagatccactggcaggaaaagaagtccaacaccatcctgggcagccaggaaggcaacaccatgaagaccaacgacacctacatgaagttcagctggctgaccgtgcccgagaagtccctggacaaagaacacagatgcatcgtgcggcacgaaaacaacaagaacggcgtggaccaggaaatcatcttcccacccatcaagaccgatgtgattacaatggaccccaaggacaactgctccaaggacgccaacgataccctgctgctccagctgaccaacaccagcgcctactacatgtacttgttgctgctgctgaagtccgtggtgtacttcgccatcatcacatgctgcctgctgcggagaaccgccttctgctgcaacggcgagaagtctagggccaagcgatctggatctggagcaacaaacttctcactactcaaacaagcaggtgacgtggaggagaatcccgggcctactagtatggactggatttggcgcatccttttccttgtcggcgctgctaccggcgcgcattccttcgaagaagtccaacttgtggagtctggagggggcctggtgcagcccggcggctctctcagactgtcttgtgcggcaagcggctacaccttcacctcttactggatagaatgggtgaggcaggcacctggaaagggactggagtggattggagagattctgccaggagggggagatacaaattacaatgaaatcttcaaggggcgggccaccttttcagcggataccagcaagaatacagcttacctgcagatgaatagcctccgggcagaagataccgctgtttattattgcacgagacgggtgccaataagactggactattgggggcaagggactcttgtcaccgtcagttcaacgcgtagccagcctcacaccaagcccagcgtgttcgtgatgaagaacggcaccaacgtggcctgcctcgtgaaagagttctaccccaaggacatcaggatcaacctggtgtccagcaagaagatcaccgagttcgaccccgccatcgtgatctcccccagcggcaagtacaacgccgtgaagctggggaagtatgaggacagcaacagcgtgacctgctccgtgcagcacgacaacaagaccgtgcacagcaccgactttgaagtgaaaaccgactccaccgaccacgtgaagcccaaagagacagagaacaccaagcagcccagcaagagctgccacaagcccaaggccatcgtgcacaccgagaaagtgaacatgatgagcctgaccgtgatcggcttcagaatcctgctgctgaaagtggccggctttaacctgctgatgaccctgcggctgtggtccagctaa

SEQ ID NO: 37832 - DNA, 1878 bp, synthetic construct
  source 1..1878: mol_type = other DNA
atggccttaccagtgaccgccttgctcctgccgctggccttgctgctccacgccgccaggccggacatccagttgacccagtcccccagctcactcagcgccagtgtgggggaccgggtgaccattacctgtaaagccagtcagagtgtggactatgacggggatagcttcctgaattggtatcagcagaagcctggcaaagccccaaagctgctgatctacgctgcatctaatctggagtcaggcgtgccttccaggttctccggtagtgggtctgggaccgatttcacattgaccatttcatccctccaacccgaggatttcgctacatattactgtcagcagtccaatgaggaccctctcacctttggccagggcaccaaagttgaaattaagagactcgaggccgacgtgtcccccaagcctaccatcttcctgccctctatcgccgagacaaagctccagaaggccggcacctacctgtgcctgctggaaaagttcttcccagatgtgattaagatccactggcaggaaaagaagtccaacaccatcctgggcagccaggaaggcaacaccatgaagaccaacgacacctacatgaagttcagctggctgaccgtgcccgagaagtccctggacaaagaacacagatgcatcgtgcggcacgaaaacaacaagaacggcgtggaccaggaaatcatcttcccacccatcaagaccgatgtgattacaatggaccccaaggacaactgctccaaggacgccaacgataccctgctgctccagctgaccaacaccagcgcctactacatgtacttgttgctgctgctgaagtccgtggtgtacttcgccatcatcacatgctgcctgctgcggagaaccgccttctgctgcaacggcgagaagtctagggccaagcgatctggatctggagcaacaaacttctcactactcaaacaagcaggtgacgtggaggagaatcccgggcctactagtatggactggatttggcgcatccttttccttgtcggcgctgctaccggcgcgcattccttcgaagaagtccaacttgtggagtctggagggggcctggtgcagcccggcggctctctcagactgtcttgtgcggcaagcggctacaccttcacctcttactggatagaatgggtgaggcaggcacctggaaagggactggagtggattggagagattctgccaggagggggagatacaaattacaatgaaatcttcaaggggcgggccaccttttcagcggataccagcaagaatacagcttacctgcagatgaatagcctccgggcagaagataccgctgtttattattgcacgagacgggtgccaataagactggactattgggggcaagggactcttgtcaccgtcagttcaacgcgtagccagcctcacaccaagcccagcgtgttcgtgatgaagaacggcaccaacgtggcctgcctcgtgaaagagttctaccccaaggacatcaggatcaacctggtgtccagcaagaagatcaccgagttcgaccccgccatcgtgatctcccccagcggcaagtacaacgccgtgaagctggggaagtacgaggacagcaacagcgtgacctgctccgtgcagcacgacaacaagaccgtgcacagcaccgactttgaagtgaaaaccgactccaccgaccacgtgaagcccaaagagacagagaacaccaagcagcccagcaagagctgccacaagcccaaggccatcgtgcacaccgagaaagtgaacatgatgagcctgaccgtgctgggcttcagaatcctgctgctgaaagtggccggctttaacctgctgatgaccctgcggctgtggtccagctaa

SEQ ID NO: 37833 - DNA, 1866 bp, synthetic construct; identical to SEQ ID NO: 37830
  source 1..1866: mol_type = other DNA

SEQ ID NO: 37834 - DNA, 1878 bp, synthetic construct
  source 1..1878: mol_type = other DNA
atggccttaccagtgaccgccttgctcctgccgctggccttgctgctccacgccgccaggccggacatccagttgacccagtcccccagctcactcagcgccagtgtgggggaccgggtgaccattacctgtaaagccagtcagagtgtggactatgacggggatagcttcctgaattggtatcagcagaagcctggcaaagccccaaagctgctgatctacgctgcatctaatctggagtcaggcgtgccttccaggttctccggtagtgggtctgggaccgatttcacattgaccatttcatccctccaacccgaggatttcgctacatattactgtcagcagtccaatgaggaccctctcacctttggccagggcaccaaagttgaaattaagagactcgagatccagaaccctgatcctgccgtgtaccagctgcgggatagcaagagcagcgacaagagcgtgtgtctgttcaccgacttcgacagccagaccaacgtgtcccagagcaaggactccgacgtgtacatcaccgataagtgcgtgctggacatgcggagcatggacttcaagagcaactccgccgtggcctggtccaacaagtccgatttcgcctgcgccaacgccttcaacaacagcattatccccgaggacacattcttcccaagccccgagagcagctgcggctttaccagcgagagctaccagcagggcgtgctgagcgccaccatcctgtacgagatcctgctgggcaaggccaccctgtacgccgtgctggtgtctgccctggtgctgatggctatggtcaagcggaaggacagccggggacgcgccaagagaagcggatctggcgtgaagcagaccctgaatttcgacctgctgaagctggctggcgacgtggaatccaacccaggccctactagtatggactggatttggcgcatccttttccttgtcggcgctgctaccggcgcgcattccttcgaagaagtccaacttgtggagtctggagggggcctggtgcagcccggcggctctctcagactgtcttgtgcggcaagcggctacaccttcacctcttactggatagaatgggtgaggcaggcacctggaaagggactggagtggattggagagattctgccaggagggggagatacaaattacaatgaaatcttcaaggggcgggccaccttttcagcggataccagcaagaatacagcttacctgcagatgaatagcctccgggcagaagataccgctgtttattattgcacgagacgggtgccaataagactggactattgggggcaagggactcttgtcaccgtcagttcaacgcgtgaggacctgaagaacgtgttcccacctgaggtggccgtgttcgagcctagcgaggccgagatcagccacacccagaaagccaccctcgtgtgcctggctaccggcttctaccccgaccatgtggaactgtcttggtgggtcaacggcaaagaggtgcacagcggcgtgtgtaccgacccccagccactgaaagaacagcccgccctgaacgacagccggtactgcctgagcagcagactgagagtgtccgccaccttctggcagaacccccggaaccacttcagatgccaggtgcagttctacggcctgagcgagaacgacgagtggacccaggacagagccaagcccgtgacccagatcgtgtctgccgaagcctggggcagagccgattgcgacgtgaagctggtggaaaagagcttcgagacagacaccaacctgaacttccagaacctgagcgtgatcggcttcagaatcctgctgctgaaagtggccggctttaacctgctgatgaccctgcggctgtggtccagc

SEQ ID NO: 37835 - DNA, 2271 bp, synthetic construct
  source 1..2271: mol_type = other DNA
atggccttaccagtgaccgccttgctcctgccgctggccttgctgctccacgccgccaggccggaagtgcagctggttgaatctggcggaggactggttcagcctggcggatctctgagactgtcttgtgccgccagcggcttcagcttcagcgacttttggatgagctgggtccgacaggcccctggcaaaggacttgaatgggtcgccacaatcagccaggccggcagcgagaaggactacgtggactctgtgaagggcagattcaccatcagccgggacaacgccaagaagtccctgtacctccagatgaacagcctgagagccgaggacaccgccgtgtactattgtgcctctggcgtgtacagcttcgactacagaggccagggcaccctggtcacagtctcttctggtaccggcggaggcggatctggcggcggaggtagcggtggcggaggatctgaattcgacatccagttgacccagtcccccagctcactcagcgccagtgtgggggaccgggtgaccattacctgtaaagccagtcagagtgtggactatgacggggatagcttcctgaattggtatcagcagaagcctggcaaagccccaaagctgctgatctacgctgcatctaatctggagtcaggcgtgccttccaggttctccggtagtgggtctgggaccgatttcacattgaccatttcatccctccaacccgaggatttcgctacatattactgtcagcagtccaatgaggaccctctcacctttggccagggcaccaaagttgaaattaagagactcgaggacctgaagaacgtgttcccacctgaggtggccgtgttcgagcctagcgaggccgagatcagccacacccagaaagccaccctcgtgtgcctggctaccggcttctaccccgaccatgtggaactgtcttggtgggtcaacggcaaagaggtgcacagcggcgtgtgtaccgacccccagccactgaaagaacagcccgccctgaacgacagccggtactgcctgagcagcagactgagagtgtccgccaccttctggcagaacccccggaaccacttcagatgccaggtgcagttctacggcctgagcgagaacgacgagtggacccaggacagagccaagcccgtgacccagatcgtgtctgccgaagcctggggcagagccgattgcgacgtgaagctggtggaaaagagcttcgagacagacaccaacctgaacttccagaacctgagcgtgatcggcttcagaatcctgctgctgaaagtggccggctttaacctgctgatgaccctgcggctgtggtccagcagggccaagcgatctggatctggagcaacaaacttctcactactcaaacaagcaggtgacgtggaggagaatcccgggcctactagtatggactggatttggcgcatccttttccttgtcggcgctgctaccggcgcgcattccttcgaagaagtccaacttgtggagtctggagggggcctggtgcagcccggcggctctctcagactgtcttgtgcggcaagcggctacaccttcacctcttactggatagaatgggtgaggcaggcacctggaaagggactggagtggattggagagattctgccaggagggggagatacaaattacaatgaaatcttcaaggggcgggccaccttttcagcggataccagcaagaatacagcttacctgcagatgaatagcctccgggcagaagataccgctgtttattattgcacgagacgggtgccaataagactggactattgggggcaagggactcttgtcaccgtcagttcaacgcgtatccagaaccctgatcctgccgtgtaccagctgcgggatagcaagagcagcgacaagagcgtgtgtctgttcaccgacttcgacagccagaccaacgtgtcccagagcaaggactccgacgtgtacatcaccgataagtgcgtgctggacatgcggagcatggacttcaagagcaactccgccgtggcctggtccaacaagtccgatttcgcctgcgccaacgccttcaacaacagcattatccccgaggacacattcttcccaagccccgagagcagctgcggctttaccagcgagagctaccagcagggcgtgctgagcgccaccatcctgtacgagatcctgctgggcaaggccaccctgtacgccgtgctggtgtctgccctggtgctgatggctatggtcaagcggaaggacagccgggga

SEQ ID NO: 37836 - DNA, 2283 bp, synthetic construct
  source 1..2283: mol_type = other DNA
atggccttaccagtgaccgccttgctcctgccgctggccttgctgctccacgccgccaggccggaagtgcagctggttgaatctggcggaggactggttcagcctggcggatctctgagactgtcttgtgccgccagcggcttcagcttcagcgacttttggatgagctgggtccgacaggcccctggcaaaggacttgaatgggtcgccacaatcagccaggccggcagcgagaaggactacgtggactctgtgaagggcagattcaccatcagccgggacaacgccaagaagtccctgtacctccagatgaacagcctgagagccgaggacaccgccgtgtactattgtgcctctggcgtgtacagcttcgactacagaggccagggcaccctggtcacagtctcttctggtaccggcggaggcggatctggcggcggaggtagcggtggcggaggatctgaattcgacatccagttgacccagtcccccagctcactcagcgccagtgtgggggaccgggtgaccattacctgtaaagccagtcagagtgtggactatgacggggatagcttcctgaattggtatcagcagaagcctggcaaagccccaaagctgctgatctacgctgcatctaatctggagtcaggcgtgccttccaggttctccggtagtgggtctgggaccgatttcacattgaccatttcatccctccaacccgaggatttcgctacatattactgtcagcagtccaatgaggaccctctcacctttggccagggcaccaaagttgaaattaagagactcgagatccagaaccctgatcctgccgtgtaccagctgcgggatagcaagagcagcgacaagagcgtgtgtctgttcaccgacttcgacagccagaccaacgtgtcccagagcaaggactccgacgtgtacatcaccgataagtgcgtgctggacatgcggagcatggacttcaagagcaactccgccgtggcctggtccaacaagtccgatttcgcctgcgccaacgccttcaacaacagcattatccccgaggacacattcttcccaagccccgagagcagctgcggctttaccagcgagagctaccagcagggcgtgctgagcgccaccatcctgtacgagatcctgctgggcaaggccaccctgtacgccgtgctggtgtctgccctggtgctgatggctatggtcaagcggaaggacagccggggacgcgccaagagaagcggatctggcgtgaagcagaccctgaatttcgacctgctgaagctggctggcgacgtggaatccaacccaggccctactagtatggactggatttggcgcatccttttccttgtcggcgctgctaccggcgcgcattccttcgaagaagtccaacttgtggagtctggagggggcctggtgcagcccggcggctctctcagactgtcttgtgcggcaagcggctacaccttcacctcttactggatagaatgggtgaggcaggcacctggaaagggactggagtggattggagagattctgccaggagggggagatacaaattacaatgaaatcttcaaggggcgggccaccttttcagcggataccagcaagaatacagcttacctgcagatgaatagcctccgggcagaagataccgctgtttattattgcacgagacgggtgccaataagactggactattgggggcaagggactcttgtcaccgtcagttcaacgcgtgaggacctgaagaacgtgttcccacctgaggtggccgtgttcgagcctagcgaggccgagatcagccacacccagaaagccaccctcgtgtgcctggctaccggcttctaccccgaccatgtggaactgtcttggtgggtcaacggcaaagaggtgcacagcggcgtgtgtaccgacccccagccactgaaagaacagcccgccctgaacgacagccggtactgcctgagcagcagactgagagtgtccgccaccttctggcagaacccccggaaccacttcagatgccaggtgcagttctacggcctgagcgagaacgacgagtggacccaggacagagccaagcccgtgacccagatcgtgtctgccgaagcctggggcagagccgattgcgacgtgaagctggtggaaaagagcttcgagacagacaccaacctgaacttccagaacctgagcgtgatcggcttcagaatcctgctgctgaaagtggccggctttaacctgctgatgaccctgcggctgtggtccagc

SEQ ID NO: 37837 - DNA, 2682 bp, synthetic construct
  source 1..2682: mol_type = other DNA
atggccttaccagtgaccgccttgctcctgccgctggccttgctgctccacgccgccaggccggaagtgcagctggttgaatctggcggaggactggttcagcctggcggatctctgagactgtcttgtgccgccagcggcttcagcttcagcgacttttggatgagctgggtccgacaggcccctggcaaaggacttgaatgggtcgccacaatcagccaggccggcagcgagaaggactacgtggactctgtgaagggcagattcaccatcagccgggacaacgccaagaagtccctgtacctccagatgaacagcctgagagccgaggacaccgccgtgtactattgtgcctctggcgtgtacagcttcgactacagaggccagggcaccctggtcacagtctcttctggtaccggcggaggcggatctggcggcggaggtagcggtggcggaggatctgaattcgacatccagttgacccagtcccccagctcactcagcgccagtgtgggggaccgggtgaccattacctgtaaagccagtcagagtgtggactatgacggggatagcttcctgaattggtatcagcagaagcctggcaaagccccaaagctgctgatctacgctgcatctaatctggagtcaggcgtgccttccaggttctccggtagtgggtctgggaccgatttcacattgaccatttcatccctccaacccgaggatttcgctacatattactgtcagcagtccaatgaggaccctctcacctttggccagggcaccaaagttgaaattaagagactcgaggacctgaagaacgtgttcccacctgaggtggccgtgttcgagcctagcgaggccgagatcagccacacccagaaagccaccctcgtgtgcctggctaccggcttctaccccgaccatgtggaactgtcttggtgggtcaacggcaaagaggtgcacagcggcgtgtgtaccgacccccagccactgaaagaacagcccgccctgaacgacagccggtactgcctgagcagcagactgagagtgtccgccaccttctggcagaacccccggaaccacttcagatgccaggtgcagttctacggcctgagcgagaacgacgagtggacccaggacagagccaagcccgtgacccagatcgtgtctgccgaagcctggggcagagccgattgcgacgtgaagctggtggaaaagagcttcgagacagacaccaacctgaacttccagaacctgagcgtgatcggcttcagaatcctgctgctgaaagtggccggctttaacctgctgatgaccctgcggctgtggtccagcagggccaagcgatctggatctggagcaacaaacttctcactactcaaacaagcaggtgacgtggaggagaatcccgggcctactagtatggactggatttggcgcatccttttccttgtcggcgctgctaccggcgcgcattccgggccccagctccagctgcaagagtctggacctggcctggtcaagcctagcgagacactgagcctgacctgtaccgtgtccggcgatagcatcagcagcggcgattactactggggctggatcagacagcctcctggcaaaggactggaatggatcggccacatctactacagcggcgtgacctactacaaccccagcctgaagtccagagtgaccatcagcgtggacaccagccggaaccagttctccctgaagctgtctagcgtgacagccgccgataccgccgtgtactactgcaccagagaggacagcagcaactggcggagtagaggccagggaacactggtcacagttagctctggatccggcggaggcggaagtggaggcggaggatctggcggcggaggctctttcgaagaagtccaacttgtggagtctggagggggcctggtgcagcccggcggctctctcagactgtcttgtgcggcaagcggctacaccttcacctcttactggatagaatgggtgaggcaggcacctggaaagggactggagtggattggagagattctgccaggagggggagatacaaattacaatgaaatcttcaaggggcgggccaccttttcagcggataccagcaagaatacagcttacctgcagatgaatagcctccgggcagaagataccgctgtttattattgcacgagacgggtgccaataagactggactattgggggcaagggactcttgtcaccgtcagttcaacgcgtatccagaaccctgatcctgccgtgtaccagctgcgggatagcaagagcagcgacaagagcgtgtgtctgttcaccgacttcgacagccagaccaacgtgtcccagagcaaggactccgacgtgtacatcaccgataagtgcgtgctggacatgcggagcatggacttcaagagcaactccgccgtggcctggtccaacaagtccgatttcgcctgcgccaacgccttcaacaacagcattatccccgaggacacattcttcccaagccccgagagcagctgcggctttaccagcgagagctaccagcagggcgtgctgagcgccaccatcctgtacgagatcctgctgggcaaggccaccctgtacgccgtgctggtgtctgccctggtgctgatggctatggtcaagcggaaggacagccgggga

SEQ ID NO: 37838 - DNA, 2694 bp, synthetic construct
  source 1..2694: mol_type = other DNA
atggccttaccagtgaccgccttgctcctgccgctggccttgctgctccacgccgccaggccggaagtgcagctggttgaatctggcggaggactggttcagcctggcggatctctgagactgtcttgtgccgccagcggcttcagcttcagcgacttttggatgagctgggtccgacaggcccctggcaaaggacttgaatgggtcgccacaatcagccaggccggcagcgagaaggactacgtggactctgtgaagggcagattcaccatcagccgggacaacgccaagaagtccctgtacctccagatgaacagcctgagagccgaggacaccgccgtgtactattgtgcctctggcgtgtacagcttcgactacagaggccagggcaccctggtcacagtctcttctggtaccggcggaggcggatctggcggcggaggtagcggtggcggaggatctgaattcgacatccagttgacccagtcccccagctcactcagcgccagtgtgggggaccgggtgaccattacctgtaaagccagtcagagtgtggactatgacggggatagcttcctgaattggtatcagcagaagcctggcaaagccccaaagctgctgatctacgctgcatctaatctggagtcaggcgtgccttccaggttctccggtagtgggtctgggaccgatttcacattgaccatttcatccctccaacccgaggatttcgctacatattactgtcagcagtccaatgaggaccctctcacctttggccagggcaccaaagttgaaattaagagactcgagatccagaaccctgatcctgccgtgtaccagctgcgggatagcaagagcagcgacaagagcgtgtgtctgttcaccgacttcgacagccagaccaacgtgtcccagagcaaggactccgacgtgtacatcaccgataagtgcgtgctggacatgcggagcatggacttcaagagcaactccgccgtggcctggtccaacaagtccgatttcgcctgcgccaacgccttcaacaacagcattatccccgaggacacattcttcccaagccccgagagcagctgcggctttaccagcgagagctaccagcagggcgtgctgagcgccaccatcctgtacgagatcctgctgggcaaggccaccctgtacgccgtgctggtgtctgccctggtgctgatggctatggtcaagcggaaggacagccggggacgcgccaagagaagcggatctggcgtgaagcagaccctgaatttcgacctgctgaagctggctggcgacgtggaatccaacccaggccctactagtatggactggatttggcgcatccttttccttgtcggcgctgctaccggcgcgcattccgggccccagctccagctgcaagagtctggacctggcctggtcaagcctagcgagacactgagcctgacctgtaccgtgtccggcgatagcatcagcagcggcgattactactggggctggatcagacagcctcctggcaaaggactggaatggatcggccacatctactacagcggcgtgacctactacaaccccagcctgaagtccagagtgaccatcagcgtggacaccagccggaaccagttctccctgaagctgtctagcgtgacagccgccgataccgccgtgtactactgcaccagagaggacagcagcaactggcggagtagaggccagggaacactggtcacagttagctctggatccggcggaggcggaagtggaggcggaggatctggcggcggaggctctttcgaagaagtccaacttgtggagtctggagggggcctggtgcagcccggcggctctctcagactgtcttgtgcggcaagcggctacaccttcacctcttactggatagaatgggtgaggcaggcacctggaaagggactggagtggattggagagattctgccaggagggggagatacaaattacaatgaaatcttcaaggggcgggccaccttttcagcggataccagcaagaatacagcttacctgcagatgaatagcctccgggcagaagataccgctgtttattattgcacgagacgggtgccaataagactggactattgggggcaagggactcttgtcaccgtcagttcaacgcgtgaggacctgaagaacgtgttcccacctgaggtggccgtgttcgagcctagcgaggccgagatcagccacacccagaaagccaccctcgtgtgcctggctaccggcttctaccccgaccatgtggaactgtcttggtgggtcaacggcaaagaggtgcacagcggcgtgtgtaccgacccccagccactgaaagaacagcccgccctgaacgacagccggtactgcctgagcagcagactgagagtgtccgccaccttctggcagaacccccggaaccacttcagatgccaggtgcagttctacggcctgagcgagaacgacgagtggacccaggacagagccaagcccgtgacccagatcgtgtctgccgaagcctggggcagagccgattgcgacgtgaagctggtggaaaagagcttcgagacagacaccaacctgaacttccagaacctgagcgtgatcggcttcagaatcctgctgctgaaagtggccggctttaacctgctgatgaccctgcggctgtggtccagc

SEQ ID NO: 37839 - DNA, 2076 bp, synthetic construct
  source 1..2076: mol_type = other DNA
atggccttaccagtgaccgccttgctcctgccgctggccttgctgctccacgccgccaggccggacatccagttgacccagtcccccagctcactcagcgccagtgtgggggaccgggtgaccattacctgtaaagccagtcagagtgtggactatgacggggatagcttcctgaattggtatcagcagaagcctggcaaagccccaaagctgctgatctacgctgcatctaatctggagtcaggcgtgccttccaggttctccggtagtgggtctgggaccgatttcacattgaccatttcatccctccaacccgaggatttcgctacatattactgtcagcagtccaatgaggaccctctcacctttggccagggcaccaaagttgaaattaagagactcgaggacctgaagaacgtgttcccacctgaggtggccgtgttcgagcctagcgaggccgagatcagccacacccagaaagccaccctcgtgtgcctggctaccggcttctaccccgaccatgtggaactgtcttggtgggtcaacggcaaagaggtgcacagcggcgtgtgtaccgacccccagccactgaaagaacagcccgccctgaacgacagccggtactgcctgagcagcagactgagagtgtccgccaccttctggcagaacccccggaaccacttcagatgccaggtgcagttctacggcctgagcgagaacgacgagtggacccaggacagagccaagcccgtgacccagatcgtgtctgccgaagcctggggcagagccgattgcgacgtgaagctggtggaaaagagcttcgagacagacaccaacctgaacttccagaacctgagcgtgatcggcttcagaatcctgctgctgaaagtggccggctttaacctgctgatgaccctgcggctgtggtccagcagggccaagcgatctggatctggagcaacaaacttctcactactcaaacaagcaggtgacgtggaggagaatcccgggcctactagtatggactggatttggcgcatccttttccttgtcggcgctgctaccggcgcccattccgggcccatggaccccgacctggaaatcagagccgccttcctgcggcagagaaacacagccctgagaacagaggtggccgagctggaacaagaggtgcagcggctggaaaacgaggtgtcccagtacgagacaagatacggccctctcggaggcggaaaaggatccggcggcggaggatctggcggaggcggatctgggggcggaggctctttcgaagaagtccaacttgtggagtctggagggggcctggtgcagcccggcggctctctcagactgtcttgtgcggcaagcggctacaccttcacctcttactggatagaatgggtgaggcaggcacctggaaagggactggagtggattggagagattctgccaggagggggagatacaaattacaatgaaatcttcaaggggcgggccaccttttcagcggataccagcaagaatacagcttacctgcagatgaatagcctccgggcagaagataccgctgtttattattgcacgagacgggtgccaataagactggactattgggggcaagggactcttgtcaccgtcagttcaacgcgtatccagaaccctgatcctgccgtgtaccagctgcgggatagcaagagcagcgacaagagcgtgtgtctgttcaccgacttcgacagccagaccaacgtgtcccagagcaaggactccgacgtgtacatcaccgataagtgcgtgctggacatgcggagcatggacttcaagagcaactccgccgtggcctggtccaacaagtccgatttcgcctgcgccaacgccttcaacaacagcattatccccgaggacacattcttcccaagccccgagagcagctgcggctttaccagcgagagctaccagcagggcgtgctgagcgccaccatcctgtacgagatcctgctgggcaaggccaccctgtacgccgtgctggtgtctgccctggtgctgatggctatggtcaagcggaaggacagccgggga

SEQ ID NO: 37840 - DNA, 2088 bp, synthetic construct
  source 1..2088: mol_type = other DNA
atggccttaccagtgaccgccttgctcctgccgctggccttgctgctccacgccgccaggccggacatccagttgacccagtcccccagctcactcagcgccagtgtgggggaccgggtgaccattacctgtaaagccagtcagagtgtggactatgacggggatagcttcctgaattggtatcagcagaagcctggcaaagccccaaagctgctgatctacgctgcatctaatctggagtcaggcgtgccttccaggttctccggtagtgggtctgggaccgatttcacattgaccatttcatccctccaacccgaggatttcgctacatattactgtcagcagtccaatgaggaccctctcacctttggccagggcaccaaagttgaaattaagagactcgagatccagaaccctgatcctgccgtgtaccagctgcgggatagcaagagcagcgacaagagcgtgtgtctgttcaccgacttcgacagccagaccaacgtgtcccagagcaaggactccgacgtgtacatcaccgataagtgcgtgctggacatgcggagcatggacttcaagagcaactccgccgtggcctggtccaacaagtccgatttcgcctgcgccaacgccttcaacaacagcattatccccgaggacacattcttcccaagccccgagagcagctgcggctttaccagcgagagctaccagcagggcgtgctgagcgccaccatcctgtacgagatcctgctgggcaaggccaccctgtacgccgtgctggtgtctgccctggtgctgatggctatggtcaagcggaaggacagccggggacgcgccaagagaagcggatctggcgtgaagcagaccctgaatttcgacctgctgaagctggctggcgacgtggaatccaacccaggccctactagtatggactggatttggcgcatccttttccttgtcggcgctgctaccggcgcccattccgggcccatggaccccgacctggaaatcagagccgccttcctgcggcagagaaacacagccctgagaacagaggtggccgagctggaacaagaggtgcagcggctggaaaacgaggtgtcccagtacgagacaagatacggccctctcggaggcggaaaaggatccggcggcggaggatctggcggaggcggatctgggggcggaggctctttcgaagaagtccaacttgtggagtctggagggggcctggtgcagcccggcggctctctcagactgtcttgtgcggcaagcggctacaccttcacctcttactggatagaatgggtgaggcaggcacctggaaagggactggagtggattggagagattctgccaggagggggagatacaaattacaatgaaatcttcaaggggcgggccaccttttcagcggataccagcaagaatacagcttacctgcagatgaatagcctccgggcagaagataccgctgtttattattgcacgagacgggtgccaataagactggactattgggggcaagggactcttgtcaccgtcagttcaacgcgtgaggacctgaagaacgtgttcccacctgaggtggccgtgttcgagcctagcgaggccgagatcagccacacccagaaagccaccctcgtgtgcctggctaccggcttctaccccgaccatgtggaactgtcttggtgggtcaacggcaaagaggtgcacagcggcgtgtgtaccgacccccagccactgaaagaacagcccgccctgaacgacagccggtactgcctgagcagcagactgagagtgtccgccaccttctggcagaacccccggaaccacttcagatgccaggtgcagttctacggcctgagcgagaacgacgagtggacccaggacagagccaagcccgtgacccagatcgtgtctgccgaagcctggggcagagccgattgcgacgtgaagctggtggaaaagagcttcgagacagacaccaacctgaacttccagaacctgagcgtgatcggcttcagaatcctgctgctgaaagtggccggctttaacctgctgatgaccctgcggctgtggtccagc

SEQ ID NO: 37841 - DNA, 2007 bp, synthetic construct
  source 1..2007: mol_type = other DNA
atggccttaccagtgaccgccttgctcctgccgctggccttgctgctccacgccgccaggccggacatccagttgacccagtcccccagctcactcagcgccagtgtgggggaccgggtgaccattacctgtaaagccagtcagagtgtggactatgacggggatagcttcctgaattggtatcagcagaagcctggcaaagccccaaagctgctgatctacgctgcatctaatctggagtcaggcgtgccttccaggttctccggtagtgggtctgggaccgatttcacattgaccatttcatccctccaacccgaggatttcgctacatattactgtcagcagtccaatgaggaccctctcacctttggccagggcaccaaagttgaaattaagagactcgaggacctgaagaacgtgttcccacctgaggtggccgtgttcgagcctagcgaggccgagatcagccacacccagaaagccaccctcgtgtgcctggctaccggcttctaccccgaccatgtggaactgtcttggtgggtcaacggcaaagaggtgcacagcggcgtgtgtaccgacccccagccactgaaagaacagcccgccctgaacgacagccggtactgcctgagcagcagactgagagtgtccgccaccttctggcagaacccccggaaccacttcagatgccaggtgcagttctacggcctgagcgagaacgacgagtggacccaggacagagccaagcccgtgacccagatcgtgtctgccgaagcctggggcagagccgattgcgacgtgaagctggtggaaaagagcttcgagacagacaccaacctgaacttccagaacctgagcgtgatcggcttcagaatcctgctgctgaaagtggccggctttaacctgctgatgaccctgcggctgtggtccagcagggccaagcgatctggatctggagcaacaaacttctcactactcaaacaagcaggtgacgtggaggagaatcccgggcctactagtatggactggatttggcgcatccttttccttgtcggcgctgctaccggcgcccattccgggcccgaagttgctgccctcgagaaggaggtagcagctttggaaaaagaagtcgcagcccttgagaaagaagttgcggctctggagaagggatccggcggcggaggatctggcggaggcggatctgggggcggaggctctttcgaagaagtccaacttgtggagtctggagggggcctggtgcagcccggcggctctctcagactgtcttgtgcggcaagcggctacaccttcacctcttactggatagaatgggtgaggcaggcacctggaaagggactggagtggattggagagattctgccaggagggggagatacaaattacaatgaaatcttcaaggggcgggccaccttttcagcggataccagcaagaatacagcttacctgcagatgaatagcctccgggcagaagataccgctgtttattattgcacgagacgggtgccaataagactggactattgggggcaagggactcttgtcaccgtcagttcaacgcgtatccagaaccctgatcctgccgtgtaccagctgcgggatagcaagagcagcgacaagagcgtgtgtctgttcaccgacttcgacagccagaccaacgtgtcccagagcaaggactccgacgtgtacatcaccgataagtgcgtgctggacatgcggagcatggacttcaagagcaactccgccgtggcctggtccaacaagtccgatttcgcctgcgccaacgccttcaacaacagcattatccccgaggacacattcttcccaagccccgagagcagctgcggctttaccagcgagagctaccagcagggcgtgctgagcgccaccatcctgtacgagatcctgctgggcaaggccaccctgtacgccgtgctggtgtctgccctggtgctgatggctatggtcaagcggaaggacagccgggga

SEQ ID NO: 37842 - DNA, 2019 bp, synthetic construct
  source 1..2019: mol_type = other DNA
atggccttaccagtgaccgccttgctcctgccgctggccttgctgctccacgccgccaggccggacatccagttgacccagtcccccagctcactcagcgccagtgtgggggaccgggtgaccattacctgtaaagccagtcagagtgtggactatgacggggatagcttcctgaattggtatcagcagaagcctggcaaagccccaaagctgctgatctacgctgcatctaatctggagtcaggcgtgccttccaggttctccggtagtgggtctgggaccgatttcacattgaccatttcatccctccaacccgaggatttcgctacatattactgtcagcagtccaatgaggaccctctcacctttggccagggcaccaaagttgaaattaagagactcgagatccagaaccctgatcctgccgtgtaccagctgcgggatagcaagagcagcgacaagagcgtgtgtctgttcaccgacttcgacagccagaccaacgtgtcccagagcaaggactccgacgtgtacatcaccgataagtgcgtgctggacatgcggagcatggacttcaagagcaactccgccgtggcctggtccaacaagtccgatttcgcctgcgccaacgccttcaacaacagcattatccccgaggacacattcttcccaagccccgagagcagctgcggctttaccagcgagagctaccagcagggcgtgctgagcgccaccatcctgtacgagatcctgctgggcaaggccaccctgtacgccgtgctggtgtctgccctggtgctgatggctatggtcaagcggaaggacagccggggacgcgccaagagaagcggatctggcgtgaagcagaccctgaatttcgacctgctgaagctggctggcgacgtggaatccaacccaggccctactagtatggactggatttggcgcatccttttccttgtcggcgctgctaccggcgcccattccgggcccgaagttgctgccctcgagaaggaggtagcagctttggaaaaagaagtcgcagcccttgagaaagaagttgcggctctggagaagggatccggcggcggaggatctggcggaggcggatctgggggcggaggctctttcgaagaagtccaacttgtggagtctggagggggcctggtgcagcccggcggctctctcagactgtcttgtgcggcaagcggctacaccttcacctcttactggatagaatgggtgaggcaggcacctggaaagggactggagtggattggagagattctgccaggagggggagatacaaattacaatgaaatcttcaaggggcgggccaccttttcagcggataccagcaagaatacagcttacctgcagatgaatagcctccgggcagaagataccgctgtttattattgcacgagacgggtgccaataagactggactattgggggcaagggactcttgtcaccgtcagttcaacgcgtgaggacctgaagaacgtgttcccacctgaggtggccgtgttcgagcctagcgaggccgagatcagccacacccagaaagccaccctcgtgtgcctggctaccggcttctaccccgaccatgtggaactgtcttggtgggtcaacggcaaagaggtgcacagcggcgtgtgtaccgacccccagccactgaaagaacagcccgccctgaacgacagccggtactgcctgagcagcagactgagagtgtccgccaccttctggcagaacccccggaaccacttcagatgccaggtgcagttctacggcctgagcgagaacgacgagtggacccaggacagagccaagcccgtgacccagatcgtgtctgccgaagcctggggcagagccgattgcgacgtgaagctggtggaaaagagcttcgagacagacaccaacctgaacttccagaacctgagcgtgatcggcttcagaatcctgctgctgaaagtggccggctttaacctgctgatgaccctgcggctgtggtccagc

SEQ ID NO: 37843 - DNA, 2277 bp, synthetic construct
  source 1..2277: mol_type = other DNA
atggccttaccagtgaccgccttgctcctgccgctggccttgctgctccacgccgccaggccggacatccagttgacccagtcccccagctcactcagcgccagtgtgggggaccgggtgaccattacctgtaaagccagtcagagtgtggactatgacggggatagcttcctgaattggtatcagcagaagcctggcaaagccccaaagctgctgatctacgctgcatctaatctggagtcaggcgtgccttccaggttctccggtagtgggtctgggaccgatttcacattgaccatttcatccctccaacccgaggatttcgctacatattactgtcagcagtccaatgaggaccctctcacctttggccagggcaccaaagttgaaattaagagactcgaggacctgaagaacgtgttcccacctgaggtggccgtgttcgagcctagcgaggccgagatcagccacacccagaaagccaccctcgtgtgcctggctaccggcttctaccccgaccatgtggaactgtcttggtgggtcaacggcaaagaggtgcacagcggcgtgtgtaccgacccccagccactgaaagaacagcccgccctgaacgacagccggtactgcctgagcagcagactgagagtgtccgccaccttctggcagaacccccggaaccacttcagatgccaggtgcagttctacggcctgagcgagaacgacgagtggacccaggacagagccaagcccgtgacccagatcgtgtctgccgaagcctggggcagagccgattgcgacgtgaagctggtggaaaagagcttcgagacagacaccaacctgaacttccagaacctgagcgtgatcggcttcagaatcctgctgctgaaagtggccggctttaacctgctgatgaccctgcggctgtggtccagcagggccaagcgatctggatctggagcaacaaacttctcactactcaaacaagcaggtgacgtggaggagaatcccgggcctactagtatggactggatttggcgcatccttttccttgtcggcgctgctaccggcgcccattccgggccccaggttcagctgcaagagtctggcggaggacttgctcaagctggcggaagcctgagactgtcttgtgccgcctctggcagaaccttcagcatgggctggtttagacaggcccctggcaaagagagagagttcgtcgccgccatcacatacagcggcggcagcccttactacgcctcttctgtcagaggccggttcaccatcagccgggacaacgccaagaacaccgtgtacctccagatgaacagcctgaagccagaggacaccgccgtgtactactgtgccgccaatccaacctacggcagcgactggaatgccgagaattggggccagggcacccaagtgacagtgtctagtggatccggcggcggaggatctggcggaggcggatctgggggcggaggctctttcgaagaagtccaacttgtggagtctggagggggcctggtgcagcccggcggctctctcagactgtcttgtgcggcaagcggctacaccttcacctcttactggatagaatgggtgaggcaggcacctggaaagggactggagtggattggagagattctgccaggagggggagatacaaattacaatgaaatcttcaaggggcgggccaccttttcagcggataccagcaagaatacagcttacctgcagatgaatagcctccgggcagaagataccgctgtttattattgcacgagacgggtgccaataagactggactattgggggcaagggactcttgtcaccgtcagttcaacgcgtatccagaaccctgatcctgccgtgtaccagctgcgggatagcaagagcagcgacaagagcgtgtgtctgttcaccgacttcgacagccagaccaacgtgtcccagagcaaggactccgacgtgtacatcaccgataagtgcgtgctggacatgcggagcatggacttcaagagcaactccgccgtggcctggtccaacaagtccgatttcgcctgcgccaacgccttcaacaacagcattatccccgaggacacattcttcccaagccccgagagcagctgcggctttaccagcgagagctaccagcagggcgtgctgagcgccaccatcctgtacgagatcctgctgggcaaggccaccctgtacgccgtgctggtgtctgccctggtgctgatggctatggtcaagcggaaggacagccgggga

SEQ ID NO: 37844 - DNA, 2289 bp, synthetic construct
  source 1..2289: mol_type = other DNA
atggccttaccagtgaccgccttgctcctgccgctggccttgctgctccacgccgccaggccggacatccagttgacccagtcccccagctcactcagcgccagtgtgggggaccgggtgaccattacctgtaaagccagtcagagtgtggactatgacggggatagcttcctgaattggtatcagcagaagcctggcaaagccccaaagctgctgatctacgctgcatctaatctggagtcaggcgtgccttccaggttctccggtagtgggtctgggaccgatttcacattgaccatttcatccctccaacccgaggatttcgctacatattactgtcagcagtccaatgaggaccctctcacctttggccagggcaccaaagttgaaattaagagactcgagatccagaaccctgatcctgccgtgtaccagctgcgggatagcaagagcagcgacaagagcgtgtgtctgttcaccgacttcgacagccagaccaacgtgtcccagagcaaggactccgacgtgtacatcaccgataagtgcgtgctggacatgcggagcatggacttcaagagcaactccgccgtggcctggtccaacaagtccgatttcgcctgcgccaacgccttcaacaacagcattatccccgaggacacattcttcccaagccccgagagcagctgcggctttaccagcgagagctaccagcagggcgtgctgagcgccaccatcctgtacgagatcctgctgggcaaggccaccctgtacgccgtgctggtgtctgccctggtgctgatggctatggtcaagcggaaggacagccggggacgcgccaagagaagcggatctggcgtgaagcagaccctgaatttcgacctgctgaagctggctggcgacgtggaatccaacccaggccctactagtatggactggatttggcgcatccttttccttgtcggcgctgctaccggcgcccattccgggccccaggttcagctgcaagagtctggcggaggacttgctcaagctggcggaagcctgagactgtcttgtgccgcctctggcagaaccttcagcatgggctggtttagacaggcccctggcaaagagagagagttcgtcgccgccatcacatacagcggcggcagcccttactacgcctcttctgtcagaggccggttcaccatcagccgggacaacgccaagaacaccgtgtacctccagatgaacagcctgaagccagaggacaccgccgtgtactactgtgccgccaatccaacctacggcagcgactggaatgccgagaattggggccagggcacccaagtgacagtgtctagtggatccggcggcggaggatctggcggaggcggatctgggggcggaggctctttcgaagaagtccaacttgtggagtctggagggggcctggtgcagcccggcggctctctcagactgtcttgtgcggcaagcggctacaccttcacctcttactggatagaatgggtgaggcaggcacctggaaagggactggagtggattggagagattctgccaggagggggagatacaaattacaatgaaatcttcaaggggcgggccaccttttcagcggataccagcaagaatacagcttacctgcagatgaatagcctccgggcagaagataccgctgtttattattgcacgagacgggtgccaataagactggactattgggggcaagggactcttgtcaccgtcagttcaacgcgtgaggacctgaagaacgtgttcccacctgaggtggccgtgttcgagcctagcgaggccgagatcagccacacccagaaagccaccctcgtgtgcctggctaccggcttctaccccgaccatgtggaactgtcttggtgggtcaacggcaaagaggtgcacagcggcgtgtgtaccgacccccagccactgaaagaacagcccgccctgaacgacagccggtactgcctgagcagcagactgagagtgtccgccaccttctggcagaacccccggaaccacttcagatgccaggtgcagttctacggcctgagcgagaacgacgagtggacccaggacagagccaagcccgtgacccagatcgtgtctgccgaagcctggggcagagccgattgcgacgtgaagctggtggaaaagagcttcgagacagacaccaacctgaacttccagaacctgagcgtgatcggcttcagaatcctgctgctgaaagtggccggctttaacctgctgatgaccctgcggctgtggtccagc

SEQ ID NO: 37845 - DNA, 2295 bp, synthetic construct
  source 1..2295: mol_type = other DNA
atggccttaccagtgaccgccttgctcctgccgctggccttgctgctccacgccgccaggccggaagtgcaactggtggaatctggaggctctctggtgcagccagggggaagcctgagactgtcttgtgccgcttccggcttcaccttcgacgactacgccatgagctgggtgcgccaggtgccaggcaaaggcctggaatgggtgtccagcatcaactggagcggcacccacaccgattacgccgactccgtgaaaggcagattcacaatcagcagaaacaacgccaacaataccctgtacctgcagatgaactccctgaagtctgaggatacagcagtgtattattgcgccaagaactggcgggacgccggcaccacttggtttgagaaaagcggctctgccggacagggaacccaagtgacagtgtcctccggtaccggcggaggcggatctggcggcggaggtagcggtggcggaggatctgaattcgacatccagttgacccagtcccccagctcactcagcgccagtgtgggggaccgggtgaccattacctgtaaagccagtcagagtgtggactatgacggggatagcttcctgaattggtatcagcagaagcctggcaaagccccaaagctgctgatctacgctgcatctaatctggagtcaggcgtgccttccaggttctccggtagtgggtctgggaccgatttcacattgaccatttcatccctccaacccgaggatttcgctacatattactgtcagcagtccaatgaggaccctctcacctttggccagggcaccaaagttgaaattaagagactcgaggacctgaagaacgtgttcccacctgaggtggccgtgttcgagcctagcgaggccgagatcagccacacccagaaagccaccctcgtgtgcctggctaccggcttctaccccgaccatgtggaactgtcttggtgggtcaacggcaaagaggtgcacagcggcgtgtgtaccgacccccagccactgaaagaacagcccgccctgaacgacagccggtactgcctgagcagcagactgagagtgtccgccaccttctggcagaacccccggaaccacttcagatgccaggtgcagttctacggcctgagcgagaacgacgagtggacccaggacagagccaagcccgtgacccagatcgtgtctgccgaagcctggggcagagccgattgcgacgtgaagctggtggaaaagagcttcgagacagacaccaacctgaacttccagaacctgagcgtgatcggcttcagaatcctgctgctgaaagtggccggctttaacctgctgatgaccctgcggctgtggtccagcagggccaagcgatctggatctggagcaacaaacttctcactactcaaacaagcaggtgacgtggaggagaatcccgggcctactagtatggactggatttggcgcatccttttccttgtcggcgctgctaccggcgcgcattccttcgaagaagtccaacttgtggagtctggagggggcctggtgcagcccggcggctctctcagactgtcttgtgcggcaagcggctacaccttcacctcttactggatagaatgggtgaggcaggcacctggaaagggactggagtggattggagagattctgccaggagggggagatacaaattacaatgaaatcttcaaggggcgggccaccttttcagcggataccagcaagaatacagcttacctgcagatgaatagcctccgggcagaagataccgctgtttattattgcacgagacgggtgccaataagactggactattgggggcaagggactcttgtcaccgtcagttcaacgcgtatccagaaccctgatcctgccgtgtaccagctgcgggatagcaagagcagcgacaagagcgtgtgtctgttcaccgacttcgacagccagaccaacgtgtcccagagcaaggactccgacgtgtacatcaccgataagtgcgtgctggacatgcggagcatggacttcaagagcaactccgccgtggcctggtccaacaagtccgatttcgcctgcgccaacgccttcaacaacagcattatccccgaggacacattcttcccaagccccgagagcagctgcggctttaccagcgagagctaccagcagggcgtgctgagcgccaccatcctgtacgagatcctgctgggcaaggccaccctgtacgccgtgctggtgtctgccctggtgctgatggctatggtcaagcggaaggacagccgggga

SEQ ID NO: 37846 - DNA, 2307 bp, synthetic construct
  source 1..2307: mol_type = other DNA
atggccttaccagtgaccgccttgctcctgccgctggccttgctgctccacgccgccaggccggaagtgcaactggtggaatctggaggctctctggtgcagccagggggaagcctgagactgtcttgtgccgcttccggcttcaccttcgacgactacgccatgagctgggtgcgccaggtgccaggcaaaggcctggaatgggtgtccagcatcaactggagcggcacccacaccgattacgccgactccgtgaaaggcagattcacaatcagcagaaacaacgccaacaataccctgtacctgcagatgaactccctgaagtctgaggatacagcagtgtattattgcgccaagaactggcgggacgccggcaccacttggtttgagaaaagcggctctgccggacagggaacccaagtgacagtgtcctccggtaccggcggaggcggatctggcggcggaggtagcggtggcggaggatctgaattcgacatccagttgacccagtcccccagctcactcagcgccagtgtgggggaccgggtgaccattacctgtaaagccagtcagagtgtggactatgacggggatagcttcctgaattggtatcagcagaagcctggcaaagccccaaagctgctgatctacgctgcatctaatctggagtcaggcgtgccttccaggttctccggtagtgggtctgggaccgatttcacattgaccatttcatccctccaacccgaggatttcgctacatattactgtcagcagtccaatgaggaccctctcacctttggccagggcaccaaagttgaaattaagagactcgagatccagaaccctgatcctgccgtgtaccagctgcgggatagcaagagcagcgacaagagcgtgtgtctgttcaccgacttcgacagccagaccaacgtgtcccagagcaaggactccgacgtgtacatcaccgataagtgcgtgctggacatgcggagcatggacttcaagagcaactccgccgtggcctggtccaacaagtccgatttcgcctgcgccaacgccttcaacaacagcattatccccgaggacacattcttcccaagccccgagagcagctgcggctttaccagcgagagctaccagcagggcgtgctgagcgccaccatcctgtacgagatcctgctgggcaaggccaccctgtacgccgtgctggtgtctgccctggtgctgatggctatggtcaagcggaaggacagccggggacgcgccaagagaagcggatctggcgtgaagcagaccctgaatttcgacctgctgaagctggctggcgacgtggaatccaacccaggccctactagtatggactggatttggcgcatccttttccttgtcggcgctgctaccggcgcgcattccttcgaagaagtccaacttgtggagtctggagggggcctggtgcagcccggcggctctctcagactgtcttgtgcggcaagcggctacaccttcacctcttactggatagaatgggtgaggcaggcacctggaaagggactggagtggattggagagattctgccaggagggggagatacaaattacaatgaaatcttcaaggggcgggccaccttttcagcggataccagcaagaatacagcttacctgcagatgaatagcctccgggcagaagataccgctgtttattattgcacgagacgggtgccaataagactggactattgggggcaagggactcttgtcaccgtcagttcaacgcgtgaggacctgaagaacgtgttcccacctgaggtggccgtgttcgagcctagcgaggccgagatcagccacacccagaaagccaccctcgtgtgcctggctaccggcttctaccccgaccatgtggaactgtcttggtgggtcaacggcaaagaggtgcacagcggcgtgtgtaccgacccccagccactgaaagaacagcccgccctgaacgacagccggtactgcctgagcagcagactgagagtgtccgccaccttctggcagaacccccggaaccacttcagatgccaggtgcagttctacggcctgagcgagaacgacgagtggacccaggacagagccaagcccgtgacccagatcgtgtctgccgaagcctggggcagagccgattgcgacgtgaagctggtggaaaagagcttcgagacagacaccaacctgaacttccagaacctgagcgtgatcggcttcagaatcctgctgctgaaagtggccggctttaacctgctgatgaccctgcggctgtggtccagc

SEQ ID NO: 37847 - DNA, 2289 bp, synthetic construct
  source 1..2289: mol_type = other DNA
atggccttaccagtgaccgccttgctcctgccgctggccttgctgctccacgccgccaggccggaagttcagctgcttgagtctggcggaggactggttcaacctggcggaagcctgagactgtcttgtgccgccagcggcttcatcttcagcagctacgccatgagctgggtccgacaggctcctggaaagggccaagaatgggtttccggcgttagcggcacaggcgtgaacacctactacgccgatagcgtgaagggcagattcaccatcagccgggacaacagcaagaacaccctgtacctccagatgaacagcctgagagccgaggacaccgccgtgtactattgtgcctctggcaaaggctgggacagcggctcttggtacgaggactatagaggccagggcaccctggtcacagtttcttcaggtaccggcggaggcggatctggcggcggaggtagcggtggcggaggatctgaattcgacatccagttgacccagtcccccagctcactcagcgccagtgtgggggaccgggtgaccattacctgtaaagccagtcagagtgtggactatgacggggatagcttcctgaattggtatcagcagaagcctggcaaagccccaaagctgctgatctacgctgcatctaatctggagtcaggcgtgccttccaggttctccggtagtgggtctgggaccgatttcacattgaccatttcatccctccaacccgaggatttcgctacatattactgtcagcagtccaatgaggaccctctcacctttggccagggcaccaaagttgaaattaagagactcgaggacctgaagaacgtgttcccacctgaggtggccgtgttcgagcctagcgaggccgagatcagccacacccagaaagccaccctcgtgtgcctggctaccggcttctaccccgaccatgtggaactgtcttggtgggtcaacggcaaagaggtgcacagcggcgtgtgtaccgacccccagccactgaaagaacagcccgccctgaacgacagccggtactgcctgagcagcagactgagagtgtccgccaccttctggcagaacccccggaaccacttcagatgccaggtgcagttctacggcctgagcgagaacgacgagtggacccaggacagagccaagcccgtgacccagatcgtgtctgccgaagcctggggcagagccgattgcgacgtgaagctggtggaaaagagcttcgagacagacaccaacctgaacttccagaacctgagcgtgatcggcttcagaatcctgctgctgaaagtggccggctttaacctgctgatgaccctgcggctgtggtccagcagggccaagcgatctggatctggagcaacaaacttctcactactcaaacaagcaggtgacgtggaggagaatcccgggcctactagtatggactggatttggcgcatccttttccttgtcggcgctgctaccggcgcgcattccttcgaagaagtccaacttgtggagtctggagggggcctggtgcagcccggcggctctctcagactgtcttgtgcggcaagcggctacaccttcacctcttactggatagaatgggtgaggcaggcacctggaaagggactggagtggattggagagattctgccaggagggggagatacaaattacaatgaaatcttcaaggggcgggccaccttttcagcggataccagcaagaatacagcttacctgcagatgaatagcctccgggcagaagataccgctgtttattattgcacgagacgggtgccaataagactggactattgggggcaagggactcttgtcaccgtcagttcaacgcgtatccagaaccctgatcctgccgtgtaccagctgcgggatagcaagagcagcgacaagagcgtgtgtctgttcaccgacttcgacagccagaccaacgtgtcccagagcaaggactccgacgtgtacatcaccgataagtgcgtgctggacatgcggagcatggacttcaagagcaactccgccgtggcctggtccaacaagtccgatttcgcctgcgccaacgccttcaacaacagcattatccccgaggacacattcttcccaagccccgagagcagctgcggctttaccagcgagagctaccagcagggcgtgctgagcgccaccatcctgtacgagatcctgctgggcaaggccaccctgtacgccgtgctggtgtctgccctggtgctgatggctatggtcaagcggaaggacagccgggga

SEQ ID NO: 37848 - DNA, 2301 bp, synthetic construct
  source 1..2301: mol_type = other DNA
atggccttaccagtgaccgccttgctcctgccgctggccttgctgctccacgccgccaggccggaagttcagctgcttgagtctggcggaggactggttcaacctggcggaagcctgagactgtcttgtgccgccagcggcttcatcttcagcagctacgccatgagctgggtccgacaggctcctggaaagggccaagaatgggtttccggcgttagcggcacaggcgtgaacacctactacgccgatagcgtgaagggcagattcaccatcagccgggacaacagcaagaacaccctgtacctccagatgaacagcctgagagccgaggacaccgccgtgtactattgtgcctctggcaaaggctgggacagcggctcttggtacgaggactatagaggccagggcaccctggtcacagtttcttcaggtaccggcggaggcggatctggcggcggaggtagcggtggcggaggatctgaattcgacatccagttgacccagtcccccagctcactcagcgccagtgtgggggaccgggtgaccattacctgtaaagccagtcagagtgtggactatgacggggatagcttcctgaattggtatcagcagaagcctggcaaagccccaaagctgctgatctacgctgcatctaatctggagtcaggcgtgccttccaggttctccggtagtgggtctgggaccgatttcacattgaccatttcatccctccaacccgaggatttcgctacatattactgtcagcagtccaatgaggaccctctcacctttggccagggcaccaaagttgaaattaagagactcgagatccagaaccctgatcctgccgtgtaccagctgcgggatagcaagagcagcgacaagagcgtgtgtctgttcaccgacttcgacagccagaccaacgtgtcccagagcaaggactccgacgtgtacatcaccgataagtgcgtgctggacatgcggagcatggacttcaagagcaactccgccgtggcctggtccaacaagtccgatttcgcctgcgccaacgccttcaacaacagcattatccccgaggacacattcttcccaagccccgagagcagctgcggctttaccagcgagagctaccagcagggcgtgctgagcgccaccatcctgtacgagatcctgctgggcaaggccaccctgtacgccgtgctggtgtctgccctggtgctgatggctatggtcaagcggaaggacagccggggacgcgccaagagaagcggatctggcgtgaagcagaccctgaatttcgacctgctgaagctggctggcgacgtggaatccaacccaggccctactagtatggactggatttggcgcatccttttccttgtcggcgctgctaccggcgcgcattccttcgaagaagtccaacttgtggagtctggagggggcctggtgcagcccggcggctctctcagactgtcttgtgcggcaagcggctacaccttcacctcttactggatagaatgggtgaggcaggcacctggaaagggactggagtggattggagagattctgccaggagggggagatacaaattacaatgaaatcttcaaggggcgggccaccttttcagcggataccagcaagaatacagcttacctgcagatgaatagcctccgggcagaagataccgctgtttattattgcacgagacgggtgccaataagactggactattgggggcaagggactcttgtcaccgtcagttcaacgcgtgaggacctgaagaacgtgttcccacctgaggtggccgtgttcgagcctagcgaggccgagatcagccacacccagaaagccaccctcgtgtgcctggctaccggcttctaccccgaccatgtggaactgtcttggtgggtcaacggcaaagaggtgcacagcggcgtgtgtaccgacccccagccactgaaagaacagcccgccctgaacgacagccggtactgcctgagcagcagactgagagtgtccgccaccttctggcagaacccccggaaccacttcagatgccaggtgcagttctacggcctgagcgagaacgacgagtggacccaggacagagccaagcccgtgacccagatcgtgtctgccgaagcctggggcagagccgattgcgacgtgaagctggtggaaaagagcttcgagacagacaccaacctgaacttccagaacctgagcgtgatcggcttcagaatcctgctgctgaaagtggccggctttaacctgctgatgaccctgcggctgtggtccagc

SEQ ID NO: 37849 - DNA, 2193 bp, synthetic construct
  source 1..2193: mol_type = other DNA
atggccttaccagtgaccgccttgctcctgccgctggccttgctgctccacgccgccaggccgatgctgcccgctcctaagaatctggtggtgtccagaatcaccgaggacagcgccagactgtcttggacagctcctgatgccgccttcgacagcttccccatccggtacatcgagacactgatctggggcgaagccatctggctggatgtgcctggaagcgagagaagctacgacctgaccggactgaagcctggcacagagtatgccgtggtcatcaccggcgtgaaaggcggcagattctctagccctctggtggcctctttcaccaccggtaccggcggaggcggatctggcggcggaggtagcggtggcggaggatctgaattcgacatccagttgacccagtcccccagctcactcagcgccagtgtgggggaccgggtgaccattacctgtaaagccagtcagagtgtggactatgacggggatagcttcctgaattggtatcagcagaagcctggcaaagccccaaagctgctgatctacgctgcatctaatctggagtcaggcgtgccttccaggttctccggtagtgggtctgggaccgatttcacattgaccatttcatccctccaacccgaggatttcgctacatattactgtcagcagtccaatgaggaccctctcacctttggccagggcaccaaagttgaaattaagagactcgaggacctgaagaacgtgttcccacctgaggtggccgtgttcgagcctagcgaggccgagatcagccacacccagaaagccaccctcgtgtgcctggctaccggcttctaccccgaccatgtggaactgtcttggtgggtcaacggcaaagaggtgcacagcggcgtgtgtaccgacccccagccactgaaagaacagcccgccctgaacgacagccggtactgcctgagcagcagactgagagtgtccgccaccttctggcagaacccccggaaccacttcagatgccaggtgcagttctacggcctgagcgagaacgacgagtggacccaggacagagccaagcccgtgacccagatcgtgtctgccgaagcctggggcagagccgattgcgacgtgaagctggtggaaaagagcttcgagacagacaccaacctgaacttccagaacctgagcgtgatcggcttcagaatcctgctgctgaaagtggccggctttaacctgctgatgaccctgcggctgtggtccagcagggccaagcgatctggatctggagcaacaaacttctcactactcaaacaagcaggtgacgtggaggagaatcccgggcctactagtatggactggatttggcgcatccttttccttgtcggcgctgctaccggcgcgcattccttcgaagaagtccaacttgtggagtctggagggggcctggtgcagcccggcggctctctcagactgtcttgtgcggcaagcggctacaccttcacctcttactggatagaatgggtgaggcaggcacctggaaagggactggagtggattggagagattctgccaggagggggagatacaaattacaatgaaatcttcaaggggcgggccaccttttcagcggataccagcaagaatacagcttacctgcagatgaatagcctccgggcagaagataccgctgtttattattgcacgagacgggtgccaataagactggactattgggggcaagggactcttgtcaccgtcagttcaacgcgtatccagaaccctgatcctgccgtgtaccagctgcgggatagcaagagcagcgacaagagcgtgtgtctgttcaccgacttcgacagccagaccaacgtgtcccagagcaaggactccgacgtgtacatcaccgataagtgcgtgctggacatgcggagcatggacttcaagagcaactccgccgtggcctggtccaacaagtccgatttcgcctgcgccaacgccttcaacaacagcattatccccgaggacacattcttcccaagccccgagagcagctgcggctttaccagcgagagctaccagcagggcgtgctgagcgccaccatcctgtacgagatcctgctgggcaaggccaccctgtacgccgtgctggtgtctgccctggtgctgatggctatggtcaagcggaaggacagccgggga

SEQ ID NO: 37850 - DNA, 2205 bp, synthetic construct
  source 1..2205: mol_type = other DNA
atggccttaccagtgaccgccttgctcctgccgctggccttgctgctccacgccgccaggccgatgctgcccgctcctaagaatctggtggtgtccagaatcaccgaggacagcgccagactgtcttggacagctcctgatgccgccttcgacagcttccccatccggtacatcgagacactgatctggggcgaagccatctggctggatgtgcctggaagcgagagaagctacgacctgaccggactgaagcctggcacagagtatgccgtggtcatcaccggcgtgaaaggcggcagattctctagccctctggtggcctctttcaccaccggtaccggcggaggcggatctggcggcggaggtagcggtggcggaggatctgaattcgacatccagttgacccagtcccccagctcactcagcgccagtgtgggggaccgggtgaccattacctgtaaagccagtcagagtgtggactatgacggggatagcttcctgaattggtatcagcagaagcctggcaaagccccaaagctgctgatctacgctgcatctaatctggagtcaggcgtgccttccaggttctccggtagtgggtctgggaccgatttcacattgaccatttcatccctccaacccgaggatttcgctacatattactgtcagcagtccaatgaggaccctctcacctttggccagggcaccaaagttgaaattaagagactcgagatccagaaccctgatcctgccgtgtaccagctgcgggatagcaagagcagcgacaagagcgtgtgtctgttcaccgacttcgacagccagaccaacgtgtcccagagcaaggactccgacgtgtacatcaccgataagtgcgtgctggacatgcggagcatggacttcaagagcaactccgccgtggcctggtccaacaagtccgatttcgcctgcgccaacgccttcaacaacagcattatccccgaggacacattcttcccaagccccgagagcagctgcggctttaccagcgagagctaccagcagggcgtgctgagcgccaccatcctgtacgagatcctgctgggcaaggccaccctgtacgccgtgctggtgtctgccctggtgctgatggctatggtcaagcggaaggacagccggggacgcgccaagagaagcggatctggcgtgaagcagaccctgaatttcgacctgctgaagctggctggcgacgtggaatccaacccaggccctactagtatggactggatttggcgcatccttttccttgtcggcgctgctaccggcgcgcattccttcgaagaagtccaacttgtggagtctggagggggcctggtgcagcccggcggctctctcagactgtcttgtgcggcaagcggctacaccttcacctcttactggatagaatgggtgaggcaggcacctggaaagggactggagtggattggagagattctgccaggagggggagatacaaattacaatgaaatcttcaaggggcgggccaccttttcagcggataccagcaagaatacagcttacctgcagatgaatagcctccgggcagaagataccgctgtttattattgcacgagacgggtgccaataagactggactattgggggcaagggactcttgtcaccgtcagttcaacgcgtgaggacctgaagaacgtgttcccacctgaggtggccgtgttcgagcctagcgaggccgagatcagccacacccagaaagccaccctcgtgtgcctggctaccggcttctaccccgaccatgtggaactgtcttggtgggtcaacggcaaagaggtgcacagcggcgtgtgtaccgacccccagccactgaaagaacagcccgccctgaacgacagccggtactgcctgagcagcagactgagagtgtccgccaccttctggcagaacccccggaaccacttcagatgccaggtgcagttctacggcctgagcgagaacgacgagtggacccaggacagagccaagcccgtgacccagatcgtgtctgccgaagcctggggcagagccgattgcgacgtgaagctggtggaaaagagcttcgagacagacaccaacctgaacttccagaacctgagcgtgatcggcttcagaatcctgctgctgaaagtggccggctttaacctgctgatgaccctgcggctgtggtccagc

SEQ ID NO: 37851 - DNA, 2280 bp, synthetic construct
  source 1..2280: mol_type = other DNA
atggccttaccagtgaccgccttgctcctgccgctggccttgctgctccacgccgccaggccggaggtgcagctggttgaatctggcggaggactggttcagcctggcggatctctgagactgtcttgtgccgccagcggcttcaacatcaaggatacctgtatcggctgggttcgcagagcccctggcaaagaggaagaactggtcgccaaaatctgcaagtacagcggccacaccagatacgccgacagcgtgaagggcagattcaccatcagcgccgacaccagcaagaacaccgcctacctccagatgaacagcctgagagccgaggacaccgccgtgtactattgtgccgctgtgtccgtcagagatgggcactacaattactggggccagggcaccaccgtgaccgtttcttcaggtaccggcggaggcggatctggcggcggaggtagcggtggcggaggatctgaattcgacatccagttgacccagtcccccagctcactcagcgccagtgtgggggaccgggtgaccattacctgtaaagccagtcagagtgtggactatgacggggatagcttcctgaattggtatcagcagaagcctggcaaagccccaaagctgctgatctacgctgcatctaatctggagtcaggcgtgccttccaggttctccggtagtgggtctgggaccgatttcacattgaccatttcatccctccaacccgaggatttcgctacatattactgtcagcagtccaatgaggaccctctcacctttggccagggcaccaaagttgaaattaagagactcgaggacctgaagaacgtgttcccacctgaggtggccgtgttcgagcctagcgaggccgagatcagccacacccagaaagccaccctcgtgtgcctggctaccggcttctaccccgaccatgtggaactgtcttggtgggtcaacggcaaagaggtgcacagcggcgtgtgtaccgacccccagccactgaaagaacagcccgccctgaacgacagccggtactgcctgagcagcagactgagagtgtccgccaccttctggcagaacccccggaaccacttcagatgccaggtgcagttctacggcctgagcgagaacgacgagtggacccaggacagagccaagcccgtgacccagatcgtgtctgccgaagcctggggcagagccgattgcgacgtgaagctggtggaaaagagcttcgagacagacaccaacctgaacttccagaacctgagcgtgatcggcttcagaatcctgctgctgaaagtggccggctttaacctgctgatgaccctgcggctgtggtccagcagggccaagcgatctggatctggagcaacaaacttctcactactcaaacaagcaggtgacgtggaggagaatcccgggcctactagtatggactggatttggcgcatccttttccttgtcggcgctgctaccggcgcgcattccttcgaagaagtccaacttgtggagtctggagggggcctggtgcagcccggcggctctctcagactgtcttgtgcggcaagcggctacaccttcacctcttactggatagaatgggtgaggcaggcacctggaaagggactggagtggattggagagattctgccaggagggggagatacaaattacaatgaaatcttcaaggggcgggccaccttttcagcggataccagcaagaatacagcttacctgcagatgaatagcctccgggcagaagataccgctgtttattattgcacgagacgggtgccaataagactggactattgggggcaagggactcttgtcaccgtcagttcaacgcgtatccagaaccctgatcctgccgtgtaccagctgcgggatagcaagagcagcgacaagagcgtgtgtctgttcaccgacttcgacagccagaccaacgtgtcccagagcaaggactccgacgtgtacatcaccgataagtgcgtgctggacatgcggagcatggacttcaagagcaactccgccgtggcctggtccaacaagtccgatttcgcctgcgccaacgccttcaacaacagcattatccccgaggacacattcttcccaagccccgagagcagctgcggctttaccagcgagagctaccagcagggcgtgctgagcgccaccatcctgtacgagatcctgctgggcaaggccaccctgtacgccgtgctggtgtctgccctggtgctgatggctatggtcaagcggaaggacagccgggga

SEQ ID NO: 37852 - DNA, 2292 bp, synthetic construct
  source 1..2292: mol_type = other DNA
atggccttaccagtgaccgccttgctcctgccgctggccttgctgctccacgccgccaggccggaggtgcagctggttgaatctggcggaggactggttcagcctggcggatctctgagactgtcttgtgccgccagcggcttcaacatcaaggatacctgtatcggctgggttcgcagagcccctggcaaagaggaagaactggtcgccaaaatctgcaagtacagcggccacaccagatacgccgacagcgtgaagggcagattcaccatcagcgccgacaccagcaagaacaccgcctacctccagatgaacagcctgagagccgaggacaccgccgtgtactattgtgccgctgtgtccgtcagagatgggcactacaattactggggccagggcaccaccgtgaccgtttcttcaggtaccggcggaggcggatctggcggcggaggtagcggtggcggaggatctgaattcgacatccagttgacccagtcccccagctcactcagcgccagtgtgggggaccgggtgaccattacctgtaaagccagtcagagtgtggactatgacggggatagcttcctgaattggtatcagcagaagcctggcaaagccccaaagctgctgatctacgctgcatctaatctggagtcaggcgtgccttccaggttctccggtagtgggtctgggaccgatttcacattgaccatttcatccctccaacccgaggatttcgctacatattactgtcagcagtccaatgaggaccctctcacctttggccagggcaccaaagttgaaattaagagactcgagatccagaaccctgatcctgccgtgtaccagctgcgggatagcaagagcagcgacaagagcgtgtgtctgttcaccgacttcgacagccagaccaacgtgtcccagagcaaggactccgacgtgtacatcaccgataagtgcgtgctggacatgcggagcatggacttcaagagcaactccgccgtggcctggtccaacaagtccgatttcgcctgcgccaacgccttcaacaacagcattatccccgaggacacattcttcccaagccccgagagcagctgcggctttaccagcgagagctaccagcagggcgtgctgagcgccaccatcctgtacgagatcctgctgggcaaggccaccctgtacgccgtgctggtgtctgccctggtgctgatggctatggtcaagcggaaggacagccggggacgcgccaagagaagcggatctggcgtgaagcagaccctgaatttcgacctgctgaagctggctggcgacgtggaatccaacccaggccctactagtatggactggatttggcgcatccttttccttgtcggcgctgctaccggcgcgcattccttcgaagaagtccaacttgtggagtctggagggggcctggtgcagcccggcggctctctcagactgtcttgtgcggcaagcggctacaccttcacctcttactggatagaatgggtgaggcaggcacctggaaagggactggagtggattggagagattctgccaggagggggagatacaaattacaatgaaatcttcaaggggcgggccaccttttcagcggataccagcaagaatacagcttacctgcagatgaatagcctccgggcagaagataccgctgtttattattgcacgagacgggtgccaataagactggactattgggggcaagggactcttgtcaccgtcagttcaacgcgtgaggacctgaagaacgtgttcccacctgaggtggccgtgttcgagcctagcgaggccgagatcagccacacccagaaagccaccctcgtgtgcctggctaccggcttctaccccgaccatgtggaactgtcttggtgggtcaacggcaaagaggtgcacagcggcgtgtgtaccgacccccagccactgaaagaacagcccgccctgaacgacagccggtactgcctgagcagcagactgagagtgtccgccaccttctggcagaacccccggaaccacttcagatgccaggtgcagttctacggcctgagcgagaacgacgagtggacccaggacagagccaagcccgtgacccagatcgtgtctgccgaagcctggggcagagccgattgcgacgtgaagctggtggaaaagagcttcgagacagacaccaacctgaacttccagaacctgagcgtgatcggcttcagaatcctgctgctgaaagtggccggctttaacctgctgatgaccctgcggctgtggtccagc

SEQ ID NO: 37853 - DNA, 3396 bp, synthetic construct
  source 1..3396: mol_type = other DNA
atggccttaccagtgaccgccttgctcctgccgctggccttgctgctccacgccgccaggccggaagtgcagctggttgaatctggcggaggactggttcaggctggcggatctctgagactgtcttgtgccgccagcggcagaacctttagcatgggctggtttagacaggcccctggcaaagagagagagttcgtcgccgccatcacatactctggcggcagcccttactacgccgactctgtgaagggcagattcaccatcagccgggacaacgccaagaacaccgtgtacctccagatgaacagcctgaagcctgaggacaccgccgtgtactactgcgccgccaatccaacatacggcagcgactggaacgccgagaattggggccagggaacccaagtgacagtgtctagcggtaccggcggaggcggatctggcggcggaggtagcggtggcggaggatctgaattcgacatccagttgacccagtcccccagctcactcagcgccagtgtgggggaccgggtgaccattacctgtaaagccagtcagagtgtggactatgacggggatagcttcctgaattggtatcagcagaagcctggcaaagccccaaagctgctgatctacgctgcatctaatctggagtcaggcgtgccttccaggttctccggtagtgggtctgggaccgatttcacattgaccatttcatccctccaacccgaggatttcgctacatattactgtcagcagtccaatgaggaccctctcacctttggccagggcaccaaagttgaaattaagagactcgaggacctgaagaacgtgttcccacctgaggtggccgtgttcgagcctagcgaggccgagatcagccacacccagaaagccaccctcgtgtgcctggctaccggcttctaccccgaccatgtggaactgtcttggtgggtcaacggcaaagaggtgcacagcggcgtgtgtaccgacccccagccactgaaagaacagcccgccctgaacgacagccggtactgcctgagcagcagactgagagtgtccgccaccttctggcagaacccccggaaccacttcagatgccaggtgcagttctacggcctgagcgagaacgacgagtggacccaggacagagccaagcccgtgacccagatcgtgtctgccgaagcctggggcagagccgattgcgacgtgaagctggtggaaaagagcttcgagacagacaccaacctgaacttccagaacctgagcgtgatcggcttcagaatcctgctgctgaaagtggccggctttaacctgctgatgaccctgcggctgtggtccagcagggccaagcgatctggatctggagcaacaaacttctcactactcaaacaagcaggtgacgtggaggagaatcccgggcctactagtgccaccatggactggatttggcgcatccttttccttgtcggcgctgctaccggcgcccattccgggcccgaagtgcaactggttgaatccggtggcggcctggtgcaagcaggcggatctctcagacttagctgtgccgcctccggcagaaccttcacaatgggatggtttaggcaggctccagggaaagagagagagttcgtcgccgccatctctctgtctcccacactggcctactacgccgactctgtgaaaggccggttcaccatctccagagataatgccaagaacaccgtggtgctgcaaatgaactctctgaaacccgaggatacagccctgtactattgtgccgctgaccggaagtccgtgatgagcatcagacccgattactggggacagggcacacaagtcacagtgtcctctggatccggcggcggaggatctggcggaggcggatctgggggcggaggctctttcgaagaagtccaacttgtggagtctggagggggcctggtgcagcccggcggctctctcagactgtcttgtgcggcaagcggctacaccttcacctcttactggatagaatgggtgaggcaggcacctggaaagggactggagtggattggagagattctgccaggagggggagatacaaattacaatgaaatcttcaaggggcgggccaccttttcagcggataccagcaagaatacagcttacctgcagatgaatagcctccgggcagaagataccgctgtttattattgcacgagacgggtgccaataagactggactattgggggcaagggactcttgtcaccgtcagttcaacgcgtatccagaaccctgatcctgccgtgtaccagctgcgggatagcaagagcagcgacaagagcgtgtgtctgttcaccgacttcgacagccagaccaacgtgtcccagagcaaggactccgacgtgtacatcaccgataagtgcgtgctggacatgcggagcatggacttcaagagcaactccgccgtggcctggtccaacaagtccgatttcgcctgcgccaacgccttcaacaacagcattatccccgaggacacattcttcccaagccccgagagcagctgcggctttaccagcgagagctaccagcagggcgtgctgagcgccaccatcctgtacgagatcctgctgggcaaggccaccctgtacgccgtgctggtgtctgccctggtgctgatggctatggtcaagcggaaggacagccggggacgcgccaagagaagcggatctggcgtgaagcagaccctgaatttcgacctgctgaagctggctggcgacgtggaatccaacccaggcccttctagaggccatatgaccgagtacaagcccacggtgcgcctcgccacccgcgacgacgtccccagggccgtacgcaccctcgccgccgcgttcgccgactaccccgccacgcgccacaccgtcgatccggaccgccacatcgagcgggtcaccgagctgcaagaactcttcctcacgcgcgtcgggctcgacatcggcaaggtgtgggtcgcggacgacggcgccgcggtggcggtctggaccacgccggagagcgtcgaagcgggggcggtgttcgccgagatcggcccgcgcatggccgagttgagcggttcccggctggccgcgcagcaacagatggaaggcctcctggcgccgcaccggcccaaggagcccgcgtggttcctggccaccgtcggcgtctcgcccgaccaccagggcaagggtctgggcagcgccgtcgtgctccccggagtggaggcggccgagcgcgccggggtgcccgccttcctggagacctccgcgccccgcaacctccccttctacgagcggctcggcttcaccgtcaccgccgacgtcgaggtgcccgaaggaccgcgcacctggtgcatgacccgcaagcccggtgcctga

SEQ ID NO: 37854 - DNA, 2310 bp, synthetic construct
  source 1..2310: mol_type = other DNA
atggccttaccagtgaccgccttgctcctgccgctggccttgctgctccacgccgccaggccggaagtgcagctggttgaatctggcggaggactggttcagcctggcggatctctgagactgtcttgtgccgcctctggcttcgccagcgactactatatcatcggctggttcagacaggcccctggcaaagagagagagggcgtcagctgtatcagcagcagatacgccaacaccaactacgccgacagcgtgaagggcagattcaccatcagccgggacaacgccaagaacaccgtgtacctccagatgaacagcctgaagcctgaggacaccgccgtgtactactgtgccgccgacaccagaagatacacctgtcctgacattgccaccatgcaccggaacttcgattcttggggccagggcacactggtcaccgtttcttctggtaccggcggaggcggatctggcggcggaggtagcggtggcggaggatctgaattcgacatccagttgacccagtcccccagctcactcagcgccagtgtgggggaccgggtgaccattacctgtaaagccagtcagagtgtggactatgacggggatagcttcctgaattggtatcagcagaagcctggcaaagccccaaagctgctgatctacgctgcatctaatctggagtcaggcgtgccttccaggttctccggtagtgggtctgggaccgatttcacattgaccatttcatccctccaacccgaggatttcgctacatattactgtcagcagtccaatgaggaccctctcacctttggccagggcaccaaagttgaaattaagagactcgaggacctgaagaacgtgttcccacctgaggtggccgtgttcgagcctagcgaggccgagatcagccacacccagaaagccaccctcgtgtgcctggctaccggcttctaccccgaccatgtggaactgtcttggtgggtcaacggcaaagaggtgcacagcggcgtgtgtaccgacccccagccactgaaagaacagcccgccctgaacgacagccggtactgcctgagcagcagactgagagtgtccgccaccttctggcagaacccccggaaccacttcagatgccaggtgcagttctacggcctgagcgagaacgacgagtggacccaggacagagccaagcccgtgacccagatcgtgtctgccgaagcctggggcagagccgattgcgacgtgaagctggtggaaaagagcttcgagacagacaccaacctgaacttccagaacctgagcgtgatcggcttcagaatcctgctgctgaaagtggccggctttaacctgctgatgaccctgcggctgtggtccagcagggccaagcgatctggatctggagcaacaaacttctcactactcaaacaagcaggtgacgtggaggagaatcccgggcctactagtatggactggatttggcgcatccttttccttgtcggcgctgctaccggcgcgcattccttcgaagaagtccaacttgtggagtctggagggggcctggtgcagcccggcggctctctcagactgtcttgtgcggcaagcggctacaccttcacctcttactggatagaatgggtgaggcaggcacctggaaagggactggagtggattggagagattctgccaggagggggagatacaaattacaatgaaatcttcaaggggcgggccaccttttcagcggataccagcaagaatacagcttacctgcagatgaatagcctccgggcagaagataccgctgtttattattgcacgagacgggtgccaataagactggactattgggggcaagggactcttgtcaccgtcagttcaacgcgtatccagaaccctgatcctgccgtgtaccagctgcgggatagcaagagcagcgacaagagcgtgtgtctgttcaccgacttcgacagccagaccaacgtgtcccagagcaaggactccgacgtgtacatcaccgataagtgcgtgctggacatgcggagcatggacttcaagagcaactccgccgtggcctggtccaacaagtccgatttcgcctgcgccaacgccttcaacaacagcattatccccgaggacacattcttcccaagccccgagagcagctgcggctttaccagcgagagctaccagcagggcgtgctgagcgccaccatcctgtacgagatcctgctgggcaaggccaccctgtacgccgtgctggtgtctgccctggtgctgatggctatggtcaagcggaaggacagccggggataa

SEQ ID NO: 37855 - DNA, 2310 bp, synthetic construct
  source 1..2310: mol_type = other DNA
atggccttaccagtgaccgccttgctcctgccgctggccttgctgctccacgccgccaggccggaagtgcagctggttgaatctggcggaggactggttcagcctggcggatctctgagactgagctgtgaagccagcggcttcgccagcgacgattacatcatcggctggttcagacaggcccctggcaaagagagagagggcgtcagctgcatcagctctaagtacgccaacaccgtgtacaccgacagcgtgaagggcagattcagactgagcagaggcaccgccaagaataccgtgtacctccagatgagcgccctgaagcctgaggataccgccgtgtactactgcgctatggacagccgcagagtgacatgccctgagatcagcaccatgcaccggaacttcgattcttggggccagggcacactggtcacagtgtcatctggtaccggcggaggcggatctggcggcggaggtagcggtggcggaggatctgaattcgacatccagttgacccagtcccccagctcactcagcgccagtgtgggggaccgggtgaccattacctgtaaagccagtcagagtgtggactatgacggggatagcttcctgaattggtatcagcagaagcctggcaaagccccaaagctgctgatctacgctgcatctaatctggagtcaggcgtgccttccaggttctccggtagtgggtctgggaccgatttcacattgaccatttcatccctccaacccgaggatttcgctacatattactgtcagcagtccaatgaggaccctctcacctttggccagggcaccaaagttgaaattaagagactcgaggacctgaagaacgtgttcccacctgaggtggccgtgttcgagcctagcgaggccgagatcagccacacccagaaagccaccctcgtgtgcctggctaccggcttctaccccgaccatgtggaactgtcttggtgggtcaacggcaaagaggtgcacagcggcgtgtgtaccgacccccagccactgaaagaacagcccgccctgaacgacagccggtactgcctgagcagcagactgagagtgtccgccaccttctggcagaacccccggaaccacttcagatgccaggtgcagttctacggcctgagcgagaacgacgagtggacccaggacagagccaagcccgtgacccagatcgtgtctgccgaagcctggggcagagccgattgcgacgtgaagctggtggaaaagagcttcgagacagacaccaacctgaacttccagaacctgagcgtgatcggcttcagaatcctgctgctgaaagtggccggctttaacctgctgatgaccctgcggctgtggtccagcagggccaagcgatctggatctggagcaacaaacttctcactactcaaacaagcaggtgacgtggaggagaatcccgggcctactagtatggactggatttggcgcatccttttccttgtcggcgctgctaccggcgcgcattccttcgaagaagtccaacttgtggagtctggagggggcctggtgcagcccggcggctctctcagactgtcttgtgcggcaagcggctacaccttcacctcttactggatagaatgggtgaggcaggcacctggaaagggactggagtggattggagagattctgccaggagggggagatacaaattacaatgaaatcttcaaggggcgggccaccttttcagcggataccagcaagaatacagcttacctgcagatgaatagcctccgggcagaagataccgctgtttattattgcacgagacgggtgccaataagactggactattgggggcaagggactcttgtcaccgtcagttcaacgcgtatccagaaccctgatcctgccgtgtaccagctgcgggatagcaagagcagcgacaagagcgtgtgtctgttcaccgacttcgacagccagaccaacgtgtcccagagcaaggactccgacgtgtacatcaccgataagtgcgtgctggacatgcggagcatggacttcaagagcaactccgccgtggcctggtccaacaagtccgatttcgcctgcgccaacgccttcaacaacagcattatccccgaggacacattcttcccaagccccgagagcagctgcggctttaccagcgagagctaccagcagggcgtgctgagcgccaccatcctgtacgagatcctgctgggcaaggccaccctgtacgccgtgctggtgtctgccctggtgctgatggctatggtcaagcggaaggacagccggggataa

SEQ ID NO: 37856 - DNA, 2307 bp, synthetic construct
  source 1..2307: mol_type = other DNA
atggccttaccagtgaccgccttgctcctgccgctggccttgctgctccacgccgccaggccggaagtgcagctggttgaatctggcggaggactggttcagcctggcggatctctgagactgtcttgtgccgcctctggcttcgccagcgactactatatcatcggctggttcagacaggcccctggcaaagagagagagggcgtcagctgtatcagcagcagatacgccaacaccaactacgccgacagcgtgaagggcagattcaccatcagccgggacaacgccaagaacaccgtgtacctccagatgaacagcctgaagcctgaggacaccgccgtgtactactgtgccgccgacaccagaagatacacctgtcctgacattgccaccatgcaccggaacttcgattcttggggccagggcacactggtcaccgtttcttctggtaccggcggaggcggatctggcggcggaggtagcggtggcggaggatctgaattcgacatccagttgacccagtcccccagctcactcagcgccagtgtgggggaccgggtgaccattacctgtaaagccagtcagagtgtggactatgacggggatagcttcctgaattggtatcagcagaagcctggcaaagccccaaagctgctgatctacgctgcatctaatctggagtcaggcgtgccttccaggttctccggtagtgggtctgggaccgatttcacattgaccatttcatccctccaacccgaggatttcgctacatattactgtcagcagtccaatgaggaccctctcacctttggccagggcaccaaagttgaaattaagagactcgagatccagaaccctgatcctgccgtgtaccagctgcgggatagcaagagcagcgacaagagcgtgtgtctgttcaccgacttcgacagccagaccaacgtgtcccagagcaaggactccgacgtgtacatcaccgataagtgcgtgctggacatgcggagcatggacttcaagagcaactccgccgtggcctggtccaacaagtccgatttcgcctgcgccaacgccttcaacaacagcattatccccgaggacacattcttcccaagccccgagagcagctgcggctttaccagcgagagctaccagcagggcgtgctgagcgccaccatcctgtacgagatcctgctgggcaaggccaccctgtacgccgtgctggtgtctgccctggtgctgatggctatggtcaagcggaaggacagccggggaagggccaagcgatctggatctggagcaacaaacttctcactactcaaacaagcaggtgacgtggaggagaatcccgggcctactagtatggactggatttggcgcatccttttccttgtcggcgctgctaccggcgcgcattccttcgaagaagtccaacttgtggagtctggagggggcctggtgcagcccggcggctctctcagactgtcttgtgcggcaagcggctacaccttcacctcttactggatagaatgggtgaggcaggcacctggaaagggactggagtggattggagagattctgccaggagggggagatacaaattacaatgaaatcttcaaggggcgggccaccttttcagcggataccagcaagaatacagcttacctgcagatgaatagcctccgggcagaagataccgctgtttattattgcacgagacgggtgccaataagactggactattgggggcaagggactcttgtcaccgtcagttcaacgcgtgacctgaagaacgtgttcccacctgaggtggccgtgttcgagcctagcgaggccgagatcagccacacccagaaagccaccctcgtgtgcctggctaccggcttctaccccgaccatgtggaactgtcttggtgggtcaacggcaaagaggtgcacagcggcgtgtgtaccgacccccagccactgaaagaacagcccgccctgaacgacagccggtactgcctgagcagcagactgagagtgtccgccaccttctggcagaacccccggaaccacttcagatgccaggtgcagttctacggcctgagcgagaacgacgagtggacccaggacagagccaagcccgtgacccagatcgtgtctgccgaagcctggggcagagccgattgcgacgtgaagctggtggaaaagagcttcgagacagacaccaacctgaacttccagaacctgagcgtgatcggcttcagaatcctgctgctgaaagtggccggctttaacctgctgatgaccctgcggctgtggtccagc

SEQ ID NO: 37857 - DNA, 2307 bp, synthetic construct
  source 1..2307: mol_type = other DNA
atggccttaccagtgaccgccttgctcctgccgctggccttgctgctccacgccgccaggccggaagtgcagctggttgaatctggcggaggactggttcagcctggcggatctctgagactgagctgtgaagccagcggcttcgccagcgacgattacatcatcggctggttcagacaggcccctggcaaagagagagagggcgtcagctgcatcagctctaagtacgccaacaccgtgtacaccgacagcgtgaagggcagattcagactgagcagaggcaccgccaagaataccgtgtacctccagatgagcgccctgaagcctgaggataccgccgtgtactactgcgctatggacagccgcagagtgacatgccctgagatcagcaccatgcaccggaacttcgattcttggggccagggcacactggtcacagtgtcatctggtaccggcggaggcggatctggcggcggaggtagcggtggcggaggatctgaattcgacatccagttgacccagtcccccagctcactcagcgccagtgtgggggaccgggtgaccattacctgtaaagccagtcagagtgtggactatgacggggatagcttcctgaattggtatcagcagaagcctggcaaagccccaaagctgctgatctacgctgcatctaatctggagtcaggcgtgccttccaggttctccggtagtgggtctgggaccgatttcacattgaccatttcatccctccaacccgaggatttcgctacatattactgtcagcagtccaatgaggaccctctcacctttggccagggcaccaaagttgaaattaagagactcgagatccagaaccctgatcctgccgtgtaccagctgcgggatagcaagagcagcgacaagagcgtgtgtctgttcaccgacttcgacagccagaccaacgtgtcccagagcaaggactccgacgtgtacatcaccgataagtgcgtgctggacatgcggagcatggacttcaagagcaactccgccgtggcctggtccaacaagtccgatttcgcctgcgccaacgccttcaacaacagcattatccccgaggacacattcttcccaagccccgagagcagctgcggctttaccagcgagagctaccagcagggcgtgctgagcgccaccatcctgtacgagatcctgctgggcaaggccaccctgtacgccgtgctggtgtctgccctggtgctgatggctatggtcaagcggaaggacagccggggaagggccaagcgatctggatctggagcaacaaacttctcactactcaaacaagcaggtgacgtggaggagaatcccgggcctactagtatggactggatttggcgcatccttttccttgtcggcgctgctaccggcgcgcattccttcgaagaagtccaacttgtggagtctggagggggcctggtgcagcccggcggctctctcagactgtcttgtgcggcaagcggctacaccttcacctcttactggatagaatgggtgaggcaggcacctggaaagggactggagtggattggagagattctgccaggagggggagatacaaattacaatgaaatcttcaaggggcgggccaccttttcagcggataccagcaagaatacagcttacctgcagatgaatagcctccgggcagaagataccgctgtttattattgcacgagacgggtgccaataagactggactattgggggcaagggactcttgtcaccgtcagttcaacgcgtgacctgaagaacgtgttcccacctgaggtggccgtgttcgagcctagcgaggccgagatcagccacacccagaaagccaccctcgtgtgcctggctaccggcttctaccccgaccatgtggaactgtcttggtgggtcaacggcaaagaggtgcacagcggcgtgtgtaccgacccccagccactgaaagaacagcccgccctgaacgacagccggtactgcctgagcagcagactgagagtgtccgccaccttctggcagaacccccggaaccacttcagatgccaggtgcagttctacggcctgagcgagaacgacgagtggacccaggacagagccaagcccgtgacccagatcgtgtctgccgaagcctggggcagagccgattgcgacgtgaagctggtggaaaagagcttcgagacagacaccaacctgaacttccagaacctgagcgtgatcggcttcagaatcctgctgctgaaagtggccggctttaacctgctgatgaccctgcggctgtggtccagc

SEQ ID NO: 37858 - DNA, 2280 bp, synthetic construct
  source 1..2280: mol_type = other DNA
atggccttaccagtgaccgccttgctcctgccgctggccttgctgctccacgccgccaggccgcaagtcaaactggaagaaagcggtggcggcctggtgcaacctggcgaatctctgagactgagctgtagcgccagcggctccatcttcaaggtgttcagagtgttcgccatgagctggtacaggcaaggccctggcaagcagagagagctggtcgcctctatcagcagcggcgagacaaccacatacgccgaatctgtgaaaggccggttcaccatcagccgggataatgccaagaataccgcctatctccagatggactccctgaagcctgaagatacagctgtgtactactgcaacgccgaccataccttcaccggcgatttttggggccagggaacccaagtgaccgtgtctagtggtaccggcggaggcggatctggcggcggaggtagcggtggcggaggatctgaattcgacatccagttgacccagtcccccagctcactcagcgccagtgtgggggaccgggtgaccattacctgtaaagccagtcagagtgtggactatgacggggatagcttcctgaattggtatcagcagaagcctggcaaagccccaaagctgctgatctacgctgcatctaatctggagtcaggcgtgccttccaggttctccggtagtgggtctgggaccgatttcacattgaccatttcatccctccaacccgaggatttcgctacatattactgtcagcagtccaatgaggaccctctcacctttggccagggcaccaaagttgaaattaagagactcgagatccagaaccctgatcctgccgtgtaccagctgcgggatagcaagagcagcgacaagagcgtgtgtctgttcaccgacttcgacagccagaccaacgtgtcccagagcaaggactccgacgtgtacatcaccgataagtgcgtgctggacatgcggagcatggacttcaagagcaactccgccgtggcctggtccaacaagtccgatttcgcctgcgccaacgccttcaacaacagcattatccccgaggacacattcttcccaagccccgagagcagctgcggctttaccagcgagagctaccagcagggcgtgctgagcgccaccatcctgtacgagatcctgctgggcaaggccaccctgtacgccgtgctggtgtctgccctggtgctgatggctatggtcaagcggaaggacagccggggaagggccaagcgatctggatctggagcaacaaacttctcactactcaaacaagcaggtgacgtggaggagaatcccgggcctactagtatggactggatttggcgcatccttttccttgtcggcgctgctaccggcgcgcattccttcgaagaagtccaacttgtggagtctggagggggcctggtgcagcccggcggctctctcagactgtcttgtgcggcaagcggctacaccttcacctcttactggatagaatgggtgaggcaggcacctggaaagggactggagtggattggagagattctgccaggagggggagatacaaattacaatgaaatcttcaaggggcgggccaccttttcagcggataccagcaagaatacagcttacctgcagatgaatagcctccgggcagaagataccgctgtttattattgcacgagacgggtgccaataagactggactattgggggcaagggactcttgtcaccgtcagttcaacgcgtgacctgaagaacgtgttcccacctgaggtggccgtgttcgagcctagcgaggccgagatcagccacacccagaaagccaccctcgtgtgcctggctaccggcttctaccccgaccatgtggaactgtcttggtgggtcaacggcaaagaggtgcacagcggcgtgtgtaccgacccccagccactgaaagaacagcccgccctgaacgacagccggtactgcctgagcagcagactgagagtgtccgccaccttctggcagaacccccggaaccacttcagatgccaggtgcagttctacggcctgagcgagaacgacgagtggacccaggacagagccaagcccgtgacccagatcgtgtctgccgaagcctggggcagagccgattgcgacgtgaagctggtggaaaagagcttcgagacagacaccaacctgaacttccagaacctgagcgtgatcggcttcagaatcctgctgctgaaagtggccggctttaacctgctgatgaccctgcggctgtggtccagc

SEQ ID NO: 37859 - DNA, 2286 bp, synthetic construct
  source 1..2286: mol_type = other DNA
atggccttaccagtgaccgccttgctcctgccgctggccttgctgctccacgccgccaggccggacatccagttgacccagtcccccagctcactcagcgccagtgtgggggaccgggtgaccattacctgtaaagccagtcagagtgtggactatgacggggatagcttcctgaattggtatcagcagaagcctggcaaagccccaaagctgctgatctacgctgcatctaatctggagtcaggcgtgccttccaggttctccggtagtgggtctgggaccgatttcacattgaccatttcatccctccaacccgaggatttcgctacatattactgtcagcagtccaatgaggaccctctcacctttggccagggcaccaaagttgaaattaagagactcgaggacctgaagaacgtgttcccacctgaggtggccgtgttcgagcctagcgaggccgagatcagccacacccagaaagccaccctcgtgtgcctggctaccggcttctaccccgaccatgtggaactgtcttggtgggtcaacggcaaagaggtgcacagcggcgtgtgtaccgacccccagccactgaaagaacagcccgccctgaacgacagccggtactgcctgagcagcagactgagagtgtccgccaccttctggcagaacccccggaaccacttcagatgccaggtgcagttctacggcctgagcgagaacgacgagtggacccaggacagagccaagcccgtgacccagatcgtgtctgccgaagcctggggcagagccgattgcgacgtgaagctggtggaaaagagcttcgagacagacaccaacctgaacttccagaacctgagcgtgatcggcttcagaatcctgctgctgaaagtggccggctttaacctgctgatgaccctgcggctgtggtccagcagggccaagcgatctggatctggagcaacaaacttctcactactcaaacaagcaggtgacgtggaggagaatcccgggcctactagtgccaccatggactggatttggcgcatccttttccttgtcggcgctgctaccggcgcccattccgggcccgaagtgcagctggttgaatctggcggaggactggttcaggctggcggatctctgagactgtcttgtgccgccagcggcagaacctttagcatgggctggtttagacaggcccctggcaaagagagagagttcgtcgccgccatcacatactctggcggcagcccttactacgccgactctgtgaagggcagattcaccatcagccgggacaacgccaagaacaccgtgtacctccagatgaacagcctgaagcctgaggacaccgccgtgtactactgcgccgccaatccaacatacggcagcgactggaacgccgagaattggggccagggaacccaagtgacagtgtctagcggatccggcggcggaggatctggcggaggcggatctgggggcggaggctctttcgaagaagtccaacttgtggagtctggagggggcctggtgcagcccggcggctctctcagactgtcttgtgcggcaagcggctacaccttcacctcttactggatagaatgggtgaggcaggcacctggaaagggactggagtggattggagagattctgccaggagggggagatacaaattacaatgaaatcttcaaggggcgggccaccttttcagcggataccagcaagaatacagcttacctgcagatgaatagcctccgggcagaagataccgctgtttattattgcacgagacgggtgccaataagactggactattgggggcaagggactcttgtcaccgtcagttcaacgcgtatccagaaccctgatcctgccgtgtaccagctgcgggatagcaagagcagcgacaagagcgtgtgtctgttcaccgacttcgacagccagaccaacgtgtcccagagcaaggactccgacgtgtacatcaccgataagtgcgtgctggacatgcggagcatggacttcaagagcaactccgccgtggcctggtccaacaagtccgatttcgcctgcgccaacgccttcaacaacagcattatccccgaggacacattcttcccaagccccgagagcagctgcggctttaccagcgagagctaccagcagggcgtgctgagcgccaccatcctgtacgagatcctgctgggcaaggccaccctgtacgccgtgctggtgtctgccctggtgctgatggctatggtcaagcggaaggacagccggggataa

SEQ ID NO: 37860 - DNA, 2289 bp, synthetic construct
  source 1..2289: mol_type = other DNA
atggccttaccagtgaccgccttgctcctgccgctggccttgctgctccacgccgccaggccggacatccagttgacccagtcccccagctcactcagcgccagtgtgggggaccgggtgaccattacctgtaaagccagtcagagtgtggactatgacggggatagcttcctgaattggtatcagcagaagcctggcaaagccccaaagctgctgatctacgctgcatctaatctggagtcaggcgtgccttccaggttctccggtagtgggtctgggaccgatttcacattgaccatttcatccctccaacccgaggatttcgctacatattactgtcagcagtccaatgaggaccctctcacctttggccagggcaccaaagttgaaattaagagactcgaggacctgaagaacgtgttcccacctgaggtggccgtgttcgagcctagcgaggccgagatcagccacacccagaaagccaccctcgtgtgcctggctaccggcttctaccccgaccatgtggaactgtcttggtgggtcaacggcaaagaggtgcacagcggcgtgtgtaccgacccccagccactgaaagaacagcccgccctgaacgacagccggtactgcctgagcagcagactgagagtgtccgccaccttctggcagaacccccggaaccacttcagatgccaggtgcagttctacggcctgagcgagaacgacgagtggacccaggacagagccaagcccgtgacccagatcgtgtctgccgaagcctggggcagagccgattgcgacgtgaagctggtggaaaagagcttcgagacagacaccaacctgaacttccagaacctgagcgtgatcggcttcagaatcctgctgctgaaagtggccggctttaacctgctgatgaccctgcggctgtggtccagcagggccaagcgatctggatctggagcaacaaacttctcactactcaaacaagcaggtgacgtggaggagaatcccgggcctactagtgccaccatggactggatttggcgcatccttttccttgtcggcgctgctaccggcgcccattccgggcccgaagtgcaactggtggaatctgggggcggactggtgcagccaggcggaagtctgaggctgtcttgtgccgcctccggcagcatcttcggcttcaacgacatggcctggtatcggcaggctcccggaaaacagcgcgagctggtggctctgattagcagagtgggcgtgaccagcagcgccgactctgtgaagggcagattcacaatctccagagtgaacgccaaggatacagtgtacctccagatgaactctctgaaacctgaggatacagcagtgtactattgctacatggaccagcggctggacggcagcacactggcctactggggacagggaactcaagtgacagtgtctagcggatccggcggcggaggatctggcggaggcggatctgggggcggaggctctttcgaagaagtccaacttgtggagtctggagggggcctggtgcagcccggcggctctctcagactgtcttgtgcggcaagcggctacaccttcacctcttactggatagaatgggtgaggcaggcacctggaaagggactggagtggattggagagattctgccaggagggggagatacaaattacaatgaaatcttcaaggggcgggccaccttttcagcggataccagcaagaatacagcttacctgcagatgaatagcctccgggcagaagataccgctgtttattattgcacgagacgggtgccaataagactggactattgggggcaagggactcttgtcaccgtcagttcaacgcgtatccagaaccctgatcctgccgtgtaccagctgcgggatagcaagagcagcgacaagagcgtgtgtctgttcaccgacttcgacagccagaccaacgtgtcccagagcaaggactccgacgtgtacatcaccgataagtgcgtgctggacatgcggagcatggacttcaagagcaactccgccgtggcctggtccaacaagtccgatttcgcctgcgccaacgccttcaacaacagcattatccccgaggacacattcttcccaagccccgagagcagctgcggctttaccagcgagagctaccagcagggcgtgctgagcgccaccatcctgtacgagatcctgctgggcaaggccaccctgtacgccgtgctggtgtctgccctggtgctgatggctatggtcaagcggaaggacagccggggataa

SEQ ID NO: 37861 - DNA, 2277 bp, synthetic construct
  source 1..2277: mol_type = other DNA
atggccttaccagtgaccgccttgctcctgccgctggccttgctgctccacgccgccaggccggacatccagttgacccagtcccccagctcactcagcgccagtgtgggggaccgggtgaccattacctgtaaagccagtcagagtgtggactatgacggggatagcttcctgaattggtatcagcagaagcctggcaaagccccaaagctgctgatctacgctgcatctaatctggagtcaggcgtgccttccaggttctccggtagtgggtctgggaccgatttcacattgaccatttcatccctccaacccgaggatttcgctacatattactgtcagcagtccaatgaggaccctctcacctttggccagggcaccaaagttgaaattaagagactcgaggacctgaagaacgtgttcccacctgaggtggccgtgttcgagcctagcgaggccgagatcagccacacccagaaagccaccctcgtgtgcctggctaccggcttctaccccgaccatgtggaactgtcttggtgggtcaacggcaaagaggtgcacagcggcgtgtgtaccgacccccagccactgaaagaacagcccgccctgaacgacagccggtactgcctgagcagcagactgagagtgtccgccaccttctggcagaacccccggaaccacttcagatgccaggtgcagttctacggcctgagcgagaacgacgagtggacccaggacagagccaagcccgtgacccagatcgtgtctgccgaagcctggggcagagccgattgcgacgtgaagctggtggaaaagagcttcgagacagacaccaacctgaacttccagaacctgagcgtgatcggcttcagaatcctgctgctgaaagtggccggctttaacctgctgatgaccctgcggctgtggtccagcagggccaagcgatctggatctggagcaacaaacttctcactactcaaacaagcaggtgacgtggaggagaatcccgggcctactagtgccaccatggactggatttggcgcatccttttccttgtcggcgctgctaccggcgcccattccgggcccgaggtgcagctggttgaatctggcggaggactggttcaggctggcggatctctgagactgtcttgtgccgccagcggctctgtgttcagcggcaatgtgatgggctggtacagacaggcccctggcaaagaaagagagtgggttgccgccattgccagcggcggcagcatctactacagagactctgtgaagggcagattcaccatcagccgggacaacgccaagaacaccgtgtacctccagatgaacagcctgaagcctgaggacaccgccgtgtactactgcaactctcaccctcctacactgccctattggggcctgggaacccaagtgacagtgtcctctggatccggcggcggaggatctggcggaggcggatctgggggcggaggctctttcgaagaagtccaacttgtggagtctggagggggcctggtgcagcccggcggctctctcagactgtcttgtgcggcaagcggctacaccttcacctcttactggatagaatgggtgaggcaggcacctggaaagggactggagtggattggagagattctgccaggagggggagatacaaattacaatgaaatcttcaaggggcgggccaccttttcagcggataccagcaagaatacagcttacctgcagatgaatagcctccgggcagaagataccgctgtttattattgcacgagacgggtgccaataagactggactattgggggcaagggactcttgtcaccgtcagttcaacgcgtatccagaaccctgatcctgccgtgtaccagctgcgggatagcaagagcagcgacaagagcgtgtgtctgttcaccgacttcgacagccagaccaacgtgtcccagagcaaggactccgacgtgtacatcaccgataagtgcgtgctggacatgcggagcatggacttcaagagcaactccgccgtggcctggtccaacaagtccgatttcgcctgcgccaacgccttcaacaacagcattatccccgaggacacattcttcccaagccccgagagcagctgcggctttaccagcgagagctaccagcagggcgtgctgagcgccaccatcctgtacgagatcctgctgggcaaggccaccctgtacgccgtgctggtgtctgccctggtgctgatggctatggtcaagcggaaggacagccggggataa

SEQ ID NO: 37862 - DNA, 2271 bp, synthetic construct
  source 1..2271: mol_type = other DNA
atggccttaccagtgaccgccttgctcctgccgctggccttgctgctccacgccgccaggccggacatccagttgacccagtcccccagctcactcagcgccagtgtgggggaccgggtgaccattacctgtaaagccagtcagagtgtggactatgacggggatagcttcctgaattggtatcagcagaagcctggcaaagccccaaagctgctgatctacgctgcatctaatctggagtcaggcgtgccttccaggttctccggtagtgggtctgggaccgatttcacattgaccatttcatccctccaacccgaggatttcgctacatattactgtcagcagtccaatgaggaccctctcacctttggccagggcaccaaagttgaaattaagagactcgaggacctgaagaacgtgttcccacctgaggtggccgtgttcgagcctagcgaggccgagatcagccacacccagaaagccaccctcgtgtgcctggctaccggcttctaccccgaccatgtggaactgtcttggtgggtcaacggcaaagaggtgcacagcggcgtgtgtaccgacccccagccactgaaagaacagcccgccctgaacgacagccggtactgcctgagcagcagactgagagtgtccgccaccttctggcagaacccccggaaccacttcagatgccaggtgcagttctacggcctgagcgagaacgacgagtggacccaggacagagccaagcccgtgacccagatcgtgtctgccgaagcctggggcagagccgattgcgacgtgaagctggtggaaaagagcttcgagacagacaccaacctgaacttccagaacctgagcgtgatcggcttcagaatcctgctgctgaaagtggccggctttaacctgctgatgaccctgcggctgtggtccagcagggccaagcgatctggatctggagcaacaaacttctcactactcaaacaagcaggtgacgtggaggagaatcccgggcctactagtgccaccatggactggatttggcgcatccttttccttgtcggcgctgctaccggcgcccattccgggcccgaagttcagctgctggaatctggcggaggactcgttcaacctggcggctctctgagactgagctgtgccgcttctggcttcagcttctctagctacgccctgagctgggttcgacaagctcccggaaagggccttgaatgggtgtccagcatcggcgagaatgacggcaccacagactatgccgatgccgtgaaaggccggtttaccatcagcagagacaattccaagaacacgctctatctgcaaatgaactccctgcgcgtggaagatacagccgtgtattattgcgtgaaggacggcatccactggggacagggaaccctggttacagtgtctagcggatccggcggcggaggatctggcggaggcggatctgggggcggaggctctttcgaagaagtccaacttgtggagtctggagggggcctggtgcagcccggcggctctctcagactgtcttgtgcggcaagcggctacaccttcacctcttactggatagaatgggtgaggcaggcacctggaaagggactggagtggattggagagattctgccaggagggggagatacaaattacaatgaaatcttcaaggggcgggccaccttttcagcggataccagcaagaatacagcttacctgcagatgaatagcctccgggcagaagataccgctgtttattattgcacgagacgggtgccaataagactggactattgggggcaagggactcttgtcaccgtcagttcaacgcgtatccagaaccctgatcctgccgtgtaccagctgcgggatagcaagagcagcgacaagagcgtgtgtctgttcaccgacttcgacagccagaccaacgtgtcccagagcaaggactccgacgtgtacatcaccgataagtgcgtgctggacatgcggagcatggacttcaagagcaactccgccgtggcctggtccaacaagtccgatttcgcctgcgccaacgccttcaacaacagcattatccccgaggacacattcttcccaagccccgagagcagctgcggctttaccagcgagagctaccagcagggcgtgctgagcgccaccatcctgtacgagatcctgctgggcaaggccaccctgtacgccgtgctggtgtctgccctggtgctgatggctatggtcaagcggaaggacagccggggataa

SEQ ID NO: 37863 - DNA, 3378 bp, synthetic construct
  source 1..3378: mol_type = other DNA
atgggacccagactgctgttttgggctctgctgtgtctgctcggcacaggacctgttgaagctggcgtgacacagagccccacacacctgattaagaccagaggccagcaggccacactgagatgcagccctatcagcggccacaccagcgtgtactggtatcagcaggctctcggactgggcctccagttcctgctttggtacgacgagggcgaagagagaaaccggggcaacttccctcctcggttttccggcagacagttccccaactacagcagcgagctgaacgtgaacgccctggaactggaagatagcgccctgtacctgtgtgcctcttctcttggtggacctcgcggactggctggactgagaggggatgagcagtttttcggccctggcaccagactgaccgtgctggaaggtaccggcggaggcggatctggcggcggagaattcgacatccagttgacccagtcccccagctcactcagcgccagtgtgggggaccgggtgaccattacctgtaaagccagtcagagtgtggactatgacggggatagcttcctgaattggtatcagcagaagcctggcaaagccccaaagctgctgatctacgctgcatctaatctggagtcaggcgtgccttccaggttctccggtagtgggtctgggaccgatttcacattgaccatttcatccctccaacccgaggatttcgctacatattactgtcagcagtccaatgaggaccctctcacctttggccagggcaccaaagttgaaattaagagactcgaggacctgaagaacgtgttcccacctgaggtggccgtgttcgagcctagcgaggccgagatcagccacacccagaaagccaccctcgtgtgcctggctaccggcttctaccccgaccatgtggaactgtcttggtgggtcaacggcaaagaggtgcacagcggcgtgtgtaccgacccccagccactgaaagaacagcccgccctgaacgacagccggtactgcctgagcagcagactgagagtgtccgccaccttctggcagaacccccggaaccacttcagatgccaggtgcagttctacggcctgagcgagaacgacgagtggacccaggacagagccaagcccgtgacccagatcgtgtctgccgaagcctggggcagagccgattgcgacgtgaagctggtggaaaagagcttcgagacagacaccaacctgaacttccagaacctgagcgtgatcggcttcagaatcctgctgctgaaagtggccggctttaacctgctgatgaccctgcggctgtggtccagcagggccaagcgatctggatctggagcaacaaacttctcactactcaaacaagcaggtgacgtggaggagaatcccgggcctactagtgccaccatggactggatttggcgcatccttttccttgtcggcgctgctaccggcgcccattccgggcccgaagtgcagctggttgaatctggcggaggactggttcaggctggcggatctctgagactgtcttgtgccgccagcggcagaacctttagcatgggctggtttagacaggcccctggcaaagagagagagttcgtcgccgccatcacatactctggcggcagcccttactacgccgactctgtgaagggcagattcaccatcagccgggacaacgccaagaacaccgtgtacctccagatgaacagcctgaagcctgaggacaccgccgtgtactactgcgccgccaatccaacatacggcagcgactggaacgccgagaattggggccagggaacccaagtgacagtgtctagcggatccggcggcggaggatctggcggaggcggatctgggggcggaggctctttcgaagaagtccaacttgtggagtctggagggggcctggtgcagcccggcggctctctcagactgtcttgtgcggcaagcggctacaccttcacctcttactggatagaatgggtgaggcaggcacctggaaagggactggagtggattggagagattctgccaggagggggagatacaaattacaatgaaatcttcaaggggcgggccaccttttcagcggataccagcaagaatacagcttacctgcagatgaatagcctccgggcagaagataccgctgtttattattgcacgagacgggtgccaataagactggactattgggggcaagggactcttgtcaccgtcagttcaacgcgtatccagaaccctgatcctgccgtgtaccagctgcgggatagcaagagcagcgacaagagcgtgtgtctgttcaccgacttcgacagccagaccaacgtgtcccagagcaaggactccgacgtgtacatcaccgataagtgcgtgctggacatgcggagcatggacttcaagagcaactccgccgtggcctggtccaacaagtccgatttcgcctgcgccaacgccttcaacaacagcattatccccgaggacacattcttcccaagccccgagagcagctgcggctttaccagcgagagctaccagcagggcgtgctgagcgccaccatcctgtacgagatcctgctgggcaaggccaccctgtacgccgtgctggtgtctgccctggtgctgatggctatggtcaagcggaaggacagccggggacgcgccaagagaagcggatctggcgtgaagcagaccctgaatttcgacctgctgaagctggctggcgacgtggaatccaacccaggcccttctagaggccatatgaccgagtacaagcccacggtgcgcctcgccacccgcgacgacgtccccagggccgtacgcaccctcgccgccgcgttcgccgactaccccgccacgcgccacaccgtcgatccggaccgccacatcgagcgggtcaccgagctgcaagaactcttcctcacgcgcgtcgggctcgacatcggcaaggtgtgggtcgcggacgacggcgccgcggtggcggtctggaccacgccggagagcgtcgaagcgggggcggtgttcgccgagatcggcccgcgcatggccgagttgagcggttcccggctggccgcgcagcaacagatggaaggcctcctggcgccgcaccggcccaaggagcccgcgtggttcctggccaccgtcggcgtctcgcccgaccaccagggcaagggtctgggcagcgccgtcgtgctccccggagtggaggcggccgagcgcgccggggtgcccgccttcctggagacctccgcgccccgcaacctccccttctacgagcggctcggcttcaccgtcaccgccgacgtcgaggtgcccgaaggaccgcgcacctggtgcatgacccgcaagcccggtgcctga

SEQ ID NO: 37864 - DNA, 3375 bp, synthetic construct
  source 1..3375: mol_type = other DNA
atgggacccagactgctgttttgggctctgctgtgtctgctcggcacaggacctgttgaagctggcgtgacacagagccccacacacctgattaagaccagaggccagcaggccacactgagatgcagccctatcagcggccacaccagcgtgtactggtatcagcaggctctcggactgggcctccagttcctgctttggtacgacgagggcgaagagagaaaccggggcaacttccctcctcggttttccggcagacagttccccaactacagcagcgagctgaacgtgaacgccctggaactggaagatagcgccctgtacctgtgtgccagctctctcggcggagatgaactgggagccgatggcaacgagcagttctttggccctggcaccagactgaccgtgctggaaggtaccggcggaggcggatctggcggcggaagcgaattcgacatccagttgacccagtcccccagctcactcagcgccagtgtgggggaccgggtgaccattacctgtaaagccagtcagagtgtggactatgacggggatagcttcctgaattggtatcagcagaagcctggcaaagccccaaagctgctgatctacgctgcatctaatctggagtcaggcgtgccttccaggttctccggtagtgggtctgggaccgatttcacattgaccatttcatccctccaacccgaggatttcgctacatattactgtcagcagtccaatgaggaccctctcacctttggccagggcaccaaagttgaaattaagagactcgaggacctgaagaacgtgttcccacctgaggtggccgtgttcgagcctagcgaggccgagatcagccacacccagaaagccaccctcgtgtgcctggctaccggcttctaccccgaccatgtggaactgtcttggtgggtcaacggcaaagaggtgcacagcggcgtgtgtaccgacccccagccactgaaagaacagcccgccctgaacgacagccggtactgcctgagcagcagactgagagtgtccgccaccttctggcagaacccccggaaccacttcagatgccaggtgcagttctacggcctgagcgagaacgacgagtggacccaggacagagccaagcccgtgacccagatcgtgtctgccgaagcctggggcagagccgattgcgacgtgaagctggtggaaaagagcttcgagacagacaccaacctgaacttccagaacctgagcgtgatcggcttcagaatcctgctgctgaaagtggccggctttaacctgctgatgaccctgcggctgtggtccagcagggccaagcgatctggatctggagcaacaaacttctcactactcaaacaagcaggtgacgtggaggagaatcccgggcctactagtgccaccatggactggatttggcgcatccttttccttgtcggcgctgctaccggcgcccattccgggcccgaagtgcagctggttgaatctggcggaggactggttcaggctggcggatctctgagactgtcttgtgccgccagcggcagaacctttagcatgggctggtttagacaggcccctggcaaagagagagagttcgtcgccgccatcacatactctggcggcagcccttactacgccgactctgtgaagggcagattcaccatcagccgggacaacgccaagaacaccgtgtacctccagatgaacagcctgaagcctgaggacaccgccgtgtactactgcgccgccaatccaacatacggcagcgactggaacgccgagaattggggccagggaacccaagtgacagtgtctagcggatccggcggcggaggatctggcggaggcggatctgggggcggaggctctttcgaagaagtccaacttgtggagtctggagggggcctggtgcagcccggcggctctctcagactgtcttgtgcggcaagcggctacaccttcacctcttactggatagaatgggtgaggcaggcacctggaaagggactggagtggattggagagattctgccaggagggggagatacaaattacaatgaaatcttcaaggggcgggccaccttttcagcggataccagcaagaatacagcttacctgcagatgaatagcctccgggcagaagataccgctgtttattattgcacgagacgggtgccaataagactggactattgggggcaagggactcttgtcaccgtcagttcaacgcgtatccagaaccctgatcctgccgtgtaccagctgcgggatagcaagagcagcgacaagagcgtgtgtctgttcaccgacttcgacagccagaccaacgtgtcccagagcaaggactccgacgtgtacatcaccgataagtgcgtgctggacatgcggagcatggacttcaagagcaactccgccgtggcctggtccaacaagtccgatttcgcctgcgccaacgccttcaacaacagcattatccccgaggacacattcttcccaagccccgagagcagctgcggctttaccagcgagagctaccagcagggcgtgctgagcgccaccatcctgtacgagatcctgctgggcaaggccaccctgtacgccgtgctggtgtctgccctggtgctgatggctatggtcaagcggaaggacagccggggacgcgccaagagaagcggatctggcgtgaagcagaccctgaatttcgacctgctgaagctggctggcgacgtggaatccaacccaggcccttctagaggccatatgaccgagtacaagcccacggtgcgcctcgccacccgcgacgacgtccccagggccgtacgcaccctcgccgccgcgttcgccgactaccccgccacgcgccacaccgtcgatccggaccgccacatcgagcgggtcaccgagctgcaagaactcttcctcacgcgcgtcgggctcgacatcggcaaggtgtgggtcgcggacgacggcgccgcggtggcggtctggaccacgccggagagcgtcgaagcgggggcggtgttcgccgagatcggcccgcgcatggccgagttgagcggttcccggctggccgcgcagcaacagatggaaggcctcctggcgccgcaccggcccaaggagcccgcgtggttcctggccaccgtcggcgtctcgcccgaccaccagggcaagggtctgggcagcgccgtcgtgctccccggagtggaggcggccgagcgcgccggggtgcccgccttcctggagacctccgcgccccgcaacctccccttctacgagcggctcggcttcaccgtcaccgccgacgtcgaggtgcccgaaggaccgcgcacctggtgcatgacccgcaagcccggtgcctga

SEQ ID NO: 37865 - DNA, 2850 bp, synthetic construct
  source 1..2850: mol_type = other DNA
atggccttaccagtgaccgccttgctcctgccgctggccttgctgctccacgccgccaggccggacatccagttgacccagtcccccagctcactcagcgccagtgtgggggaccgggtgaccattacctgtaaagccagtcagagtgtggactatgacggggatagcttcctgaattggtatcagcagaagcctggcaaagccccaaagctgctgatctacgctgcatctaatctggagtcaggcgtgccttccaggttctccggtagtgggtctgggaccgatttcacattgaccatttcatccctccaacccgaggatttcgctacatattactgtcagcagtccaatgaggaccctctcacctttggccagggcaccaaagttgaaattaagagactcgaggacctgaagaacgtgttcccacctgaggtggccgtgttcgagcctagcgaggccgagatcagccacacccagaaagccaccctcgtgtgcctggctaccggcttctaccccgaccatgtggaactgtcttggtgggtcaacggcaaagaggtgcacagcggcgtgtgtaccgacccccagccactgaaagaacagcccgccctgaacgacagccggtactgcctgagcagcagactgagagtgtccgccaccttctggcagaacccccggaaccacttcagatgccaggtgcagttctacggcctgagcgagaacgacgagtggacccaggacagagccaagcccgtgacccagatcgtgtctgccgaagcctggggcagagccgattgcgacgtgaagctggtggaaaagagcttcgagacagacaccaacctgaacttccagaacctgagcgtgatcggcttcagaatcctgctgctgaaagtggccggctttaacctgctgatgaccctgcggctgtggtccagcagggccaagcgatctggatctggagcaacaaacttctcactactcaaacaagcaggtgacgtggaggagaatcccgggcctactagtgccaccatggactggatttggcgcatccttttccttgtcggcgctgctaccggcgcccattccgggcccatgggaagctggcttgagttctaccacagactcaacgccattgacagcaggctgtgggcacttggcggaagcgaagctgaactcgccgcttttgaaaaagaaattgccgctttcgagtccgagcttcaggcttacaaaggcaaagggaatcctgaggtcgagagcctgagagatcacgctgcccacattagagagtggttgcaggcataccggcacaatggatccggcggcggaggatctggcggaggcggatctgggggcggaggctctttcgaagaagtccaacttgtggagtctggagggggcctggtgcagcccggcggctctctcagactgtcttgtgcggcaagcggctacaccttcacctcttactggatagaatgggtgaggcaggcacctggaaagggactggagtggattggagagattctgccaggagggggagatacaaattacaatgaaatcttcaaggggcgggccaccttttcagcggataccagcaagaatacagcttacctgcagatgaatagcctccgggcagaagataccgctgtttattattgcacgagacgggtgccaataagactggactattgggggcaagggactcttgtcaccgtcagttcaacgcgtatccagaaccctgatcctgccgtgtaccagctgcgggatagcaagagcagcgacaagagcgtgtgtctgttcaccgacttcgacagccagaccaacgtgtcccagagcaaggactccgacgtgtacatcaccgataagtgcgtgctggacatgcggagcatggacttcaagagcaactccgccgtggcctggtccaacaagtccgatttcgcctgcgccaacgccttcaacaacagcattatccccgaggacacattcttcccaagccccgagagcagctgcggctttaccagcgagagctaccagcagggcgtgctgagcgccaccatcctgtacgagatcctgctgggcaaggccaccctgtacgccgtgctggtgtctgccctggtgctgatggctatggtcaagcggaaggacagccggggacgcgccaagagaagcggatctggcgtgaagcagaccctgaatttcgacctgctgaagctggctggcgacgtggaatccaacccaggcccttctagaggccatatgaccgagtacaagcccacggtgcgcctcgccacccgcgacgacgtccccagggccgtacgcaccctcgccgccgcgttcgccgactaccccgccacgcgccacaccgtcgatccggaccgccacatcgagcgggtcaccgagctgcaagaactcttcctcacgcgcgtcgggctcgacatcggcaaggtgtgggtcgcggacgacggcgccgcggtggcggtctggaccacgccggagagcgtcgaagcgggggcggtgttcgccgagatcggcccgcgcatggccgagttgagcggttcccggctggccgcgcagcaacagatggaaggcctcctggcgccgcaccggcccaaggagcccgcgtggttcctggccaccgtcggcgtctcgcccgaccaccagggcaagggtctgggcagcgccgtcgtgctccccggagtggaggcggccgagcgcgccggggtgcccgccttcctggagacctccgcgccccgcaacctccccttctacgagcggctcggcttcaccgtcaccgccgacgtcgaggtgcccgaaggaccgcgcacctggtgcatgacccgcaagcccggtgcctga

SEQ ID NO: 37866 - DNA, 2850 bp, synthetic construct
  source 1..2850: mol_type = other DNA
atggccttaccagtgaccgccttgctcctgccgctggccttgctgctccacgccgccaggccggcatgcatgggcagttggttcgagttctacgaccggctgaatgccatcgacgccagactgtgggctctcggaggatctgaagctgagctggccgccttcgagaaagagatcgccgcctttgagagcgagctgcaagcctacaaaggcaagggcaaccccgaggtggaaaacctgagagtgcacgccgctgccatcagagaatggctccaggcttacagacacaacggtaccggcggaggcggatctggcggcggaggtagcggtggcggaggatctgaattcgacatccagttgacccagtcccccagctcactcagcgccagtgtgggggaccgggtgaccattacctgtaaagccagtcagagtgtggactatgacggggatagcttcctgaattggtatcagcagaagcctggcaaagccccaaagctgctgatctacgctgcatctaatctggagtcaggcgtgccttccaggttctccggtagtgggtctgggaccgatttcacattgaccatttcatccctccaacccgaggatttcgctacatattactgtcagcagtccaatgaggaccctctcacctttggccagggcaccaaagttgaaattaagagactcgaggacctgaagaacgtgttcccacctgaggtggccgtgttcgagcctagcgaggccgagatcagccacacccagaaagccaccctcgtgtgcctggctaccggcttctaccccgaccatgtggaactgtcttggtgggtcaacggcaaagaggtgcacagcggcgtgtgtaccgacccccagccactgaaagaacagcccgccctgaacgacagccggtactgcctgagcagcagactgagagtgtccgccaccttctggcagaacccccggaaccacttcagatgccaggtgcagttctacggcctgagcgagaacgacgagtggacccaggacagagccaagcccgtgacccagatcgtgtctgccgaagcctggggcagagccgattgcgacgtgaagctggtggaaaagagcttcgagacagacaccaacctgaacttccagaacctgagcgtgatcggcttcagaatcctgctgctgaaagtggccggctttaacctgctgatgaccctgcggctgtggtccagcagggccaagcgatctggatctggagcaacaaacttctcactactcaaacaagcaggtgacgtggaggagaatcccgggcctactagtatggactggatttggcgcatccttttccttgtcggcgctgctaccggcgcgcattccttcgaagaagtccaacttgtggagtctggagggggcctggtgcagcccggcggctctctcagactgtcttgtgcggcaagcggctacaccttcacctcttactggatagaatgggtgaggcaggcacctggaaagggactggagtggattggagagattctgccaggagggggagatacaaattacaatgaaatcttcaaggggcgggccaccttttcagcggataccagcaagaatacagcttacctgcagatgaatagcctccgggcagaagataccgctgtttattattgcacgagacgggtgccaataagactggactattgggggcaagggactcttgtcaccgtcagttcaacgcgtatccagaaccctgatcctgccgtgtaccagctgcgggatagcaagagcagcgacaagagcgtgtgtctgttcaccgacttcgacagccagaccaacgtgtcccagagcaaggactccgacgtgtacatcaccgataagtgcgtgctggacatgcggagcatggacttcaagagcaactccgccgtggcctggtccaacaagtccgatttcgcctgcgccaacgccttcaacaacagcattatccccgaggacacattcttcccaagccccgagagcagctgcggctttaccagcgagagctaccagcagggcgtgctgagcgccaccatcctgtacgagatcctgctgggcaaggccaccctgtacgccgtgctggtgtctgccctggtgctgatggctatggtcaagcggaaggacagccggggacgcgccaagagaagcggatctggcgtgaagcagaccctgaatttcgacctgctgaagctggctggcgacgtggaatccaacccaggcccttctagaggccatatgaccgagtacaagcccacggtgcgcctcgccacccgcgacgacgtccccagggccgtacgcaccctcgccgccgcgttcgccgactaccccgccacgcgccacaccgtcgatccggaccgccacatcgagcgggtcaccgagctgcaagaactcttcctcacgcgcgtcgggctcgacatcggcaaggtgtgggtcgcggacgacggcgccgcggtggcggtctggaccacgccggagagcgtcgaagcgggggcggtgttcgccgagatcggcccgcgcatggccgagttgagcggttcccggctggccgcgcagcaacagatggaaggcctcctggcgccgcaccggcccaaggagcccgcgtggttcctggccaccgtcggcgtctcgcccgaccaccagggcaagggtctgggcagcgccgtcgtgctccccggagtggaggcggccgagcgcgccggggtgcccgccttcctggagacctccgcgccccgcaacctccccttctacgagcggctcggcttcaccgtcaccgccgacgtcgaggtgcccgaaggaccgcgcacctggtgcatgacccgcaagcccggtgcctga

SEQ ID NO: 37867 - DNA, 3201 bp, synthetic construct
  source 1..3201: mol_type = other DNA
atggccttaccagtgaccgccttgctcctgccgctggccttgctgctccacgccgccaggccggcatgcatggaccccgacctggaaatcagagccgccttcctgcggcagagaaacacagccctgagaacagaggtggccgagctggaacaagaggtgcagcggctggaaaacgaggtgtcccagtacgagacaagatacggccctctcggaggcggaaaaggtaccggcggaggcggatctggcggcggaggtagcggtggcggaggatctgaattcgacatccagttgacccagtcccccagctcactcagcgccagtgtgggggaccgggtgaccattacctgtaaagccagtcagagtgtggactatgacggggatagcttcctgaattggtatcagcagaagcctggcaaagccccaaagctgctgatctacgctgcatctaatctggagtcaggcgtgccttccaggttctccggtagtgggtctgggaccgatttcacattgaccatttcatccctccaacccgaggatttcgctacatattactgtcagcagtccaatgaggaccctctcacctttggccagggcaccaaagttgaaattaagagactcgaggacctgaagaacgtgttcccacctgaggtggccgtgttcgagcctagcgaggccgagatcagccacacccagaaagccaccctcgtgtgcctggctaccggcttctaccccgaccatgtggaactgtcttggtgggtcaacggcaaagaggtgcacagcggcgtgtgtaccgacccccagccactgaaagaacagcccgccctgaacgacagccggtactgcctgagcagcagactgagagtgtccgccaccttctggcagaacccccggaaccacttcagatgccaggtgcagttctacggcctgagcgagaacgacgagtggacccaggacagagccaagcccgtgacccagatcgtgtctgccgaagcctggggcagagccgattgcgacgtgaagctggtggaaaagagcttcgagacagacaccaacctgaacttccagaacctgagcgtgatcggcttcagaatcctgctgctgaaagtggccggctttaacctgctgatgaccctgcggctgtggtccagcagggccaagcgatctggatctggagcaacaaacttctcactactcaaacaagcaggtgacgtggaggagaatcccgggcctactagtgccaccatggactggatttggcgcatccttttccttgtcggcgctgctaccggcgcccattccgggcccgaagtgcagctggttgaatctggcggaggactggttcaggctggcggatctctgagactgtcttgtgccgccagcggcagaacctttagcatgggctggtttagacaggcccctggcaaagagagagagttcgtcgccgccatcacatactctggcggcagcccttactacgccgactctgtgaagggcagattcaccatcagccgggacaacgccaagaacaccgtgtacctccagatgaacagcctgaagcctgaggacaccgccgtgtactactgcgccgccaatccaacatacggcagcgactggaacgccgagaattggggccagggaacccaagtgacagtgtctagcggatccggcggcggaggatctggcggaggcggatctgggggcggaggctctttcgaagaagtccaacttgtggagtctggagggggcctggtgcagcccggcggctctctcagactgtcttgtgcggcaagcggctacaccttcacctcttactggatagaatgggtgaggcaggcacctggaaagggactggagtggattggagagattctgccaggagggggagatacaaattacaatgaaatcttcaaggggcgggccaccttttcagcggataccagcaagaatacagcttacctgcagatgaatagcctccgggcagaagataccgctgtttattattgcacgagacgggtgccaataagactggactattgggggcaagggactcttgtcaccgtcagttcaacgcgtatccagaaccctgatcctgccgtgtaccagctgcgggatagcaagagcagcgacaagagcgtgtgtctgttcaccgacttcgacagccagaccaacgtgtcccagagcaaggactccgacgtgtacatcaccgataagtgcgtgctggacatgcggagcatggacttcaagagcaactccgccgtggcctggtccaacaagtccgatttcgcctgcgccaacgccttcaacaacagcattatccccgaggacacattcttcccaagccccgagagcagctgcggctttaccagcgagagctaccagcagggcgtgctgagcgccaccatcctgtacgagatcctgctgggcaaggccaccctgtacgccgtgctggtgtctgccctggtgctgatggctatggtcaagcggaaggacagccggggacgcgccaagagaagcggatctggcgtgaagcagaccctgaatttcgacctgctgaagctggctggcgacgtggaatccaacccaggcccttctagaggccatatgaccgagtacaagcccacggtgcgcctcgccacccgcgacgacgtccccagggccgtacgcaccctcgccgccgcgttcgccgactaccccgccacgcgccacaccgtcgatccggaccgccacatcgagcgggtcaccgagctgcaagaactcttcctcacgcgcgtcgggctcgacatcggcaaggtgtgggtcgcggacgacggcgccgcggtggcggtctggaccacgccggagagcgtcgaagcgggggcggtgttcgccgagatcggcccgcgcatggccgagttgagcggttcccggctggccgcgcagcaacagatggaaggcctcctggcgccgcaccggcccaaggagcccgcgtggttcctggccaccgtcggcgtctcgcccgaccaccagggcaagggtctgggcagcgccgtcgtgctccccggagtggaggcggccgagcgcgccggggtgcccgccttcctggagacctccgcgccccgcaacctccccttctacgagcggctcggcttcaccgtcaccgccgacgtcgaggtgcccgaaggaccgcgcacctggtgcatgacccgcaagcccggtgcctga

SEQ ID NO: 37868 - DNA, 2850 bp, synthetic construct
  source 1..2850: mol_type = other DNA
atggccttaccagtgaccgccttgctcctgccgctggccttgctgctccacgccgccaggccggacatccagttgacccagtcccccagctcactcagcgccagtgtgggggaccgggtgaccattacctgtaaagccagtcagagtgtggactatgacggggatagcttcctgaattggtatcagcagaagcctggcaaagccccaaagctgctgatctacgctgcatctaatctggagtcaggcgtgccttccaggttctccggtagtgggtctgggaccgatttcacattgaccatttcatccctccaacccgaggatttcgctacatattactgtcagcagtccaatgaggaccctctcacctttggccagggcaccaaagttgaaattaagagactcgaggacctgaagaacgtgttcccacctgaggtggccgtgttcgagcctagcgaggccgagatcagccacacccagaaagccaccctcgtgtgcctggctaccggcttctaccccgaccatgtggaactgtcttggtgggtcaacggcaaagaggtgcacagcggcgtgtgtaccgacccccagccactgaaagaacagcccgccctgaacgacagccggtactgcctgagcagcagactgagagtgtccgccaccttctggcagaacccccggaaccacttcagatgccaggtgcagttctacggcctgagcgagaacgacgagtggacccaggacagagccaagcccgtgacccagatcgtgtctgccgaagcctggggcagagccgattgcgacgtgaagctggtggaaaagagcttcgagacagacaccaacctgaacttccagaacctgagcgtgatcggcttcagaatcctgctgctgaaagtggccggctttaacctgctgatgaccctgcggctgtggtccagcagggccaagcgatctggatctggagcaacaaacttctcactactcaaacaagcaggtgacgtggaggagaatcccgggcctactagtgccaccatggactggatttggcgcatccttttccttgtcggcgctgctaccggcgcccattccgggcccatgggatcttggagcgagttttacgatcggctgcacgccattcaccaccggctgtatgctctcggaggaagcgaagctgagctggccgcttttgaaaaagaaattgccgctttcgagtccgagcttcaggcttacaaaggcaaagggaatcctgaggtcgaggccctgagagataccgccgccttcatcagaacccggttgcaggcataccggcacaacggatccggcggcggaggatctggcggaggcggatctgggggcggaggctctttcgaagaagtccaacttgtggagtctggagggggcctggtgcagcccggcggctctctcagactgtcttgtgcggcaagcggctacaccttcacctcttactggatagaatgggtgaggcaggcacctggaaagggactggagtggattggagagattctgccaggagggggagatacaaattacaatgaaatcttcaaggggcgggccaccttttcagcggataccagcaagaatacagcttacctgcagatgaatagcctccgggcagaagataccgctgtttattattgcacgagacgggtgccaataagactggactattgggggcaagggactcttgtcaccgtcagttcaacgcgtatccagaaccctgatcctgccgtgtaccagctgcgggatagcaagagcagcgacaagagcgtgtgtctgttcaccgacttcgacagccagaccaacgtgtcccagagcaaggactccgacgtgtacatcaccgataagtgcgtgctggacatgcggagcatggacttcaagagcaactccgccgtggcctggtccaacaagtccgatttcgcctgcgccaacgccttcaacaacagcattatccccgaggacacattcttcccaagccccgagagcagctgcggctttaccagcgagagctaccagcagggcgtgctgagcgccaccatcctgtacgagatcctgctgggcaaggccaccctgtacgccgtgctggtgtctgccctggtgctgatggctatggtcaagcggaaggacagccggggacgcgccaagagaagcggatctggcgtgaagcagaccctgaatttcgacctgctgaagctggctggcgacgtggaatccaacccaggcccttctagaggccatatgaccgagtacaagcccacggtgcgcctcgccacccgcgacgacgtccccagggccgtacgcaccctcgccgccgcgttcgccgactaccccgccacgcgccacaccgtcgatccggaccgccacatcgagcgggtcaccgagctgcaagaactcttcctcacgcgcgtcgggctcgacatcggcaaggtgtgggtcgcggacgacggcgccgcggtggcggtctggaccacgccggagagcgtcgaagcgggggcggtgttcgccgagatcggcccgcgcatggccgagttgagcggttcccggctggccgcgcagcaacagatggaaggcctcctggcgccgcaccggcccaaggagcccgcgtggttcctggccaccgtcggcgtctcgcccgaccaccagggcaagggtctgggcagcgccgtcgtgctccccggagtggaggcggccgagcgcgccggggtgcccgccttcctggagacctccgcgccccgcaacctccccttctacgagcggctcggcttcaccgtcaccgccgacgtcgaggtgcccgaaggaccgcgcacctggtgcatgacccgcaagcccggtgcctga

SEQ ID NO: 37869 - DNA, 3480 bp, synthetic construct
  source 1..3480: mol_type = other DNA
atggccttaccagtgaccgccttgctcctgccgctggccttgctgctccacgccgccaggccggacatccagttgacccagtcccccagctcactcagcgccagtgtgggggaccgggtgaccattacctgtaaagccagtcagagtgtggactatgacggggatagcttcctgaattggtatcagcagaagcctggcaaagccccaaagctgctgatctacgctgcatctaatctggagtcaggcgtgccttccaggttctccggtagtgggtctgggaccgatttcacattgaccatttcatccctccaacccgaggatttcgctacatattactgtcagcagtccaatgaggaccctctcacctttggccagggcaccaaagttgaaattaagagactcgaggacctgaagaacgtgttcccacctgaggtggccgtgttcgagcctagcgaggccgagatcagccacacccagaaagccaccctcgtgtgcctggctaccggcttctaccccgaccatgtggaactgtcttggtgggtcaacggcaaagaggtgcacagcggcgtgtgtaccgacccccagccactgaaagaacagcccgccctgaacgacagccggtactgcctgagcagcagactgagagtgtccgccaccttctggcagaacccccggaaccacttcagatgccaggtgcagttctacggcctgagcgagaacgacgagtggacccaggacagagccaagcccgtgacccagatcgtgtctgccgaagcctggggcagagccgattgcgacgtgaagctggtggaaaagagcttcgagacagacaccaacctgaacttccagaacctgagcgtgatcggcttcagaatcctgctgctgaaagtggccggctttaacctgctgatgaccctgcggctgtggtccagcagggccaagcgatctggatctggagcaacaaacttctcactactcaaacaagcaggtgacgtggaggagaatcccgggcctactagtaccatggactggatttggcgcatccttttccttgtcggcgctgctaccggcgcccattccctgttcaatcaagaggtgcagatccctctgaccgagagctactgtggcccctgtcctaagaactggatctgctacaagaacaactgctaccagttcttcgacgagagcaagaattggtacgagagccaggccagctgcatgagccagaatgccagcctgctgaaggtgtacagcaaagaggaccaggacctgctgaaactggtcaagagcgcccactggatgggccttgtgcacatccccaccaatggctcttggcagtgggaggacggcagcattctgagccctaacctgctgaccatcatcgagatgcagaagggcgactgcgccctgtacgccagcagctttaagggctacatcgagaattgcagcaccccgaacacctacatctgtatgcagagaaccgtttctggcggaggcggctctggaggaggcggaagtggcggcggaggcgacctctttaatcaagaagtccagattccactcaccgaatcctactgcggaccttgtccaaaaaattggatttgttataagaacaactgttatcaattctttgatgagtctaaaaattggtatgagtcccaggcttcctgcatgtctcagaacgcttctctgctgaaagtctactctaaagaagatcaggatctcctgaagctcgtcaagtctgcccattggatggggctcgtccacattcctaccaacggaagctggcaatgggaagatggctccatcctgtctccaaatctgctcacgattattgaaatgcagaaaggggattgtgctctctacgccagctccttcaagggatatattgagaactgtagcacgcccaatacttatatctgtatgcaacggaccgtgggatccggcggcggaggatctggcggaggcggatctgggggcggaggctctttcgaagaagtccaacttgtggagtctggagggggcctggtgcagcccggcggctctctcagactgtcttgtgcggcaagcggctacaccttcacctcttactggatagaatgggtgaggcaggcacctggaaagggactggagtggattggagagattctgccaggagggggagatacaaattacaatgaaatcttcaaggggcgggccaccttttcagcggataccagcaagaatacagcttacctgcagatgaatagcctccgggcagaagataccgctgtttattattgcacgagacgggtgccaataagactggactattgggggcaagggactcttgtcaccgtcagttcaacgcgtatccagaaccctgatcctgccgtgtaccagctgcgggatagcaagagcagcgacaagagcgtgtgtctgttcaccgacttcgacagccagaccaacgtgtcccagagcaaggactccgacgtgtacatcaccgataagtgcgtgctggacatgcggagcatggacttcaagagcaactccgccgtggcctggtccaacaagtccgatttcgcctgcgccaacgccttcaacaacagcattatccccgaggacacattcttcccaagccccgagagcagctgcggctttaccagcgagagctaccagcagggcgtgctgagcgccaccatcctgtacgagatcctgctgggcaaggccaccctgtacgccgtgctggtgtctgccctggtgctgatggctatggtcaagcggaaggacagccggggacgcgccaagagaagcggatctggcgtgaagcagaccctgaatttcgacctgctgaagctggctggcgacgtggaatccaacccaggcccttctagaggccatatgaccgagtacaagcccacggtgcgcctcgccacccgcgacgacgtccccagggccgtacgcaccctcgccgccgcgttcgccgactaccccgccacgcgccacaccgtcgatccggaccgccacatcgagcgggtcaccgagctgcaagaactcttcctcacgcgcgtcgggctcgacatcggcaaggtgtgggtcgcggacgacggcgccgcggtggcggtctggaccacgccggagagcgtcgaagcgggggcggtgttcgccgagatcggcccgcgcatggccgagttgagcggttcccggctggccgcgcagcaacagatggaaggcctcctggcgccgcaccggcccaaggagcccgcgtggttcctggccaccgtcggcgtctcgcccgaccaccagggcaagggtctgggcagcgccgtcgtgctccccggagtggaggcggccgagcgcgccggggtgcccgccttcctggagacctccgcgccccgcaacctccccttctacgagcggctcggcttcaccgtcaccgccgacgtcgaggtgcccgaaggaccgcgcacctggtgcatgacccgcaagcccggtgcctga

SEQ ID NO: 37870 - DNA, 1866 bp, synthetic construct
  source 1..1866: mol_type = other DNA
atggccttaccagtgaccgccttgctcctgccgctggccttgctgctccacgccgccaggccggacatccagttgacccagtcccccagctcactcagcgccagtgtgggggaccgggtgaccattacctgtaaagccagtcagagtgtggactatgacggggatagcttcctgaattggtatcagcagaagcctggcaaagccccaaagctgctgatctacgctgcatctaatctggagtcaggcgtgccttccaggttctccggtagtgggtctgggaccgatttcacattgaccatttcatccctccaacccgaggatttcgctacatattactgtcagcagtccaatgaggaccctctcacctttggccagggcaccaaagttgaaattaagagactcgaggacctgaagaacgtgttcccacctgaggtggccgtgttcgagcctagcgaggccgagatcagccacacccagaaagccaccctcgtgtgcctggctaccggcttctaccccgaccatgtggaactgtcttggtgggtcaacggcaaagaggtgcacagcggcgtgtgtaccgacccccagccactgaaagaacagcccgccctgaacgacagccggtactgcctgagcagcagactgagagtgtccgccaccttctggcagaacccccggaaccacttcagatgccaggtgcagttctacggcctgagcgagaacgacgagtggacccaggacagagccaagcccgtgacccagatcgtgtctgccgaagcctggggcagagccgattgcggctttaccagcgagagctaccagcagggcgtgctgagcgccaccaacctgagcgtgatcggcttcagaatcctgctgctgaaagtggccggctttaacctgctgatgaccctgcggctgtggtccagcagggccaagcgatctggatctggagcaacaaacttctcactactcaaacaagcaggtgacgtggaggagaatcccgggcctactagtatggactggatttggcgcatccttttccttgtcggcgctgctaccggcgcgcattccttcgaagaagtccaacttgtggagtctggagggggcctggtgcagcccggcggctctctcagactgtcttgtgcggcaagcggctacaccttcacctcttactggatagaatgggtgaggcaggcacctggaaagggactggagtggattggagagattctgccaggagggggagatacaaattacaatgaaatcttcaaggggcgggccaccttttcagcggataccagcaagaatacagcttacctgcagatgaatagcctccgggcagaagataccgctgtttattattgcacgagacgggtgccaataagactggactattgggggcaagggactcttgtcaccgtcagttcaacgcgtatccagaaccctgatcctgccgtgtaccagctgcgggatagcaagagcagcgacaagagcgtgtgtctgttcaccgacttcgacagccagaccaacgtgtcccagagcaaggactccgacgtgtacatcaccgataagtgcgtgctggacatgcggagcatggacttcaagagcaactccgccgtggcctggtccaacaagtccgatttcgcctgcgccaacgccttcaacaacagcattatccccgaggacacattcttcccaagccccgagagcagctgcgacgtgaagctggtggaaaagagcttcgagacagacaccaacctgaacttccagatcctgtacgagatcctgctgggcaaggccaccctgtacgccgtgctggtgtctgccctggtgctgatggctatggtcaagcggaaggacagccgggga

SEQ ID NO: 37871 - DNA, 1878 bp, synthetic construct
  source 1..1878: mol_type = other DNA
atggccttaccagtgaccgccttgctcctgccgctggccttgctgctccacgccgccaggccggacatccagttgacccagtcccccagctcactcagcgccagtgtgggggaccgggtgaccattacctgtaaagccagtcagagtgtggactatgacggggatagcttcctgaattggtatcagcagaagcctggcaaagccccaaagctgctgatctacgctgcatctaatctggagtcaggcgtgccttccaggttctccggtagtgggtctgggaccgatttcacattgaccatttcatccctccaacccgaggatttcgctacatattactgtcagcagtccaatgaggaccctctcacctttggccagggcaccaaagttgaaattaagagactcgagatccagaaccctgatcctgccgtgtaccagctgcgggatagcaagagcagcgacaagagcgtgtgtctgttcaccgacttcgacagccagaccaacgtgtcccagagcaaggactccgacgtgtacatcaccgataagtgcgtgctggacatgcggagcatggacttcaagagcaactccgccgtggcctggtccaacaagtccgatttcgcctgcgccaacgccttcaacaacagcattatccccgaggacacattcttcccaagccccgagagcagctgcgacgtgaagctggtggaaaagagcttcgagacagacaccaacctgaacttccagatcctgtacgagatcctgctgggcaaggccaccctgtacgccgtgctggtgtctgccctggtgctgatggctatggtcaagcggaaggacagccggggacgcgccaagagaagcggatctggcgtgaagcagaccctgaatttcgacctgctgaagctggctggcgacgtggaatccaacccaggccctactagtatggactggatttggcgcatccttttccttgtcggcgctgctaccggcgcgcattccttcgaagaagtccaacttgtggagtctggagggggcctggtgcagcccggcggctctctcagactgtcttgtgcggcaagcggctacaccttcacctcttactggatagaatgggtgaggcaggcacctggaaagggactggagtggattggagagattctgccaggagggggagatacaaattacaatgaaatcttcaaggggcgggccaccttttcagcggataccagcaagaatacagcttacctgcagatgaatagcctccgggcagaagataccgctgtttattattgcacgagacgggtgccaataagactggactattgggggcaagggactcttgtcaccgtcagttcaacgcgtgaggacctgaagaacgtgttcccacctgaggtggccgtgttcgagcctagcgaggccgagatcagccacacccagaaagccaccctcgtgtgcctggctaccggcttctaccccgaccatgtggaactgtcttggtgggtcaacggcaaagaggtgcacagcggcgtgtgtaccgacccccagccactgaaagaacagcccgccctgaacgacagccggtactgcctgagcagcagactgagagtgtccgccaccttctggcagaacccccggaaccacttcagatgccaggtgcagttctacggcctgagcgagaacgacgagtggacccaggacagagccaagcccgtgacccagatcgtgtctgccgaagcctggggcagagccgattgcggctttaccagcgagagctaccagcagggcgtgctgagcgccaccaacctgagcgtgatcggcttcagaatcctgctgctgaaagtggccggctttaacctgctgatgaccctgcggctgtggtccagc

SEQ ID NO: 37872 - DNA, 2271 bp, synthetic construct
  source 1..2271: mol_type = other DNA
atggccttaccagtgaccgccttgctcctgccgctggccttgctgctccacgccgccaggccggaagtgcagctggttgaatctggcggaggactggttcagcctggcggatctctgagactgtcttgtgccgccagcggcttcagcttcagcgacttttggatgagctgggtccgacaggcccctggcaaaggacttgaatgggtcgccacaatcagccaggccggcagcgagaaggactacgtggactctgtgaagggcagattcaccatcagccgggacaacgccaagaagtccctgtacctccagatgaacagcctgagagccgaggacaccgccgtgtactattgtgcctctggcgtgtacagcttcgactacagaggccagggcaccctggtcacagtctcttctggtaccggcggaggcggatctggcggcggaggtagcggtggcggaggatctgaattcgacatccagttgacccagtcccccagctcactcagcgccagtgtgggggaccgggtgaccattacctgtaaagccagtcagagtgtggactatgacggggatagcttcctgaattggtatcagcagaagcctggcaaagccccaaagctgctgatctacgctgcatctaatctggagtcaggcgtgccttccaggttctccggtagtgggtctgggaccgatttcacattgaccatttcatccctccaacccgaggatttcgctacatattactgtcagcagtccaatgaggaccctctcacctttggccagggcaccaaagttgaaattaagagactcgaggacctgaagaacgtgttcccacctgaggtggccgtgttcgagcctagcgaggccgagatcagccacacccagaaagccaccctcgtgtgcctggctaccggcttctaccccgaccatgtggaactgtcttggtgggtcaacggcaaagaggtgcacagcggcgtgtgtaccgacccccagccactgaaagaacagcccgccctgaacgacagccggtactgcctgagcagcagactgagagtgtccgccaccttctggcagaacccccggaaccacttcagatgccaggtgcagttctacggcctgagcgagaacgacgagtggacccaggacagagccaagcccgtgacccagatcgtgtctgccgaagcctggggcagagccgattgcggctttaccagcgagagctaccagcagggcgtgctgagcgccaccaacctgagcgtgatcggcttcagaatcctgctgctgaaagtggccggctttaacctgctgatgaccctgcggctgtggtccagcagggccaagcgatctggatctggagcaacaaacttctcactactcaaacaagcaggtgacgtggaggagaatcccgggcctactagtatggactggatttggcgcatccttttccttgtcggcgctgctaccggcgcgcattccttcgaagaagtccaacttgtggagtctggagggggcctggtgcagcccggcggctctctcagactgtcttgtgcggcaagcggctacaccttcacctcttactggatagaatgggtgaggcaggcacctggaaagggactggagtggattggagagattctgccaggagggggagatacaaattacaatgaaatcttcaaggggcgggccaccttttcagcggataccagcaagaatacagcttacctgcagatgaatagcctccgggcagaagataccgctgtttattattgcacgagacgggtgccaataagactggactattgggggcaagggactcttgtcaccgtcagttcaacgcgtatccagaaccctgatcctgccgtgtaccagctgcgggatagcaagagcagcgacaagagcgtgtgtctgttcaccgacttcgacagccagaccaacgtgtcccagagcaaggactccgacgtgtacatcaccgataagtgcgtgctggacatgcggagcatggacttcaagagcaactccgccgtggcctggtccaacaagtccgatttcgcctgcgccaacgccttcaacaacagcattatccccgaggacacattcttcccaagccccgagagcagctgcgacgtgaagctggtggaaaagagcttcgagacagacaccaacctgaacttccagatcctgtacgagatcctgctgggcaaggccaccctgtacgccgtgctggtgtctgccctggtgctgatggctatggtcaagcggaaggacagccgggga

SEQ ID NO: 37873 - DNA, 2283 bp, synthetic construct
  source 1..2283: mol_type = other DNA
atggccttaccagtgaccgccttgctcctgccgctggccttgctgctccacgccgccaggccggaagtgcagctggttgaatctggcggaggactggttcagcctggcggatctctgagactgtcttgtgccgccagcggcttcagcttcagcgacttttggatgagctgggtccgacaggcccctggcaaaggacttgaatgggtcgccacaatcagccaggccggcagcgagaaggactacgtggactctgtgaagggcagattcaccatcagccgggacaacgccaagaagtccctgtacctccagatgaacagcctgagagccgaggacaccgccgtgtactattgtgcctctggcgtgtacagcttcgactacagaggccagggcaccctggtcacagtctcttctggtaccggcggaggcggatctggcggcggaggtagcggtggcggaggatctgaattcgacatccagttgacccagtcccccagctcactcagcgccagtgtgggggaccgggtgaccattacctgtaaagccagtcagagtgtggactatgacggggatagcttcctgaattggtatcagcagaagcctggcaaagccccaaagctgctgatctacgctgcatctaatctggagtcaggcgtgccttccaggttctccggtagtgggtctgggaccgatttcacattgaccatttcatccctccaacccgaggatttcgctacatattactgtcagcagtccaatgaggaccctctcacctttggccagggcaccaaagttgaaattaagagactcgagatccagaaccctgatcctgccgtgtaccagctgcgggatagcaagagcagcgacaagagcgtgtgtctgttcaccgacttcgacagccagaccaacgtgtcccagagcaaggactccgacgtgtacatcaccgataagtgcgtgctggacatgcggagcatggacttcaagagcaactccgccgtggcctggtccaacaagtccgatttcgcctgcgccaacgccttcaacaacagcattatccccgaggacacattcttcccaagccccgagagcagctgcgacgtgaagctggtggaaaagagcttcgagacagacaccaacctgaacttccagatcctgtacgagatcctgctgggcaaggccaccctgtacgccgtgctggtgtctgccctggtgctgatggctatggtcaagcggaaggacagccggggacgcgccaagagaagcggatctggcgtgaagcagaccctgaatttcgacctgctgaagctggctggcgacgtggaatccaacccaggccctactagtatggactggatttggcgcatccttttccttgtcggcgctgctaccggcgcgcattccttcgaagaagtccaacttgtggagtctggagggggcctggtgcagcccggcggctctctcagactgtcttgtgcggcaagcggctacaccttcacctcttactggatagaatgggtgaggcaggcacctggaaagggactggagtggattggagagattctgccaggagggggagatacaaattacaatgaaatcttcaaggggcgggccaccttttcagcggataccagcaagaatacagcttacctgcagatgaatagcctccgggcagaagataccgctgtttattattgcacgagacgggtgccaataagactggactattgggggcaagggactcttgtcaccgtcagttcaacgcgtgaggacctgaagaacgtgttcccacctgaggtggccgtgttcgagcctagcgaggccgagatcagccacacccagaaagccaccctcgtgtgcctggctaccggcttctaccccgaccatgtggaactgtcttggtgggtcaacggcaaagaggtgcacagcggcgtgtgtaccgacccccagccactgaaagaacagcccgccctgaacgacagccggtactgcctgagcagcagactgagagtgtccgccaccttctggcagaacccccggaaccacttcagatgccaggtgcagttctacggcctgagcgagaacgacgagtggacccaggacagagccaagcccgtgacccagatcgtgtctgccgaagcctggggcagagccgattgcggctttaccagcgagagctaccagcagggcgtgctgagcgccaccaacctgagcgtgatcggcttcagaatcctgctgctgaaagtggccggctttaacctgctgatgaccctgcggctgtggtccagc

SEQ ID NO: 37874 - DNA, 2682 bp, synthetic construct
  source 1..2682: mol_type = other DNA
atggccttaccagtgaccgccttgctcctgccgctggccttgctgctccacgccgccaggccggaagtgcagctggttgaatctggcggaggactggttcagcctggcggatctctgagactgtcttgtgccgccagcggcttcagcttcagcgacttttggatgagctgggtccgacaggcccctggcaaaggacttgaatgggtcgccacaatcagccaggccggcagcgagaaggactacgtggactctgtgaagggcagattcaccatcagccgggacaacgccaagaagtccctgtacctccagatgaacagcctgagagccgaggacaccgccgtgtactattgtgcctctggcgtgtacagcttcgactacagaggccagggcaccctggtcacagtctcttctggtaccggcggaggcggatctggcggcggaggtagcggtggcggaggatctgaattcgacatccagttgacccagtcccccagctcactcagcgccagtgtgggggaccgggtgaccattacctgtaaagccagtcagagtgtggactatgacggggatagcttcctgaattggtatcagcagaagcctggcaaagccccaaagctgctgatctacgctgcatctaatctggagtcaggcgtgccttccaggttctccggtagtgggtctgggaccgatttcacattgaccatttcatccctccaacccgaggatttcgctacatattactgtcagcagtccaatgaggaccctctcacctttggccagggcaccaaagttgaaattaagagactcgaggacctgaagaacgtgttcccacctgaggtggccgtgttcgagcctagcgaggccgagatcagccacacccagaaagccaccctcgtgtgcctggctaccggcttctaccccgaccatgtggaactgtcttggtgggtcaacggcaaagaggtgcacagcggcgtgtgtaccgacccccagccactgaaagaacagcccgccctgaacgacagccggtactgcctgagcagcagactgagagtgtccgccaccttctggcagaacccccggaaccacttcagatgccaggtgcagttctacggcctgagcgagaacgacgagtggacccaggacagagccaagcccgtgacccagatcgtgtctgccgaagcctggggcagagccgattgcggctttaccagcgagagctaccagcagggcgtgctgagcgccaccaacctgagcgtgatcggcttcagaatcctgctgctgaaagtggccggctttaacctgctgatgaccctgcggctgtggtccagcagggccaagcgatctggatctggagcaacaaacttctcactactcaaacaagcaggtgacgtggaggagaatcccgggcctactagtatggactggatttggcgcatccttttccttgtcggcgctgctaccggcgcgcattccgggccccagctccagctgcaagagtctggacctggcctggtcaagcctagcgagacactgagcctgacctgtaccgtgtccggcgatagcatcagcagcggcgattactactggggctggatcagacagcctcctggcaaaggactggaatggatcggccacatctactacagcggcgtgacctactacaaccccagcctgaagtccagagtgaccatcagcgtggacaccagccggaaccagttctccctgaagctgtctagcgtgacagccgccgataccgccgtgtactactgcaccagagaggacagcagcaactggcggagtagaggccagggaacactggtcacagttagctctggatccggcggaggcggaagtggaggcggaggatctggcggcggaggctctttcgaagaagtccaacttgtggagtctggagggggcctggtgcagcccggcggctctctcagactgtcttgtgcggcaagcggctacaccttcacctcttactggatagaatgggtgaggcaggcacctggaaagggactggagtggattggagagattctgccaggagggggagatacaaattacaatgaaatcttcaaggggcgggccaccttttcagcggataccagcaagaatacagcttacctgcagatgaatagcctccgggcagaagataccgctgtttattattgcacgagacgggtgccaataagactggactattgggggcaagggactcttgtcaccgtcagttcaacgcgtatccagaaccctgatcctgccgtgtaccagctgcgggatagcaagagcagcgacaagagcgtgtgtctgttcaccgacttcgacagccagaccaacgtgtcccagagcaaggactccgacgtgtacatcaccgataagtgcgtgctggacatgcggagcatggacttcaagagcaactccgccgtggcctggtccaacaagtccgatttcgcctgcgccaacgccttcaacaacagcattatccccgaggacacattcttcccaagccccgagagcagctgcgacgtgaagctggtggaaaagagcttcgagacagacaccaacctgaacttccagatcctgtacgagatcctgctgggcaaggccaccctgtacgccgtgctggtgtctgccctggtgctgatggctatggtcaagcggaaggacagccgggga

SEQ ID NO: 37875 - DNA, 2694 bp, synthetic construct
  source 1..2694: mol_type = other DNA
atggccttaccagtgaccgccttgctcctgccgctggccttgctgctccacgccgccaggccggaagtgcagctggttgaatctggcggaggactggttcagcctggcggatctctgagactgtcttgtgccgccagcggcttcagcttcagcgacttttggatgagctgggtccgacaggcccctggcaaaggacttgaatgggtcgccacaatcagccaggccggcagcgagaaggactacgtggactctgtgaagggcagattcaccatcagccgggacaacgccaagaagtccctgtacctccagatgaacagcctgagagccgaggacaccgccgtgtactattgtgcctctggcgtgtacagcttcgactacagaggccagggcaccctggtcacagtctcttctggtaccggcggaggcggatctggcggcggaggtagcggtggcggaggatctgaattcgacatccagttgacccagtcccccagctcactcagcgccagtgtgggggaccgggtgaccattacctgtaaagccagtcagagtgtggactatgacggggatagcttcctgaattggtatcagcagaagcctggcaaagccccaaagctgctgatctacgctgcatctaatctggagtcaggcgtgccttccaggttctccggtagtgggtctgggaccgatttcacattgaccatttcatccctccaacccgaggatttcgctacatattactgtcagcagtccaatgaggaccctctcacctttggccagggcaccaaagttgaaattaagagactcgagatccagaaccctgatcctgccgtgtaccagctgcgggatagcaagagcagcgacaagagcgtgtgtctgttcaccgacttcgacagccagaccaacgtgtcccagagcaaggactccgacgtgtacatcaccgataagtgcgtgctggacatgcggagcatggacttcaagagcaactccgccgtggcctggtccaacaagtccgatttcgcctgcgccaacgccttcaacaacagcattatccccgaggacacattcttcccaagccccgagagcagctgcgacgtgaagctggtggaaaagagcttcgagacagacaccaacctgaacttccagatcctgtacgagatcctgctgggcaaggccaccctgtacgccgtgctggtgtctgccctggtgctgatggctatggtcaagcggaaggacagccggggacgcgccaagagaagcggatctggcgtgaagcagaccctgaatttcgacctgctgaagctggctggcgacgtggaatccaacccaggccctactagtatggactggatttggcgcatccttttccttgtcggcgctgctaccggcgcgcattccgggccccagctccagctgcaagagtctggacctggcctggtcaagcctagcgagacactgagcctgacctgtaccgtgtccggcgatagcatcagcagcggcgattactactggggctggatcagacagcctcctggcaaaggactggaatggatcggccacatctactacagcggcgtgacctactacaaccccagcctgaagtccagagtgaccatcagcgtggacaccagccggaaccagttctccctgaagctgtctagcgtgacagccgccgataccgccgtgtactactgcaccagagaggacagcagcaactggcggagtagaggccagggaacactggtcacagttagctctggatccggcggaggcggaagtggaggcggaggatctggcggcggaggctctttcgaagaagtccaacttgtggagtctggagggggcctggtgcagcccggcggctctctcagactgtcttgtgcggcaagcggctacaccttcacctcttactggatagaatgggtgaggcaggcacctggaaagggactggagtggattggagagattctgccaggagggggagatacaaattacaatgaaatcttcaaggggcgggccaccttttcagcggataccagcaagaatacagcttacctgcagatgaatagcctccgggcagaagataccgctgtttattattgcacgagacgggtgccaataagactggactattgggggcaagggactcttgtcaccgtcagttcaacgcgtgaggacctgaagaacgtgttcccacctgaggtggccgtgttcgagcctagcgaggccgagatcagccacacccagaaagccaccctcgtgtgcctggctaccggcttctaccccgaccatgtggaactgtcttggtgggtcaacggcaaagaggtgcacagcggcgtgtgtaccgacccccagccactgaaagaacagcccgccctgaacgacagccggtactgcctgagcagcagactgagagtgtccgccaccttctggcagaacccccggaaccacttcagatgccaggtgcagttctacggcctgagcgagaacgacgagtggacccaggacagagccaagcccgtgacccagatcgtgtctgccgaagcctggggcagagccgattgcggctttaccagcgagagctaccagcagggcgtgctgagcgccaccaacctgagcgtgatcggcttcagaatcctgctgctgaaagtggccggctttaacctgctgatgaccctgcggctgtggtccagc

SEQ ID NO: 37876 - DNA, 2178 bp, synthetic construct
  source 1..2178: mol_type = other DNA
atggccttaccagtgaccgccttgctcctgccgctggccttgctgctccacgccgccaggccggacatccagttgacccagtcccccagctcactcagcgccagtgtgggggaccgggtgaccattacctgtaaagccagtcagagtgtggactatgacggggatagcttcctgaattggtatcagcagaagcctggcaaagccccaaagctgctgatctacgctgcatctaatctggagtcaggcgtgccttccaggttctccggtagtgggtctgggaccgatttcacattgaccatttcatccctccaacccgaggatttcgctacatattactgtcagcagtccaatgaggaccctctcacctttggccagggcaccaaagttgaaattaagagactcgaggacctgaagaacgtgttcccacctgaggtggccgtgttcgagcctagcgaggccgagatcagccacacccagaaagccaccctcgtgtgcctggctaccggcttctaccccgaccatgtggaactgtcttggtgggtcaacggcaaagaggtgcacagcggcgtgtgtaccgacccccagccactgaaagaacagcccgccctgaacgacagccggtactgcctgagcagcagactgagagtgtccgccaccttctggcagaacccccggaaccacttcagatgccaggtgcagttctacggcctgagcgagaacgacgagtggacccaggacagagccaagcccgtgacccagatcgtgtctgccgaagcctggggcagagccgatgatgtgattaagatccactggcaggaaaagaagtccaacaccatcctgggcagccaggaaggcaacaccatgaagaccaacgacacctacatgaagttcagctggctgaccgtgcccgagaagtccctggacaaagaacacagatgcatcgtgcggcacgaaaacaacaagaacggcgtggaccaggaaatcatcttcccacccatcaagaccgatgtgattacaatggaccccaaggacaactgctccaaggacgccaacgataccctgctgctccagctgaccaacaccagcgcctactacatgtacttgttgctgctgctgaagtccgtggtgtacttcgccatcatcacatgctgcctgctgatggctatggtcaagcggaaggacagccggggaagggccaagcgatctggatctggagcaacaaacttctcactactcaaacaagcaggtgacgtggaggagaatcccgggcctactagtatggactggatttggcgcatccttttccttgtcggcgctgctaccggcgcgcattccttcgaagaagtccaacttgtggagtctggagggggcctggtgcagcccggcggctctctcagactgtcttgtgcggcaagcggctacaccttcacctcttactggatagaatgggtgaggcaggcacctggaaagggactggagtggattggagagattctgccaggagggggagatacaaattacaatgaaatcttcaaggggcgggccaccttttcagcggataccagcaagaatacagcttacctgcagatgaatagcctccgggcagaagataccgctgtttattattgcacgagacgggtgccaataagactggactattgggggcaagggactcttgtcaccgtcagttcaacgcgtatccagaaccctgatcctgccgtgtaccagctgcgggatagcaagagcagcgacaagagcgtgtgtctgttcaccgacttcgacagccagaccaacgtgtcccagagcaaggactccgacgtgtacatcaccgataagtgcgtgctggacatgcggagcatggacttcaagagcaactccgccgtggcctggtccaacaagtccgatttcgcctgcgccaacgccttcaacaacagcattatccccgaggacacattcttcccaagccccgagagcagcgactccaccgaccacgtgaagcccaaagagacagagaacaccaagcagcccagcaagagctgccacaagcccaaggccatcgtgcacaccgagaaagtgaacatgatgagcctgaccgtgctgggcctgcggatgctgttcgccaaaaccgtggccgtgaacttcctgctgaccgccaagctgttcttcctcctcaccgcc

SEQ ID NO: 37877 - DNA, 2190 bp, synthetic construct
  source 1..2190: mol_type = other DNA
atggccttaccagtgaccgccttgctcctgccgctggccttgctgctccacgccgccaggccggacatccagttgacccagtcccccagctcactcagcgccagtgtgggggaccgggtgaccattacctgtaaagccagtcagagtgtggactatgacggggatagcttcctgaattggtatcagcagaagcctggcaaagccccaaagctgctgatctacgctgcatctaatctggagtcaggcgtgccttccaggttctccggtagtgggtctgggaccgatttcacattgaccatttcatccctccaacccgaggatttcgctacatattactgtcagcagtccaatgaggaccctctcacctttggccagggcaccaaagttgaaattaagagactcgagatccagaaccctgatcctgccgtgtaccagctgcgggatagcaagagcagcgacaagagcgtgtgtctgttcaccgacttcgacagccagaccaacgtgtcccagagcaaggactccgacgtgtacatcaccgataagtgcgtgctggacatgcggagcatggacttcaagagcaactccgccgtggcctggtccaacaagtccgatttcgcctgcgccaacgccttcaacaacagcattatccccgaggacacattcttcccaagccccgagagcagcgactccaccgaccacgtgaagcccaaagagacagagaacaccaagcagcccagcaagagctgccacaagcccaaggccatcgtgcacaccgagaaagtgaacatgatgagcctgaccgtgctgggcctgcggatgctgttcgccaaaaccgtggccgtgaacttcctgctgaccgccaagctgttcttcctcctcaccgcccgcgccaagagaagcggatctggcgtgaagcagaccctgaatttcgacctgctgaagctggctggcgacgtggaatccaacccaggccctactagtatggactggatttggcgcatccttttccttgtcggcgctgctaccggcgcgcattccttcgaagaagtccaacttgtggagtctggagggggcctggtgcagcccggcggctctctcagactgtcttgtgcggcaagcggctacaccttcacctcttactggatagaatgggtgaggcaggcacctggaaagggactggagtggattggagagattctgccaggagggggagatacaaattacaatgaaatcttcaaggggcgggccaccttttcagcggataccagcaagaatacagcttacctgcagatgaatagcctccgggcagaagataccgctgtttattattgcacgagacgggtgccaataagactggactattgggggcaagggactcttgtcaccgtcagttcaacgcgtgaggacctgaagaacgtgttcccacctgaggtggccgtgttcgagcctagcgaggccgagatcagccacacccagaaagccaccctcgtgtgcctggctaccggcttctaccccgaccatgtggaactgtcttggtgggtcaacggcaaagaggtgcacagcggcgtgtgtaccgacccccagccactgaaagaacagcccgccctgaacgacagccggtactgcctgagcagcagactgagagtgtccgccaccttctggcagaacccccggaaccacttcagatgccaggtgcagttctacggcctgagcgagaacgacgagtggacccaggacagagccaagcccgtgacccagatcgtgtctgccgaagcctggggcagagccgatgatgtgattaagatccactggcaggaaaagaagtccaacaccatcctgggcagccaggaaggcaacaccatgaagaccaacgacacctacatgaagttcagctggctgaccgtgcccgagaagtccctggacaaagaacacagatgcatcgtgcggcacgaaaacaacaagaacggcgtggaccaggaaatcatcttcccacccatcaagaccgatgtgattacaatggaccccaaggacaactgctccaaggacgccaacgataccctgctgctccagctgaccaacaccagcgcctactacatgtacttgttgctgctgctgaagtccgtggtgtacttcgccatcatcacatgctgcctgctgatggctatggtcaagcggaaggacagccgggga

SEQ ID NO: 37878 - DNA, 2583 bp, synthetic construct
  source 1..2583: mol_type = other DNA
atggccttaccagtgaccgccttgctcctgccgctggccttgctgctccacgccgccaggccggaagtgcagctggttgaatctggcggaggactggttcagcctggcggatctctgagactgtcttgtgccgccagcggcttcagcttcagcgacttttggatgagctgggtccgacaggcccctggcaaaggacttgaatgggtcgccacaatcagccaggccggcagcgagaaggactacgtggactctgtgaagggcagattcaccatcagccgggacaacgccaagaagtccctgtacctccagatgaacagcctgagagccgaggacaccgccgtgtactattgtgcctctggcgtgtacagcttcgactacagaggccagggcaccctggtcacagtctcttctggtaccggcggaggcggatctggcggcggaggtagcggtggcggaggatctgaattcgacatccagttgacccagtcccccagctcactcagcgccagtgtgggggaccgggtgaccattacctgtaaagccagtcagagtgtggactatgacggggatagcttcctgaattggtatcagcagaagcctggcaaagccccaaagctgctgatctacgctgcatctaatctggagtcaggcgtgccttccaggttctccggtagtgggtctgggaccgatttcacattgaccatttcatccctccaacccgaggatttcgctacatattactgtcagcagtccaatgaggaccctctcacctttggccagggcaccaaagttgaaattaagagactcgaggacctgaagaacgtgttcccacctgaggtggccgtgttcgagcctagcgaggccgagatcagccacacccagaaagccaccctcgtgtgcctggctaccggcttctaccccgaccatgtggaactgtcttggtgggtcaacggcaaagaggtgcacagcggcgtgtgtaccgacccccagccactgaaagaacagcccgccctgaacgacagccggtactgcctgagcagcagactgagagtgtccgccaccttctggcagaacccccggaaccacttcagatgccaggtgcagttctacggcctgagcgagaacgacgagtggacccaggacagagccaagcccgtgacccagatcgtgtctgccgaagcctggggcagagccgatgatgtgattaagatccactggcaggaaaagaagtccaacaccatcctgggcagccaggaaggcaacaccatgaagaccaacgacacctacatgaagttcagctggctgaccgtgcccgagaagtccctggacaaagaacacagatgcatcgtgcggcacgaaaacaacaagaacggcgtggaccaggaaatcatcttcccacccatcaagaccgatgtgattacaatggaccccaaggacaactgctccaaggacgccaacgataccctgctgctccagctgaccaacaccagcgcctactacatgtacttgttgctgctgctgaagtccgtggtgtacttcgccatcatcacatgctgcctgctgatggctatggtcaagcggaaggacagccggggaagggccaagcgatctggatctggagcaacaaacttctcactactcaaacaagcaggtgacgtggaggagaatcccgggcctactagtatggactggatttggcgcatccttttccttgtcggcgctgctaccggcgcgcattccttcgaagaagtccaacttgtggagtctggagggggcctggtgcagcccggcggctctctcagactgtcttgtgcggcaagcggctacaccttcacctcttactggatagaatgggtgaggcaggcacctggaaagggactggagtggattggagagattctgccaggagggggagatacaaattacaatgaaatcttcaaggggcgggccaccttttcagcggataccagcaagaatacagcttacctgcagatgaatagcctccgggcagaagataccgctgtttattattgcacgagacgggtgccaataagactggactattgggggcaagggactcttgtcaccgtcagttcaacgcgtatccagaaccctgatcctgccgtgtaccagctgcgggatagcaagagcagcgacaagagcgtgtgtctgttcaccgacttcgacagccagaccaacgtgtcccagagcaaggactccgacgtgtacatcaccgataagtgcgtgctggacatgcggagcatggacttcaagagcaactccgccgtggcctggtccaacaagtccgatttcgcctgcgccaacgccttcaacaacagcattatccccgaggacacattcttcccaagccccgagagcagcgactccaccgaccacgtgaagcccaaagagacagagaacaccaagcagcccagcaagagctgccacaagcccaaggccatcgtgcacaccgagaaagtgaacatgatgagcctgaccgtgctgggcctgcggatgctgttcgccaaaaccgtggccgtgaacttcctgctgaccgccaagctgttcttcctcctcaccgcc

SEQ ID NO: 37879 - DNA, 2595 bp, synthetic construct
  source 1..2595: mol_type = other DNA
atggccttaccagtgaccgccttgctcctgccgctggccttgctgctccacgccgccaggccggaagtgcagctggttgaatctggcggaggactggttcagcctggcggatctctgagactgtcttgtgccgccagcggcttcagcttcagcgacttttggatgagctgggtccgacaggcccctggcaaaggacttgaatgggtcgccacaatcagccaggccggcagcgagaaggactacgtggactctgtgaagggcagattcaccatcagccgggacaacgccaagaagtccctgtacctccagatgaacagcctgagagccgaggacaccgccgtgtactattgtgcctctggcgtgtacagcttcgactacagaggccagggcaccctggtcacagtctcttctggtaccggcggaggcggatctggcggcggaggtagcggtggcggaggatctgaattcgacatccagttgacccagtcccccagctcactcagcgccagtgtgggggaccgggtgaccattacctgtaaagccagtcagagtgtggactatgacggggatagcttcctgaattggtatcagcagaagcctggcaaagccccaaagctgctgatctacgctgcatctaatctggagtcaggcgtgccttccaggttctccggtagtgggtctgggaccgatttcacattgaccatttcatccctccaacccgaggatttcgctacatattactgtcagcagtccaatgaggaccctctcacctttggccagggcaccaaagttgaaattaagagactcgagatccagaaccctgatcctgccgtgtaccagctgcgggatagcaagagcagcgacaagagcgtgtgtctgttcaccgacttcgacagccagaccaacgtgtcccagagcaaggactccgacgtgtacatcaccgataagtgcgtgctggacatgcggagcatggacttcaagagcaactccgccgtggcctggtccaacaagtccgatttcgcctgcgccaacgccttcaacaacagcattatccccgaggacacattcttcccaagccccgagagcagcgactccaccgaccacgtgaagcccaaagagacagagaacaccaagcagcccagcaagagctgccacaagcccaaggccatcgtgcacaccgagaaagtgaacatgatgagcctgaccgtgctgggcctgcggatgctgttcgccaaaaccgtggccgtgaacttcctgctgaccgccaagctgttcttcctcctcaccgcccgcgccaagagaagcggatctggcgtgaagcagaccctgaatttcgacctgctgaagctggctggcgacgtggaatccaacccaggccctactagtatggactggatttggcgcatccttttccttgtcggcgctgctaccggcgcgcattccttcgaagaagtccaacttgtggagtctggagggggcctggtgcagcccggcggctctctcagactgtcttgtgcggcaagcggctacaccttcacctcttactggatagaatgggtgaggcaggcacctggaaagggactggagtggattggagagattctgccaggagggggagatacaaattacaatgaaatcttcaaggggcgggccaccttttcagcggataccagcaagaatacagcttacctgcagatgaatagcctccgggcagaagataccgctgtttattattgcacgagacgggtgccaataagactggactattgggggcaagggactcttgtcaccgtcagttcaacgcgtgaggacctgaagaacgtgttcccacctgaggtggccgtgttcgagcctagcgaggccgagatcagccacacccagaaagccaccctcgtgtgcctggctaccggcttctaccccgaccatgtggaactgtcttggtgggtcaacggcaaagaggtgcacagcggcgtgtgtaccgacccccagccactgaaagaacagcccgccctgaacgacagccggtactgcctgagcagcagactgagagtgtccgccaccttctggcagaacccccggaaccacttcagatgccaggtgcagttctacggcctgagcgagaacgacgagtggacccaggacagagccaagcccgtgacccagatcgtgtctgccgaagcctggggcagagccgatgatgtgattaagatccactggcaggaaaagaagtccaacaccatcctgggcagccaggaaggcaacaccatgaagaccaacgacacctacatgaagttcagctggctgaccgtgcccgagaagtccctggacaaagaacacagatgcatcgtgcggcacgaaaacaacaagaacggcgtggaccaggaaatcatcttcccacccatcaagaccgatgtgattacaatggaccccaaggacaactgctccaaggacgccaacgataccctgctgctccagctgaccaacaccagcgcctactacatgtacttgttgctgctgctgaagtccgtggtgtacttcgccatcatcacatgctgcctgctgatggctatggtcaagcggaaggacagccgggga

SEQ ID NO: 37880 - DNA, 2994 bp, synthetic construct
  source 1..2994: mol_type = other DNA
atggccttaccagtgaccgccttgctcctgccgctggccttgctgctccacgccgccaggccggaagtgcagctggttgaatctggcggaggactggttcagcctggcggatctctgagactgtcttgtgccgccagcggcttcagcttcagcgacttttggatgagctgggtccgacaggcccctggcaaaggacttgaatgggtcgccacaatcagccaggccggcagcgagaaggactacgtggactctgtgaagggcagattcaccatcagccgggacaacgccaagaagtccctgtacctccagatgaacagcctgagagccgaggacaccgccgtgtactattgtgcctctggcgtgtacagcttcgactacagaggccagggcaccctggtcacagtctcttctggtaccggcggaggcggatctggcggcggaggtagcggtggcggaggatctgaattcgacatccagttgacccagtcccccagctcactcagcgccagtgtgggggaccgggtgaccattacctgtaaagccagtcagagtgtggactatgacggggatagcttcctgaattggtatcagcagaagcctggcaaagccccaaagctgctgatctacgctgcatctaatctggagtcaggcgtgccttccaggttctccggtagtgggtctgggaccgatttcacattgaccatttcatccctccaacccgaggatttcgctacatattactgtcagcagtccaatgaggaccctctcacctttggccagggcaccaaagttgaaattaagagactcgaggacctgaagaacgtgttcccacctgaggtggccgtgttcgagcctagcgaggccgagatcagccacacccagaaagccaccctcgtgtgcctggctaccggcttctaccccgaccatgtggaactgtcttggtgggtcaacggcaaagaggtgcacagcggcgtgtgtaccgacccccagccactgaaagaacagcccgccctgaacgacagccggtactgcctgagcagcagactgagagtgtccgccaccttctggcagaacccccggaaccacttcagatgccaggtgcagttctacggcctgagcgagaacgacgagtggacccaggacagagccaagcccgtgacccagatcgtgtctgccgaagcctggggcagagccgatgatgtgattaagatccactggcaggaaaagaagtccaacaccatcctgggcagccaggaaggcaacaccatgaagaccaacgacacctacatgaagttcagctggctgaccgtgcccgagaagtccctggacaaagaacacagatgcatcgtgcggcacgaaaacaacaagaacggcgtggaccaggaaatcatcttcccacccatcaagaccgatgtgattacaatggaccccaaggacaactgctccaaggacgccaacgataccctgctgctccagctgaccaacaccagcgcctactacatgtacttgttgctgctgctgaagtccgtggtgtacttcgccatcatcacatgctgcctgctgatggctatggtcaagcggaaggacagccggggaagggccaagcgatctggatctggagcaacaaacttctcactactcaaacaagcaggtgacgtggaggagaatcccgggcctactagtatggactggatttggcgcatccttttccttgtcggcgctgctaccggcgcgcattccgggccccagctccagctgcaagagtctggacctggcctggtcaagcctagcgagacactgagcctgacctgtaccgtgtccggcgatagcatcagcagcggcgattactactggggctggatcagacagcctcctggcaaaggactggaatggatcggccacatctactacagcggcgtgacctactacaaccccagcctgaagtccagagtgaccatcagcgtggacaccagccggaaccagttctccctgaagctgtctagcgtgacagccgccgataccgccgtgtactactgcaccagagaggacagcagcaactggcggagtagaggccagggaacactggtcacagttagctctggatccggcggaggcggaagtggaggcggaggatctggcggcggaggctctttcgaagaagtccaacttgtggagtctggagggggcctggtgcagcccggcggctctctcagactgtcttgtgcggcaagcggctacaccttcacctcttactggatagaatgggtgaggcaggcacctggaaagggactggagtggattggagagattctgccaggagggggagatacaaattacaatgaaatcttcaaggggcgggccaccttttcagcggataccagcaagaatacagcttacctgcagatgaatagcctccgggcagaagataccgctgtttattattgcacgagacgggtgccaataagactggactattgggggcaagggactcttgtcaccgtcagttcaacgcgtatccagaaccctgatcctgccgtgtaccagctgcgggatagcaagagcagcgacaagagcgtgtgtctgttcaccgacttcgacagccagaccaacgtgtcccagagcaaggactccgacgtgtacatcaccgataagtgcgtgctggacatgcggagcatggacttcaagagcaactccgccgtggcctggtccaacaagtccgatttcgcctgcgccaacgccttcaacaacagcattatccccgaggacacattcttcccaagccccgagagcagcgactccaccgaccacgtgaagcccaaagagacagagaacaccaagcagcccagcaagagctgccacaagcccaaggccatcgtgcacaccgagaaagtgaacatgatgagcctgaccgtgctgggcctgcggatgctgttcgccaaaaccgtggccgtgaacttcctgctgaccgccaagctgttcttcctcctcaccgcc

SEQ ID NO: 37881 - DNA, 3006 bp, synthetic construct
  source 1..3006: mol_type = other DNA
atggccttaccagtgaccgccttgctcctgccgctggccttgctgctccacgccgccaggccggaagtgcagctggttgaatctggcggaggactggttcagcctggcggatctctgagactgtcttgtgccgccagcggcttcagcttcagcgacttttggatgagctgggtccgacaggcccctggcaaaggacttgaatgggtcgccacaatcagccaggccggcagcgagaaggactacgtggactctgtgaagggcagattcaccatcagccgggacaacgccaagaagtccctgtacctccagatgaacagcctgagagccgaggacaccgccgtgtactattgtgcctctggcgtgtacagcttcgactacagaggccagggcaccctggtcacagtctcttctggtaccggcggaggcggatctggcggcggaggtagcggtggcggaggatctgaattcgacatccagttgacccagtcccccagctcactcagcgccagtgtgggggaccgggtgaccattacctgtaaagccagtcagagtgtggactatgacggggatagcttcctgaattggtatcagcagaagcctggcaaagccccaaagctgctgatctacgctgcatctaatctggagtcaggcgtgccttccaggttctccggtagtgggtctgggaccgatttcacattgaccatttcatccctccaacccgaggatttcgctacatattactgtcagcagtccaatgaggaccctctcacctttggccagggcaccaaagttgaaattaagagactcgagatccagaaccctgatcctgccgtgtaccagctgcgggatagcaagagcagcgacaagagcgtgtgtctgttcaccgacttcgacagccagaccaacgtgtcccagagcaaggactccgacgtgtacatcaccgataagtgcgtgctggacatgcggagcatggacttcaagagcaactccgccgtggcctggtccaacaagtccgatttcgcctgcgccaacgccttcaacaacagcattatccccgaggacacattcttcccaagccccgagagcagcgactccaccgaccacgtgaagcccaaagagacagagaacaccaagcagcccagcaagagctgccacaagcccaaggccatcgtgcacaccgagaaagtgaacatgatgagcctgaccgtgctgggcctgcggatgctgttcgccaaaaccgtggccgtgaacttcctgctgaccgccaagctgttcttcctcctcaccgcccgcgccaagagaagcggatctggcgtgaagcagaccctgaatttcgacctgctgaagctggctggcgacgtggaatccaacccaggccctactagtatggactggatttggcgcatccttttccttgtcggcgctgctaccggcgcgcattccgggccccagctccagctgcaagagtctggacctggcctggtcaagcctagcgagacactgagcctgacctgtaccgtgtccggcgatagcatcagcagcggcgattactactggggctggatcagacagcctcctggcaaaggactggaatggatcggccacatctactacagcggcgtgacctactacaaccccagcctgaagtccagagtgaccatcagcgtggacaccagccggaaccagttctccctgaagctgtctagcgtgacagccgccgataccgccgtgtactactgcaccagagaggacagcagcaactggcggagtagaggccagggaacactggtcacagttagctctggatccggcggaggcggaagtggaggcggaggatctggcggcggaggctctttcgaagaagtccaacttgtggagtctggagggggcctggtgcagcccggcggctctctcagactgtcttgtgcggcaagcggctacaccttcacctcttactggatagaatgggtgaggcaggcacctggaaagggactggagtggattggagagattctgccaggagggggagatacaaattacaatgaaatcttcaaggggcgggccaccttttcagcggataccagcaagaatacagcttacctgcagatgaatagcctccgggcagaagataccgctgtttattattgcacgagacgggtgccaataagactggactattgggggcaagggactcttgtcaccgtcagttcaacgcgtgaggacctgaagaacgtgttcccacctgaggtggccgtgttcgagcctagcgaggccgagatcagccacacccagaaagccaccctcgtgtgcctggctaccggcttctaccccgaccatgtggaactgtcttggtgggtcaacggcaaagaggtgcacagcggcgtgtgtaccgacccccagccactgaaagaacagcccgccctgaacgacagccggtactgcctgagcagcagactgagagtgtccgccaccttctggcagaacccccggaaccacttcagatgccaggtgcagttctacggcctgagcgagaacgacgagtggacccaggacagagccaagcccgtgacccagatcgtgtctgccgaagcctggggcagagccgatgatgtgattaagatccactggcaggaaaagaagtccaacaccatcctgggcagccaggaaggcaacaccatgaagaccaacgacacctacatgaagttcagctggctgaccgtgcccgagaagtccctggacaaagaacacagatgcatcgtgcggcacgaaaacaacaagaacggcgtggaccaggaaatcatcttcccacccatcaagaccgatgtgattacaatggaccccaaggacaactgctccaaggacgccaacgataccctgctgctccagctgaccaacaccagcgcctactacatgtacttgttgctgctgctgaagtccgtggtgtacttcgccatcatcacatgctgcctgctgatggctatggtcaagcggaaggacagccgggga

SEQ ID NO: 37882 - DNA, 2172 bp, synthetic construct
  source 1..2172: mol_type = other DNA
atggccttaccagtgaccgccttgctcctgccgctggccttgctgctccacgccgccaggccggacatccagttgacccagtcccccagctcactcagcgccagtgtgggggaccgggtgaccattacctgtaaagccagtcagagtgtggactatgacggggatagcttcctgaattggtatcagcagaagcctggcaaagccccaaagctgctgatctacgctgcatctaatctggagtcaggcgtgccttccaggttctccggtagtgggtctgggaccgatttcacattgaccatttcatccctccaacccgaggatttcgctacatattactgtcagcagtccaatgaggaccctctcacctttggccagggcaccaaagttgaaattaagagactcgaggacctgaagaacgtgttcccacctgaggtggccgtgttcgagcctagcgaggccgagatcagccacacccagaaagccaccctcgtgtgcctggctaccggcttctaccccgaccatgtggaactgtcttggtgggtcaacggcaaagaggtgcacagcggcgtgtgtaccgacccccagccactgaaagaacagcccgccctgaacgacagccggtactgcctgagcagcagactgagagtgtccgccaccttctggcagaacccccggaaccacttcagatgccaggtgcagttctacggcctgagcgagaacgacgagtggacccaggacagagccaagcccgtgacccagatcgtgtctgccgaagcctggggcagagccgatgatgtgattaagatccactggcaggaaaagaagtccaacaccatcctgggcagccaggaaggcaacaccatgaagaccaacgacacctacatgaagttcagctggctgaccgtgcccgagaagtccctggacaaagaacacagatgcatcgtgcggcacgaaaacaacaagaacggcgtggaccaggaaatcatcttcccacccatcaagaccgatgtgattacaatggaccccaaggacaactgctccaaggacgccaacgataccctgctgctccagctgaccaacaccagcgcctactacatgtacttgttgctgctgctgaagtccgtggtgtacttcgccatcatcacatgctgcctgctgcggagaaccgccttctgctgcaacggcgagaagtctagggccaagcgatctggatctggagcaacaaacttctcactactcaaacaagcaggtgacgtggaggagaatcccgggcctactagtatggactggatttggcgcatccttttccttgtcggcgctgctaccggcgcgcattccttcgaagaagtccaacttgtggagtctggagggggcctggtgcagcccggcggctctctcagactgtcttgtgcggcaagcggctacaccttcacctcttactggatagaatgggtgaggcaggcacctggaaagggactggagtggattggagagattctgccaggagggggagatacaaattacaatgaaatcttcaaggggcgggccaccttttcagcggataccagcaagaatacagcttacctgcagatgaatagcctccgggcagaagataccgctgtttattattgcacgagacgggtgccaataagactggactattgggggcaagggactcttgtcaccgtcagttcaacgcgtatccagaaccctgatcctgccgtgtaccagctgcgggatagcaagagcagcgacaagagcgtgtgtctgttcaccgacttcgacagccagaccaacgtgtcccagagcaaggactccgacgtgtacatcaccgataagtgcgtgctggacatgcggagcatggacttcaagagcaactccgccgtggcctggtccaacaagtccgatttcgcctgcgccaacgccttcaacaacagcattatccccgaggacacattcttcccaagccccgagagcagcgactccaccgaccacgtgaagcccaaagagacagagaacaccaagcagcccagcaagagctgccacaagcccaaggccatcgtgcacaccgagaaagtgaacatgatgagcctgaccgtgctgggcctgcggatgctgttcgccaaaaccgtggccgtgaacttcctgctgaccgccaagctgttcttcctc

SEQ ID NO: 37883 - DNA, 2184 bp, synthetic construct
  source 1..2184: mol_type = other DNA
atggccttaccagtgaccgccttgctcctgccgctggccttgctgctccacgccgccaggccggacatccagttgacccagtcccccagctcactcagcgccagtgtgggggaccgggtgaccattacctgtaaagccagtcagagtgtggactatgacggggatagcttcctgaattggtatcagcagaagcctggcaaagccccaaagctgctgatctacgctgcatctaatctggagtcaggcgtgccttccaggttctccggtagtgggtctgggaccgatttcacattgaccatttcatccctccaacccgaggatttcgctacatattactgtcagcagtccaatgaggaccctctcacctttggccagggcaccaaagttgaaattaagagactcgagatccagaaccctgatcctgccgtgtaccagctgcgggatagcaagagcagcgacaagagcgtgtgtctgttcaccgacttcgacagccagaccaacgtgtcccagagcaaggactccgacgtgtacatcaccgataagtgcgtgctggacatgcggagcatggacttcaagagcaactccgccgtggcctggtccaacaagtccgatttcgcctgcgccaacgccttcaacaacagcattatccccgaggacacattcttcccaagccccgagagcagcgactccaccgaccacgtgaagcccaaagagacagagaacaccaagcagcccagcaagagctgccacaagcccaaggccatcgtgcacaccgagaaagtgaacatgatgagcctgaccgtgctgggcctgcggatgctgttcgccaaaaccgtggccgtgaacttcctgctgaccgccaagctgttcttcctccgcgccaagagaagcggatctggcgtgaagcagaccctgaatttcgacctgctgaagctggctggcgacgtggaatccaacccaggccctactagtatggactggatttggcgcatccttttccttgtcggcgctgctaccggcgcgcattccttcgaagaagtccaacttgtggagtctggagggggcctggtgcagcccggcggctctctcagactgtcttgtgcggcaagcggctacaccttcacctcttactggatagaatgggtgaggcaggcacctggaaagggactggagtggattggagagattctgccaggagggggagatacaaattacaatgaaatcttcaaggggcgggccaccttttcagcggataccagcaagaatacagcttacctgcagatgaatagcctccgggcagaagataccgctgtttattattgcacgagacgggtgccaataagactggactattgggggcaagggactcttgtcaccgtcagttcaacgcgtgaggacctgaagaacgtgttcccacctgaggtggccgtgttcgagcctagcgaggccgagatcagccacacccagaaagccaccctcgtgtgcctggctaccggcttctaccccgaccatgtggaactgtcttggtgggtcaacggcaaagaggtgcacagcggcgtgtgtaccgacccccagccactgaaagaacagcccgccctgaacgacagccggtactgcctgagcagcagactgagagtgtccgccaccttctggcagaacccccggaaccacttcagatgccaggtgcagttctacggcctgagcgagaacgacgagtggacccaggacagagccaagcccgtgacccagatcgtgtctgccgaagcctggggcagagccgatgatgtgattaagatccactggcaggaaaagaagtccaacaccatcctgggcagccaggaaggcaacaccatgaagaccaacgacacctacatgaagttcagctggctgaccgtgcccgagaagtccctggacaaagaacacagatgcatcgtgcggcacgaaaacaacaagaacggcgtggaccaggaaatcatcttcccacccatcaagaccgatgtgattacaatggaccccaaggacaactgctccaaggacgccaacgataccctgctgctccagctgaccaacaccagcgcctactacatgtacttgttgctgctgctgaagtccgtggtgtacttcgccatcatcacatgctgcctgctgcggagaaccgccttctgctgcaacggcgagaagtct

SEQ ID NO: 37884 - DNA, 2577 bp, synthetic construct
  source 1..2577: mol_type = other DNA
atggccttaccagtgaccgccttgctcctgccgctggccttgctgctccacgccgccaggccggaagtgcagctggttgaatctggcggaggactggttcagcctggcggatctctgagactgtcttgtgccgccagcggcttcagcttcagcgacttttggatgagctgggtccgacaggcccctggcaaaggacttgaatgggtcgccacaatcagccaggccggcagcgagaaggactacgtggactctgtgaagggcagattcaccatcagccgggacaacgccaagaagtccctgtacctccagatgaacagcctgagagccgaggacaccgccgtgtactattgtgcctctggcgtgtacagcttcgactacagaggccagggcaccctggtcacagtctcttctggtaccggcggaggcggatctggcggcggaggtagcggtggcggaggatctgaattcgacatccagttgacccagtcccccagctcactcagcgccagtgtgggggaccgggtgaccattacctgtaaagccagtcagagtgtggactatgacggggatagcttcctgaattggtatcagcagaagcctggcaaagccccaaagctgctgatctacgctgcatctaatctggagtcaggcgtgccttccaggttctccggtagtgggtctgggaccgatttcacattgaccatttcatccctccaacccgaggatttcgctacatattactgtcagcagtccaatgaggaccctctcacctttggccagggcaccaaagttgaaattaagagactcgaggacctgaagaacgtgttcccacctgaggtggccgtgttcgagcctagcgaggccgagatcagccacacccagaaagccaccctcgtgtgcctggctaccggcttctaccccgaccatgtggaactgtcttggtgggtcaacggcaaagaggtgcacagcggcgtgtgtaccgacccccagccactgaaagaacagcccgccctgaacgacagccggtactgcctgagcagcagactgagagtgtccgccaccttctggcagaacccccggaaccacttcagatgccaggtgcagttctacggcctgagcgagaacgacgagtggacccaggacagagccaagcccgtgacccagatcgtgtctgccgaagcctggggcagagccgatgatgtgattaagatccactggcaggaaaagaagtccaacaccatcctgggcagccaggaaggcaacaccatgaagaccaacgacacctacatgaagttcagctggctgaccgtgcccgagaagtccctggacaaagaacacagatgcatcgtgcggcacgaaaacaacaagaacggcgtggaccaggaaatcatcttcccacccatcaagaccgatgtgattacaatggaccccaaggacaactgctccaaggacgccaacgataccctgctgctccagctgaccaacaccagcgcctactacatgtacttgttgctgctgctgaagtccgtggtgtacttcgccatcatcacatgctgcctgctgcggagaaccgccttctgctgcaacggcgagaagtctagggccaagcgatctggatctggagcaacaaacttctcactactcaaacaagcaggtgacgtggaggagaatcccgggcctactagtatggactggatttggcgcatccttttccttgtcggcgctgctaccggcgcgcattccttcgaagaagtccaacttgtggagtctggagggggcctggtgcagcccggcggctctctcagactgtcttgtgcggcaagcggctacaccttcacctcttactggatagaatgggtgaggcaggcacctggaaagggactggagtggattggagagattctgccaggagggggagatacaaattacaatgaaatcttcaaggggcgggccaccttttcagcggataccagcaagaatacagcttacctgcagatgaatagcctccgggcagaagataccgctgtttattattgcacgagacgggtgccaataagactggactattgggggcaagggactcttgtcaccgtcagttcaacgcgtatccagaaccctgatcctgccgtgtaccagctgcgggatagcaagagcagcgacaagagcgtgtgtctgttcaccgacttcgacagccagaccaacgtgtcccagagcaaggactccgacgtgtacatcaccgataagtgcgtgctggacatgcggagcatggacttcaagagcaactccgccgtggcctggtccaacaagtccgatttcgcctgcgccaacgccttcaacaacagcattatccccgaggacacattcttcccaagccccgagagcagcgactccaccgaccacgtgaagcccaaagagacagagaacaccaagcagcccagcaagagctgccacaagcccaaggccatcgtgcacaccgagaaagtgaacatgatgagcctgaccgtgctgggcctgcggatgctgttcgccaaaaccgtggccgtgaacttcctgctgaccgccaagctgttcttcctc

SEQ ID NO: 37885 - DNA, 2988 bp, synthetic construct
  source 1..2988: mol_type = other DNA
atggccttaccagtgaccgccttgctcctgccgctggccttgctgctccacgccgccaggccggaagtgcagctggttgaatctggcggaggactggttcagcctggcggatctctgagactgtcttgtgccgccagcggcttcagcttcagcgacttttggatgagctgggtccgacaggcccctggcaaaggacttgaatgggtcgccacaatcagccaggccggcagcgagaaggactacgtggactctgtgaagggcagattcaccatcagccgggacaacgccaagaagtccctgtacctccagatgaacagcctgagagccgaggacaccgccgtgtactattgtgcctctggcgtgtacagcttcgactacagaggccagggcaccctggtcacagtctcttctggtaccggcggaggcggatctggcggcggaggtagcggtggcggaggatctgaattcgacatccagttgacccagtcccccagctcactcagcgccagtgtgggggaccgggtgaccattacctgtaaagccagtcagagtgtggactatgacggggatagcttcctgaattggtatcagcagaagcctggcaaagccccaaagctgctgatctacgctgcatctaatctggagtcaggcgtgccttccaggttctccggtagtgggtctgggaccgatttcacattgaccatttcatccctccaacccgaggatttcgctacatattactgtcagcagtccaatgaggaccctctcacctttggccagggcaccaaagttgaaattaagagactcgaggacctgaagaacgtgttcccacctgaggtggccgtgttcgagcctagcgaggccgagatcagccacacccagaaagccaccctcgtgtgcctggctaccggcttctaccccgaccatgtggaactgtcttggtgggtcaacggcaaagaggtgcacagcggcgtgtgtaccgacccccagccactgaaagaacagcccgccctgaacgacagccggtactgcctgagcagcagactgagagtgtccgccaccttctggcagaacccccggaaccacttcagatgccaggtgcagttctacggcctgagcgagaacgacgagtggacccaggacagagccaagcccgtgacccagatcgtgtctgccgaagcctggggcagagccgatgatgtgattaagatccactggcaggaaaagaagtccaacaccatcctgggcagccaggaaggcaacaccatgaagaccaacgacacctacatgaagttcagctggctgaccgtgcccgagaagtccctggacaaagaacacagatgcatcgtgcggcacgaaaacaacaagaacggcgtggaccaggaaatcatcttcccacccatcaagaccgatgtgattacaatggaccccaaggacaactgctccaaggacgccaacgataccctgctgctccagctgaccaacaccagcgcctactacatgtacttgttgctgctgctgaagtccgtggtgtacttcgccatcatcacatgctgcctgctgcggagaaccgccttctgctgcaacggcgagaagtctagggccaagcgatctggatctggagcaacaaacttctcactactcaaacaagcaggtgacgtggaggagaatcccgggcctactagtatggactggatttggcgcatccttttccttgtcggcgctgctaccggcgcgcattccgggccccagctccagctgcaagagtctggacctggcctggtcaagcctagcgagacactgagcctgacctgtaccgtgtccggcgatagcatcagcagcggcgattactactggggctggatcagacagcctcctggcaaaggactggaatggatcggccacatctactacagcggcgtgacctactacaaccccagcctgaagtccagagtgaccatcagcgtggacaccagccggaaccagttctccctgaagctgtctagcgtgacagccgccgataccgccgtgtactactgcaccagagaggacagcagcaactggcggagtagaggccagggaacactggtcacagttagctctggatccggcggaggcggaagtggaggcggaggatctggcggcggaggctctttcgaagaagtccaacttgtggagtctggagggggcctggtgcagcccggcggctctctcagactgtcttgtgcggcaagcggctacaccttcacctcttactggatagaatgggtgaggcaggcacctggaaagggactggagtggattggagagattctgccaggagggggagatacaaattacaatgaaatcttcaaggggcgggccaccttttcagcggataccagcaagaatacagcttacctgcagatgaatagcctccgggcagaagataccgctgtttattattgcacgagacgggtgccaataagactggactattgggggcaagggactcttgtcaccgtcagttcaacgcgtatccagaaccctgatcctgccgtgtaccagctgcgggatagcaagagcagcgacaagagcgtgtgtctgttcaccgacttcgacagccagaccaacgtgtcccagagcaaggactccgacgtgtacatcaccgataagtgcgtgctggacatgcggagcatggacttcaagagcaactccgccgtggcctggtccaacaagtccgatttcgcctgcgccaacgccttcaacaacagcattatccccgaggacacattcttcccaagccccgagagcagcgactccaccgaccacgtgaagcccaaagagacagagaacaccaagcagcccagcaagagctgccacaagcccaaggccatcgtgcacaccgagaaagtgaacatgatgagcctgaccgtgctgggcctgcggatgctgttcgccaaaaccgtggccgtgaacttcctgctgaccgccaagctgttcttcctc

SEQ ID NO: 37886 - DNA, 1866 bp, synthetic construct
  source 1..1866: mol_type = other DNA
atggccttaccagtgaccgccttgctcctgccgctggccttgctgctccacgccgccaggccggacatccagttgacccagtcccccagctcactcagcgccagtgtgggggaccgggtgaccattacctgtaaagccagtcagagtgtggactatgacggggatagcttcctgaattggtatcagcagaagcctggcaaagccccaaagctgctgatctacgctgcatctaatctggagtcaggcgtgccttccaggttctccggtagtgggtctgggaccgatttcacattgaccatttcatccctccaacccgaggatttcgctacatattactgtcagcagtccaatgaggaccctctcacctttggccagggcaccaaagttgaaattaagagactcgaggacctgaagaacgtgttcccacctgaggtggccgtgttcgagcctagcgaggccgagatcagccacacccagaaagccaccctcgtgtgcctggctaccggcttctaccccgaccatgtggaactgtcttggtgggtcaacggcaaagaggtgcacagcggcgtgtctaccgacccccagccactgaaagaacagcccgccctgaacgacagccggtactgcctgagcagcagactgagagtgtccgccaccttctggcagaacccccggaaccacttcagatgccaggtgcagttctacggcctgagcgagaacgacgagtggacccaggacagagccaagcccgtgacccagatcgtgtctgccgaagcctggggcagagccgattgcgacgtgaagctggtggaaaagagcttcgagacagacaccaacctgaacttccagaacctgagcgtgatcggcttcagaatcctgctgctgaaagtggccggctttaacctgctgatgaccctgcggctgtggtccagcagggccaagcgatctggatctggagcaacaaacttctcactactcaaacaagcaggtgacgtggaggagaatcccgggcctactagtatggactggatttggcgcatccttttccttgtcggcgctgctaccggcgcgcattccttcgaagaagtccaacttgtggagtctggagggggcctggtgcagcccggcggctctctcagactgtcttgtgcggcaagcggctacaccttcacctcttactggatagaatgggtgaggcaggcacctggaaagggactggagtggattggagagattctgccaggagggggagatacaaattacaatgaaatcttcaaggggcgggccaccttttcagcggataccagcaagaatacagcttacctgcagatgaatagcctccgggcagaagataccgctgtttattattgcacgagacgggtgccaataagactggactattgggggcaagggactcttgtcaccgtcagttcaacgcgtatccagaaccctgatcctgccgtgtaccagctgcgggatagcaagagcagcgacaagagcgtgtgtctgttcaccgacttcgacagccagaccaacgtgtcccagagcaaggactccgacgtgtacatcaccgataagaccgtgctggacatgcggagcatggacttcaagagcaactccgccgtggcctggtccaacaagtccgatttcgcctgcgccaacgccttcaacaacagcattatccccgaggacacattcttcccaagccccgagagcagctgcggctttaccagcgagagctaccagcagggcgtgctgagcgccaccatcctgtacgagatcctgctgggcaaggccaccctgtacgccgtgctggtgtctgccctggtgctgatggctatggtcaagcggaaggacagccgggga

SEQ ID NO: 37887 - DNA, 1866 bp, synthetic construct
  source 1..1866: mol_type = other DNA
atggccttaccagtgaccgccttgctcctgccgctggccttgctgctccacgccgccaggccggacatccagttgacccagtcccccagctcactcagcgccagtgtgggggaccgggtgaccattacctgtaaagccagtcagagtgtggactatgacggggatagcttcctgaattggtatcagcagaagcctggcaaagccccaaagctgctgatctacgctgcatctaatctggagtcaggcgtgccttccaggttctccggtagtgggtctgggaccgatttcacattgaccatttcatccctccaacccgaggatttcgctacatattactgtcagcagtccaatgaggaccctctcacctttggccagggcaccaaagttgaaattaagagactcgaggacctgaagaacgtgttcccacctgaggtggccgtgttcgagcctagcgaggccgagatcagccacacccagaaagccaccctcgtgtgcctggctaccggcttctaccccgaccatgtggaactgtcttggtgggtcaacggcaaagaggtgcacagcggcgtgtctaccgacccccagccactgaaagaacagcccgccctgaacgacagccggtactgcctgagcagcagactgagagtgtccgccaccttctggcagaacccccggaaccacttcagatgccaggtgcagttctacggcctgagcgagaacgacgagtggacccaggacagagccaagcccgtgacccagatcgtgtctgccgaagcctggggcagagccgattgcggctttaccagcgagagctaccagcagggcgtgctgagcgccaccaacctgagcgtgatcggcttcagaatcctgctgctgaaagtggccggctttaacctgctgatgaccctgcggctgtggtccagcagggccaagcgatctggatctggagcaacaaacttctcactactcaaacaagcaggtgacgtggaggagaatcccgggcctactagtatggactggatttggcgcatccttttccttgtcggcgctgctaccggcgcgcattccttcgaagaagtccaacttgtggagtctggagggggcctggtgcagcccggcggctctctcagactgtcttgtgcggcaagcggctacaccttcacctcttactggatagaatgggtgaggcaggcacctggaaagggactggagtggattggagagattctgccaggagggggagatacaaattacaatgaaatcttcaaggggcgggccaccttttcagcggataccagcaagaatacagcttacctgcagatgaatagcctccgggcagaagataccgctgtttattattgcacgagacgggtgccaataagactggactattgggggcaagggactcttgtcaccgtcagttcaacgcgtatccagaaccctgatcctgccgtgtaccagctgcgggatagcaagagcagcgacaagagcgtgtgtctgttcaccgacttcgacagccagaccaacgtgtcccagagcaaggactccgacgtgtacatcaccgataagaccgtgctggacatgcggagcatggacttcaagagcaactccgccgtggcctggtccaacaagtccgatttcgcctgcgccaacgccttcaacaacagcattatccccgaggacacattcttcccaagccccgagagcagctgcgacgtgaagctggtggaaaagagcttcgagacagacaccaacctgaacttccagatcctgtacgagatcctgctgggcaaggccaccctgtacgccgtgctggtgtctgccctggtgctgatggctatggtcaagcggaaggacagccgggga

SEQ ID NO: 37888 - DNA, 2178 bp, synthetic construct
  source 1..2178: mol_type = other DNA
atggccttaccagtgaccgccttgctcctgccgctggccttgctgctccacgccgccaggccggacatccagttgacccagtcccccagctcactcagcgccagtgtgggggaccgggtgaccattacctgtaaagccagtcagagtgtggactatgacggggatagcttcctgaattggtatcagcagaagcctggcaaagccccaaagctgctgatctacgctgcatctaatctggagtcaggcgtgccttccaggttctccggtagtgggtctgggaccgatttcacattgaccatttcatccctccaacccgaggatttcgctacatattactgtcagcagtccaatgaggaccctctcacctttggccagggcaccaaagttgaaattaagagactcgaggacctgaagaacgtgttcccacctgaggtggccgtgttcgagcctagcgaggccgagatcagccacacccagaaagccaccctcgtgtgcctggctaccggcttctaccccgaccatgtggaactgtcttggtgggtcaacggcaaagaggtgcacagcggcgtgtctaccgacccccagccactgaaagaacagcccgccctgaacgacagccggtactgcctgagcagcagactgagagtgtccgccaccttctggcagaacccccggaaccacttcagatgccaggtgcagttctacggcctgagcgagaacgacgagtggacccaggacagagccaagcccgtgacccagatcgtgtctgccgaagcctggggcagagccgatgatgtgattaagatccactggcaggaaaagaagtccaacaccatcctgggcagccaggaaggcaacaccatgaagaccaacgacacctacatgaagttcagctggctgaccgtgcccgagaagtccctggacaaagaacacagatgcatcgtgcggcacgaaaacaacaagaacggcgtggaccaggaaatcatcttcccacccatcaagaccgatgtgattacaatggaccccaaggacaactgctccaaggacgccaacgataccctgctgctccagctgaccaacaccagcgcctactacatgtacttgttgctgctgctgaagtccgtggtgtacttcgccatcatcacatgctgcctgctgatggctatggtcaagcggaaggacagccggggaagggccaagcgatctggatctggagcaacaaacttctcactactcaaacaagcaggtgacgtggaggagaatcccgggcctactagtatggactggatttggcgcatccttttccttgtcggcgctgctaccggcgcgcattccttcgaagaagtccaacttgtggagtctggagggggcctggtgcagcccggcggctctctcagactgtcttgtgcggcaagcggctacaccttcacctcttactggatagaatgggtgaggcaggcacctggaaagggactggagtggattggagagattctgccaggagggggagatacaaattacaatgaaatcttcaaggggcgggccaccttttcagcggataccagcaagaatacagcttacctgcagatgaatagcctccgggcagaagataccgctgtttattattgcacgagacgggtgccaataagactggactattgggggcaagggactcttgtcaccgtcagttcaacgcgtatccagaaccctgatcctgccgtgtaccagctgcgggatagcaagagcagcgacaagagcgtgtgtctgttcaccgacttcgacagccagaccaacgtgtcccagagcaaggactccgacgtgtacatcaccgataagaccgtgctggacatgcggagcatggacttcaagagcaactccgccgtggcctggtccaacaagtccgatttcgcctgcgccaacgccttcaacaacagcattatccccgaggacacattcttcccaagccccgagagcagcgactccaccgaccacgtgaagcccaaagagacagagaacaccaagcagcccagcaagagctgccacaagcccaaggccatcgtgcacaccgagaaagtgaacatgatgagcctgaccgtgctgggcctgcggatgctgttcgccaaaaccgtggccgtgaacttcctgctgaccgccaagctgttcttcctcctcaccgcc

SEQ ID NO: 37889 - DNA, 2172 bp, synthetic construct
  source 1..2172: mol_type = other DNA
atggccttaccagtgaccgccttgctcctgccgctggccttgctgctccacgccgccaggccggacatccagttgacccagtcccccagctcactcagcgccagtgtgggggaccgggtgaccattacctgtaaagccagtcagagtgtggactatgacggggatagcttcctgaattggtatcagcagaagcctggcaaagccccaaagctgctgatctacgctgcatctaatctggagtcaggcgtgccttccaggttctccggtagtgggtctgggaccgatttcacattgaccatttcatccctccaacccgaggatttcgctacatattactgtcagcagtccaatgaggaccctctcacctttggccagggcaccaaagttgaaattaagagactcgaggacctgaagaacgtgttcccacctgaggtggccgtgttcgagcctagcgaggccgagatcagccacacccagaaagccaccctcgtgtgcctggctaccggcttctaccccgaccatgtggaactgtcttggtgggtcaacggcaaagaggtgcacagcggcgtgtctaccgacccccagccactgaaagaacagcccgccctgaacgacagccggtactgcctgagcagcagactgagagtgtccgccaccttctggcagaacccccggaaccacttcagatgccaggtgcagttctacggcctgagcgagaacgacgagtggacccaggacagagccaagcccgtgacccagatcgtgtctgccgaagcctggggcagagccgatgatgtgattaagatccactggcaggaaaagaagtccaacaccatcctgggcagccaggaaggcaacaccatgaagaccaacgacacctacatgaagttcagctggctgaccgtgcccgagaagtccctggacaaagaacacagatgcatcgtgcggcacgaaaacaacaagaacggcgtggaccaggaaatcatcttcccacccatcaagaccgatgtgattacaatggaccccaaggacaactgctccaaggacgccaacgataccctgctgctccagctgaccaacaccagcgcctactacatgtacttgttgctgctgctgaagtccgtggtgtacttcgccatcatcacatgctgcctgctgcggagaaccgccttctgctgcaacggcgagaagtctagggccaagcgatctggatctggagcaacaaacttctcactactcaaacaagcaggtgacgtggaggagaatcccgggcctactagtatggactggatttggcgcatccttttccttgtcggcgctgctaccggcgcgcattccttcgaagaagtccaacttgtggagtctggagggggcctggtgcagcccggcggctctctcagactgtcttgtgcggcaagcggctacaccttcacctcttactggatagaatgggtgaggcaggcacctggaaagggactggagtggattggagagattctgccaggagggggagatacaaattacaatgaaatcttcaaggggcgggccaccttttcagcggataccagcaagaatacagcttacctgcagatgaatagcctccgggcagaagataccgctgtttattattgcacgagacgggtgccaataagactggactattgggggcaagggactcttgtcaccgtcagttcaacgcgtatccagaaccctgatcctgccgtgtaccagctgcgggatagcaagagcagcgacaagagcgtgtgtctgttcaccgacttcgacagccagaccaacgtgtcccagagcaaggactccgacgtgtacatcaccgataagaccgtgctggacatgcggagcatggacttcaagagcaactccgccgtggcctggtccaacaagtccgatttcgcctgcgccaacgccttcaacaacagcattatccccgaggacacattcttcccaagccccgagagcagcgactccaccgaccacgtgaagcccaaagagacagagaacaccaagcagcccagcaagagctgccacaagcccaaggccatcgtgcacaccgagaaagtgaacatgatgagcctgaccgtgctgggcctgcggatgctgttcgccaaaaccgtggccgtgaacttcctgctgaccgccaagctgttcttcctc

SEQ ID NO: 37890 - DNA, 2604 bp, synthetic construct
  source 1..2604: mol_type = other DNA
atggccttaccagtgaccgccttgctcctgccgctggccttgctgctccacgccgccaggccgctcgaggaggacctgaagaacgtgttcccacctgaggtggccgtgttcgagcctagcgaggccgagatcagccacacccagaaagccaccctcgtgtgcctggctaccggcttctaccccgaccatgtggaactgtcttggtgggtcaacggcaaagaggtgcacagcggcgtgtgtaccgacccccagccactgaaagaacagcccgccctgaacgacagccggtactgcctgagcagcagactgagagtgtccgccaccttctggcagaacccccggaaccacttcagatgccaggtgcagttctacggcctgagcgagaacgacgagtggacccaggacagagccaagcccgtgacccagatcgtgtctgccgaagcctggggcagagccgattgcggctttaccagcgagagctaccagcagggcgtgctgagcgccaccaacctgagcgtgatcggcttcagaatcctgctgctgaaagtggccggctttaacctgctgatgaccctgcggctgtggtccagcagggccaagcgatctggatctggagcaacaaacttctcactactcaaacaagcaggtgacgtggaggagaatcccgggcctactagcatggccttaccagtgaccgccttgctcctgccgctggccttgctgctccacgccgccaggccggacatccagttgacccagtcccccagctcactcagcgccagtgtgggggaccgggtgaccattacctgtaaagccagtcagagtgtggactatgacggggatagcttcctgaattggtatcagcagaagcctggcaaagccccaaagctgctgatctacgctgcatctaatctggagtcaggcgtgccttccaggttctccggtagtgggtctgggaccgatttcacattgaccatttcatccctccaacccgaggatttcgctacatattactgtcagcagtccaatgaggaccctctcacctttggccagggcaccaaagttgaaattaagagaggcggaggcggaagtggaggcggaggatctggcggcggaggctctgaagtccaacttgtggagtctggagggggcctggtgcagcccggcggctctctcagactgtcttgtgcggcaagcggctacaccttcacctcttactggatagaatgggtgaggcaggcacctggaaagggactggagtggattggagagattctgccaggagggggagatacaaattacaatgaaatcttcaaggggcgggccaccttttcagcggataccagcaagaatacagcttacctgcagatgaatagcctccgggcagaagataccgctgtttattattgcacgagacgggtgccaataagactggactattgggggcaagggactcttgtcaccgtcagttcaacgcgtatccagaaccctgatcctgccgtgtaccagctgcgggatagcaagagcagcgacaagagcgtgtgtctgttcaccgacttcgacagccagaccaacgtgtcccagagcaaggactccgacgtgtacatcaccgataagtgcgtgctggacatgcggagcatggacttcaagagcaactccgccgtggcctggtccaacaagtccgatttcgcctgcgccaacgccttcaacaacagcattatccccgaggacacattcttcccaagccccgagagcagctgcgacgtgaagctggtggaaaagagcttcgagacagacaccaacctgaacttccagatcctgtacgaggtgatcggcttcagaatcctgctgctgaaagtggccggctttaacctgctgatgaccctgcggctgtggtccagccgcgccaagagaagcggatctggcgtgaagcagaccctgaatttcgacctgctgaagctggctggcgacgtggaatccaacccaggcccttctagaggccatatgaccgagtacaagcccacggtgcgcctcgccacccgcgacgacgtccccagggccgtacgcaccctcgccgccgcgttcgccgactaccccgccacgcgccacaccgtcgatccggaccgccacatcgagcgggtcaccgagctgcaagaactcttcctcacgcgcgtcgggctcgacatcggcaaggtgtgggtcgcggacgacggcgccgcggtggcggtctggaccacgccggagagcgtcgaagcgggggcggtgttcgccgagatcggcccgcgcatggccgagttgagcggttcccggctggccgcgcagcaacagatggaaggcctcctggcgccgcaccggcccaaggagcccgcgtggttcctggccaccgtcggcgtctcgcccgaccaccagggcaagggtctgggcagcgccgtcgtgctccccggagtggaggcggccgagcgcgccggggtgcccgccttcctggagacctccgcgccccgcaacctccccttctacgagcggctcggcttcaccgtcaccgccgacgtcgaggtgcccgaaggaccgcgcacctggtgcatgacccgcaagcccggtgcctga

SEQ ID NO: 37891 - DNA, 2604 bp, synthetic construct
  source 1..2604: mol_type = other DNA
atggccttaccagtgaccgccttgctcctgccgctggccttgctgctccacgccgccaggccgctcgagatccagaaccctgatcctgccgtgtaccagctgcgggatagcaagagcagcgacaagagcgtgtgtctgttcaccgacttcgacagccagaccaacgtgtcccagagcaaggactccgacgtgtacatcaccgataagtgcgtgctggacatgcggagcatggacttcaagagcaactccgccgtggcctggtccaacaagtccgatttcgcctgcgccaacgccttcaacaacagcattatccccgaggacacattcttcccaagccccgagagcagctgcgacgtgaagctggtggaaaagagcttcgagacagacaccaacctgaacttccagatcctgtacgaggtgatcggcttcagaatcctgctgctgaaagtggccggctttaacctgctgatgaccctgcggctgtggtccagcagggccaagcgatctggatctggagcaacaaacttctcactactcaaacaagcaggtgacgtggaggagaatcccgggcctactagcatggccttaccagtgaccgccttgctcctgccgctggccttgctgctccacgccgccaggccggacatccagttgacccagtcccccagctcactcagcgccagtgtgggggaccgggtgaccattacctgtaaagccagtcagagtgtggactatgacggggatagcttcctgaattggtatcagcagaagcctggcaaagccccaaagctgctgatctacgctgcatctaatctggagtcaggcgtgccttccaggttctccggtagtgggtctgggaccgatttcacattgaccatttcatccctccaacccgaggatttcgctacatattactgtcagcagtccaatgaggaccctctcacctttggccagggcaccaaagttgaaattaagagaggcggaggcggaagtggaggcggaggatctggcggcggaggctctgaagtccaacttgtggagtctggagggggcctggtgcagcccggcggctctctcagactgtcttgtgcggcaagcggctacaccttcacctcttactggatagaatgggtgaggcaggcacctggaaagggactggagtggattggagagattctgccaggagggggagatacaaattacaatgaaatcttcaaggggcgggccaccttttcagcggataccagcaagaatacagcttacctgcagatgaatagcctccgggcagaagataccgctgtttattattgcacgagacgggtgccaataagactggactattgggggcaagggactcttgtcaccgtcagttcaacgcgtgaggacctgaagaacgtgttcccacctgaggtggccgtgttcgagcctagcgaggccgagatcagccacacccagaaagccaccctcgtgtgcctggctaccggcttctaccccgaccatgtggaactgtcttggtgggtcaacggcaaagaggtgcacagcggcgtgtgtaccgacccccagccactgaaagaacagcccgccctgaacgacagccggtactgcctgagcagcagactgagagtgtccgccaccttctggcagaacccccggaaccacttcagatgccaggtgcagttctacggcctgagcgagaacgacgagtggacccaggacagagccaagcccgtgacccagatcgtgtctgccgaagcctggggcagagccgattgcggctttaccagcgagagctaccagcagggcgtgctgagcgccaccaacctgagcgtgatcggcttcagaatcctgctgctgaaagtggccggctttaacctgctgatgaccctgcggctgtggtccagccgcgccaagagaagcggatctggcgtgaagcagaccctgaatttcgacctgctgaagctggctggcgacgtggaatccaacccaggcccttctagaggccatatgaccgagtacaagcccacggtgcgcctcgccacccgcgacgacgtccccagggccgtacgcaccctcgccgccgcgttcgccgactaccccgccacgcgccacaccgtcgatccggaccgccacatcgagcgggtcaccgagctgcaagaactcttcctcacgcgcgtcgggctcgacatcggcaaggtgtgggtcgcggacgacggcgccgcggtggcggtctggaccacgccggagagcgtcgaagcgggggcggtgttcgccgagatcggcccgcgcatggccgagttgagcggttcccggctggccgcgcagcaacagatggaaggcctcctggcgccgcaccggcccaaggagcccgcgtggttcctggccaccgtcggcgtctcgcccgaccaccagggcaagggtctgggcagcgccgtcgtgctccccggagtggaggcggccgagcgcgccggggtgcccgccttcctggagacctccgcgccccgcaacctccccttctacgagcggctcggcttcaccgtcaccgccgacgtcgaggtgcccgaaggaccgcgcacctggtgcatgacccgcaagcccggtgcctga

SEQ ID NO: 37892 - DNA, 2604 bp, synthetic construct; identical to SEQ ID NO: 37890
  source 1..2604: mol_type = other DNA

SEQ ID NO: 37893 - DNA, 2928 bp, synthetic construct
  source 1..2928: mol_type = other DNA
atggccttaccagtgaccgccttgctcctgccgctggccttgctgctccacgccgccaggccgctcgaggaggacctgaagaacgtgttcccacctgaggtggccgtgttcgagcctagcgaggccgagatcagccacacccagaaagccaccctcgtgtgcctggctaccggcttctaccccgaccatgtggaactgtcttggtgggtcaacggcaaagaggtgcacagcggcgtgtctaccgacccccagccactgaaagaacagcccgccctgaacgacagccggtactgcctgagcagcagactgagagtgtccgccaccttctggcagaacccccggaaccacttcagatgccaggtgcagttctacggcctgagcgagaacgacgagtggacccaggacagagccaagcccgtgacccagatcgtgtctgccgaagcctggggcagagccgatgatgtgattaagatccactggcaggaaaagaagtccaacaccatcctgggcagccaggaaggcaacaccatgaagaccaacgacacctacatgaagttcagctggctgaccgtgcccgagaagtccctggacaaagaacacagatgcatcgtgcggcacgaaaacaacaagaacggcgtggaccaggaaatcatcttcccacccatcaagaccgatgtgattacaatggaccccaaggacaactgctccaaggacgccaacgataccctgctgctccagctgaccaacaccagcgcctactacatgtacttgttgctgctgctgaagtccgtggtgtacttcgccatcatcacatgctgcctgctgatggctatggtcaagcggaaggacagccggggaagggccaagcgatctggatctggagcaacaaacttctcactactcaaacaagcaggtgacgtggaggagaatcccgggcctactagcatggccttaccagtgaccgccttgctcctgccgctggccttgctgctccacgccgccaggccggacatccagttgacccagtcccccagctcactcagcgccagtgtgggggaccgggtgaccattacctgtaaagccagtcagagtgtggactatgacggggatagcttcctgaattggtatcagcagaagcctggcaaagccccaaagctgctgatctacgctgcatctaatctggagtcaggcgtgccttccaggttctccggtagtgggtctgggaccgatttcacattgaccatttcatccctccaacccgaggatttcgctacatattactgtcagcagtccaatgaggaccctctcacctttggccagggcaccaaagttgaaattaagagaggcggaggcggaagtggaggcggaggatctggcggcggaggctctgaagtccaacttgtggagtctggagggggcctggtgcagcccggcggctctctcagactgtcttgtgcggcaagcggctacaccttcacctcttactggatagaatgggtgaggcaggcacctggaaagggactggagtggattggagagattctgccaggagggggagatacaaattacaatgaaatcttcaaggggcgggccaccttttcagcggataccagcaagaatacagcttacctgcagatgaatagcctccgggcagaagataccgctgtttattattgcacgagacgggtgccaataagactggactattgggggcaagggactcttgtcaccgtcagttcaacgcgtatccagaaccctgatcctgccgtgtaccagctgcgggatagcaagagcagcgacaagagcgtgtgtctgttcaccgacttcgacagccagaccaacgtgtcccagagcaaggactccgacgtgtacatcaccgataagaccgtgctggacatgcggagcatggacttcaagagcaactccgccgtggcctggtccaacaagtccgatttcgcctgcgccaacgccttcaacaacagcattatccccgaggacacattcttcccaagccccgagagcagcgactccaccgaccacgtgaagcccaaagagacagagaacaccaagcagcccagcaagagctgccacaagcccaaggccatcgtgcacaccgagaaagtgaacatgatgagcctgaccgtgctgggcctgcggatgctgttcgccaaaaccgtggccgtgaacttcctgctgaccgccaagctgttcttcctcctcaccgcccgcgccaagagaagcggatctggcgtgaagcagaccctgaatttcgacctgctgaagctggctggcgacgtggaatccaacccaggcccttctagaggccatatgaccgagtacaagcccacggtgcgcctcgccacccgcgacgacgtccccagggccgtacgcaccctcgccgccgcgttcgccgactaccccgccacgcgccacaccgtcgatccggaccgccacatcgagcgggtcaccgagctgcaagaactcttcctcacgcgcgtcgggctcgacatcggcaaggtgtgggtcgcggacgacggcgccgcggtggcggtctggaccacgccggagagcgtcgaagcgggggcggtgttcgccgagatcggcccgcgcatggccgagttgagcggttcccggctggccgcgcagcaacagatggaaggcctcctggcgccgcaccggcccaaggagcccgcgtggttcctggccaccgtcggcgtctcgcccgaccaccagggcaagggtctgggcagcgccgtcgtgctccccggagtggaggcggccgagcgcgccggggtgcccgccttcctggagacctccgcgccccgcaacctccccttctacgagcggctcggcttcaccgtcaccgccgacgtcgaggtgcccgaaggaccgcgcacctggtgcatgacccgcaagcccggtgcctga

SEQ ID NO: 37894 - DNA, 2928 bp, synthetic construct
  source 1..2928: mol_type = other DNA
atggccttaccagtgaccgccttgctcctgccgctggccttgctgctccacgccgccaggccgctcgagatccagaaccctgatcctgccgtgtaccagctgcgggatagcaagagcagcgacaagagcgtgtgtctgttcaccgacttcgacagccagaccaacgtgtcccagagcaaggactccgacgtgtacatcaccgataagaccgtgctggacatgcggagcatggacttcaagagcaactccgccgtggcctggtccaacaagtccgatttcgcctgcgccaacgccttcaacaacagcattatccccgaggacacattcttcccaagccccgagagcagcgactccaccgaccacgtgaagcccaaagagacagagaacaccaagcagcccagcaagagctgccacaagcccaaggccatcgtgcacaccgagaaagtgaacatgatgagcctgaccgtgctgggcctgcggatgctgttcgccaaaaccgtggccgtgaacttcctgctgaccgccaagctgttcttcctcctcaccgccagggccaagcgatctggatctggagcaacaaacttctcactactcaaacaagcaggtgacgtggaggagaatcccgggcctactagcatggccttaccagtgaccgccttgctcctgccgctggccttgctgctccacgccgccaggccggacatccagttgacccagtcccccagctcactcagcgccagtgtgggggaccgggtgaccattacctgtaaagccagtcagagtgtggactatgacggggatagcttcctgaattggtatcagcagaagcctggcaaagccccaaagctgctgatctacgctgcatctaatctggagtcaggcgtgccttccaggttctccggtagtgggtctgggaccgatttcacattgaccatttcatccctccaacccgaggatttcgctacatattactgtcagcagtccaatgaggaccctctcacctttggccagggcaccaaagttgaaattaagagaggcggaggcggaagtggaggcggaggatctggcggcggaggctctgaagtccaacttgtggagtctggagggggcctggtgcagcccggcggctctctcagactgtcttgtgcggcaagcggctacaccttcacctcttactggatagaatgggtgaggcaggcacctggaaagggactggagtggattggagagattctgccaggagggggagatacaaattacaatgaaatcttcaaggggcgggccaccttttcagcggataccagcaagaatacagcttacctgcagatgaatagcctccgggcagaagataccgctgtttattattgcacgagacgggtgccaataagactggactattgggggcaagggactcttgtcaccgtcagttcaacgcgtgaggacctgaagaacgtgttcccacctgaggtggccgtgttcgagcctagcgaggccgagatcagccacacccagaaagccaccctcgtgtgcctggctaccggcttctaccccgaccatgtggaactgtcttggtgggtcaacggcaaagaggtgcacagcggcgtgtctaccgacccccagccactgaaagaacagcccgccctgaacgacagccggtactgcctgagcagcagactgagagtgtccgccaccttctggcagaacccccggaaccacttcagatgccaggtgcagttctacggcctgagcgagaacgacgagtggacccaggacagagccaagcccgtgacccagatcgtgtctgccgaagcctggggcagagccgatgatgtgattaagatccactggcaggaaaagaagtccaacaccatcctgggcagccaggaaggcaacaccatgaagaccaacgacacctacatgaagttcagctggctgaccgtgcccgagaagtccctggacaaagaacacagatgcatcgtgcggcacgaaaacaacaagaacggcgtggaccaggaaatcatcttcccacccatcaagaccgatgtgattacaatggaccccaaggacaactgctccaaggacgccaacgataccctgctgctccagctgaccaacaccagcgcctactacatgtacttgttgctgctgctgaagtccgtggtgtacttcgccatcatcacatgctgcctgctgatggctatggtcaagcggaaggacagccggggacgcgccaagagaagcggatctggcgtgaagcagaccctgaatttcgacctgctgaagctggctggcgacgtggaatccaacccaggcccttctagaggccatatgaccgagtacaagcccacggtgcgcctcgccacccgcgacgacgtccccagggccgtacgcaccctcgccgccgcgttcgccgactaccccgccacgcgccacaccgtcgatccggaccgccacatcgagcgggtcaccgagctgcaagaactcttcctcacgcgcgtcgggctcgacatcggcaaggtgtgggtcgcggacgacggcgccgcggtggcggtctggaccacgccggagagcgtcgaagcgggggcggtgttcgccgagatcggcccgcgcatggccgagttgagcggttcccggctggccgcgcagcaacagatggaaggcctcctggcgccgcaccggcccaaggagcccgcgtggttcctggccaccgtcggcgtctcgcccgaccaccagggcaagggtctgggcagcgccgtcgtgctccccggagtggaggcggccgagcgcgccggggtgcccgccttcctggagacctccgcgccccgcaacctccccttctacgagcggctcggcttcaccgtcaccgccgacgtcgaggtgcccgaaggaccgcgcacctggtgcatgacccgcaagcccggtgcctga

SEQ ID NO: 37895 - DNA, 2922 bp, synthetic construct
  source 1..2922: mol_type = other DNA
atggccttaccagtgaccgccttgctcctgccgctggccttgctgctccacgccgccaggccgctcgaggaggacctgaagaacgtgttcccacctgaggtggccgtgttcgagcctagcgaggccgagatcagccacacccagaaagccaccctcgtgtgcctggctaccggcttctaccccgaccatgtggaactgtcttggtgggtcaacggcaaagaggtgcacagcggcgtgtgtaccgacccccagccactgaaagaacagcccgccctgaacgacagccggtactgcctgagcagcagactgagagtgtccgccaccttctggcagaacccccggaaccacttcagatgccaggtgcagttctacggcctgagcgagaacgacgagtggacccaggacagagccaagcccgtgacccagatcgtgtctgccgaagcctggggcagagccgatgatgtgattaagatccactggcaggaaaagaagtccaacaccatcctgggcagccaggaaggcaacaccatgaagaccaacgacacctacatgaagttcagctggctgaccgtgcccgagaagtccctggacaaagaacacagatgcatcgtgcggcacgaaaacaacaagaacggcgtggaccaggaaatcatcttcccacccatcaagaccgatgtgattacaatggaccccaaggacaactgctccaaggacgccaacgataccctgctgctccagctgaccaacaccagcgcctactacatgtacttgttgctgctgctgaagtccgtggtgtacttcgccatcatcacatgctgcctgctgcggagaaccgccttctgctgcaacggcgagaagtctagggccaagcgatctggatctggagcaacaaacttctcactactcaaacaagcaggtgacgtggaggagaatcccgggcctactagcatggccttaccagtgaccgccttgctcctgccgctggccttgctgctccacgccgccaggccggacatccagttgacccagtcccccagctcactcagcgccagtgtgggggaccgggtgaccattacctgtaaagccagtcagagtgtggactatgacggggatagcttcctgaattggtatcagcagaagcctggcaaagccccaaagctgctgatctacgctgcatctaatctggagtcaggcgtgccttccaggttctccggtagtgggtctgggaccgatttcacattgaccatttcatccctccaacccgaggatttcgctacatattactgtcagcagtccaatgaggaccctctcacctttggccagggcaccaaagttgaaattaagagaggcggaggcggaagtggaggcggaggatctggcggcggaggctctgaagtccaacttgtggagtctggagggggcctggtgcagcccggcggctctctcagactgtcttgtgcggcaagcggctacaccttcacctcttactggatagaatgggtgaggcaggcacctggaaagggactggagtggattggagagattctgccaggagggggagatacaaattacaatgaaatcttcaaggggcgggccaccttttcagcggataccagcaagaatacagcttacctgcagatgaatagcctccgggcagaagataccgctgtttattattgcacgagacgggtgccaataagactggactattgggggcaagggactcttgtcaccgtcagttcaacgcgtatccagaaccctgatcctgccgtgtaccagctgcgggatagcaagagcagcgacaagagcgtgtgtctgttcaccgacttcgacagccagaccaacgtgtcccagagcaaggactccgacgtgtacatcaccgataagtgcgtgctggacatgcggagcatggacttcaagagcaactccgccgtggcctggtccaacaagtccgatttcgcctgcgccaacgccttcaacaacagcattatccccgaggacacattcttcccaagccccgagagcagcgactccaccgaccacgtgaagcccaaagagacagagaacaccaagcagcccagcaagagctgccacaagcccaaggccatcgtgcacaccgagaaagtgaacatgatgagcctgaccgtgctgggcctgcggatgctgttcgccaaaaccgtggccgtgaacttcctgctgaccgccaagctgttcttcctccgcgccaagagaagcggatctggcgtgaagcagaccctgaatttcgacctgctgaagctggctggcgacgtggaatccaacccaggcccttctagaggccatatgaccgagtacaagcccacggtgcgcctcgccacccgcgacgacgtccccagggccgtacgcaccctcgccgccgcgttcgccgactaccccgccacgcgccacaccgtcgatccggaccgccacatcgagcgggtcaccgagctgcaagaactcttcctcacgcgcgtcgggctcgacatcggcaaggtgtgggtcgcggacgacggcgccgcggtggcggtctggaccacgccggagagcgtcgaagcgggggcggtgttcgccgagatcggcccgcgcatggccgagttgagcggttcccggctggccgcgcagcaacagatggaaggcctcctggcgccgcaccggcccaaggagcccgcgtggttcctggccaccgtcggcgtctcgcccgaccaccagggcaagggtctgggcagcgccgtcgtgctccccggagtggaggcggccgagcgcgccggggtgcccgccttcctggagacctccgcgccccgcaacctccccttctacgagcggctcggcttcaccgtcaccgccgacgtcgaggtgcccgaaggaccgcgcacctggtgcatgacccgcaagcccggtgcctga

SEQ ID NO: 37896 - DNA, 2922 bp, synthetic construct
  source 1..2922: mol_type = other DNA
atggccttaccagtgaccgccttgctcctgccgctggccttgctgctccacgccgccaggccgctcgagatccagaaccctgatcctgccgtgtaccagctgcgggatagcaagagcagcgacaagagcgtgtgtctgttcaccgacttcgacagccagaccaacgtgtcccagagcaaggactccgacgtgtacatcaccgataagtgcgtgctggacatgcggagcatggacttcaagagcaactccgccgtggcctggtccaacaagtccgatttcgcctgcgccaacgccttcaacaacagcattatccccgaggacacattcttcccaagccccgagagcagcgactccaccgaccacgtgaagcccaaagagacagagaacaccaagcagcccagcaagagctgccacaagcccaaggccatcgtgcacaccgagaaagtgaacatgatgagcctgaccgtgctgggcctgcggatgctgttcgccaaaaccgtggccgtgaacttcctgctgaccgccaagctgttcttcctcagggccaagcgatctggatctggagcaacaaacttctcactactcaaacaagcaggtgacgtggaggagaatcccgggcctactagcatggccttaccagtgaccgccttgctcctgccgctggccttgctgctccacgccgccaggccggacatccagttgacccagtcccccagctcactcagcgccagtgtgggggaccgggtgaccattacctgtaaagccagtcagagtgtggactatgacggggatagcttcctgaattggtatcagcagaagcctggcaaagccccaaagctgctgatctacgctgcatctaatctggagtcaggcgtgccttccaggttctccggtagtgggtctgggaccgatttcacattgaccatttcatccctccaacccgaggatttcgctacatattactgtcagcagtccaatgaggaccctctcacctttggccagggcaccaaagttgaaattaagagaggcggaggcggaagtggaggcggaggatctggcggcggaggctctgaagtccaacttgtggagtctggagggggcctggtgcagcccggcggctctctcagactgtcttgtgcggcaagcggctacaccttcacctcttactggatagaatgggtgaggcaggcacctggaaagggactggagtggattggagagattctgccaggagggggagatacaaattacaatgaaatcttcaaggggcgggccaccttttcagcggataccagcaagaatacagcttacctgcagatgaatagcctccgggcagaagataccgctgtttattattgcacgagacgggtgccaataagactggactattgggggcaagggactcttgtcaccgtcagttcaacgcgtgaggacctgaagaacgtgttcccacctgaggtggccgtgttcgagcctagcgaggccgagatcagccacacccagaaagccaccctcgtgtgcctggctaccggcttctaccccgaccatgtggaactgtcttggtgggtcaacggcaaagaggtgcacagcggcgtgtgtaccgacccccagccactgaaagaacagcccgccctgaacgacagccggtactgcctgagcagcagactgagagtgtccgccaccttctggcagaacccccggaaccacttcagatgccaggtgcagttctacggcctgagcgagaacgacgagtggacccaggacagagccaagcccgtgacccagatcgtgtctgccgaagcctggggcagagccgatgatgtgattaagatccactggcaggaaaagaagtccaacaccatcctgggcagccaggaaggcaacaccatgaagaccaacgacacctacatgaagttcagctggctgaccgtgcccgagaagtccctggacaaagaacacagatgcatcgtgcggcacgaaaacaacaagaacggcgtggaccaggaaatcatcttcccacccatcaagaccgatgtgattacaatggaccccaaggacaactgctccaaggacgccaacgataccctgctgctccagctgaccaacaccagcgcctactacatgtacttgttgctgctgctgaagtccgtggtgtacttcgccatcatcacatgctgcctgctgcggagaaccgccttctgctgcaacggcgagaagtctcgcgccaagagaagcggatctggcgtgaagcagaccctgaatttcgacctgctgaagctggctggcgacgtggaatccaacccaggcccttctagaggccatatgaccgagtacaagcccacggtgcgcctcgccacccgcgacgacgtccccagggccgtacgcaccctcgccgccgcgttcgccgactaccccgccacgcgccacaccgtcgatccggaccgccacatcgagcgggtcaccgagctgcaagaactcttcctcacgcgcgtcgggctcgacatcggcaaggtgtgggtcgcggacgacggcgccgcggtggcggtctggaccacgccggagagcgtcgaagcgggggcggtgttcgccgagatcggcccgcgcatggccgagttgagcggttcccggctggccgcgcagcaacagatggaaggcctcctggcgccgcaccggcccaaggagcccgcgtggttcctggccaccgtcggcgtctcgcccgaccaccagggcaagggtctgggcagcgccgtcgtgctccccggagtggaggcggccgagcgcgccggggtgcccgccttcctggagacctccgcgccccgcaacctccccttctacgagcggctcggcttcaccgtcaccgccgacgtcgaggtgcccgaaggaccgcgcacctggtgcatgacccgcaagcccggtgcctga

SEQ ID NO: 37897 - DNA, 2922 bp, synthetic construct
  source 1..2922: mol_type = other DNA
atggccttaccagtgaccgccttgctcctgccgctggccttgctgctccacgccgccaggccgctcgaggaggacctgaagaacgtgttcccacctgaggtggccgtgttcgagcctagcgaggccgagatcagccacacccagaaagccaccctcgtgtgcctggctaccggcttctaccccgaccatgtggaactgtcttggtgggtcaacggcaaagaggtgcacagcggcgtgtctaccgacccccagccactgaaagaacagcccgccctgaacgacagccggtactgcctgagcagcagactgagagtgtccgccaccttctggcagaacccccggaaccacttcagatgccaggtgcagttctacggcctgagcgagaacgacgagtggacccaggacagagccaagcccgtgacccagatcgtgtctgccgaagcctggggcagagccgatgatgtgattaagatccactggcaggaaaagaagtccaacaccatcctgggcagccaggaaggcaacaccatgaagaccaacgacacctacatgaagttcagctggctgaccgtgcccgagaagtccctggacaaagaacacagatgcatcgtgcggcacgaaaacaacaagaacggcgtggaccaggaaatcatcttcccacccatcaagaccgatgtgattacaatggaccccaaggacaactgctccaaggacgccaacgataccctgctgctccagctgaccaacaccagcgcctactacatgtacttgttgctgctgctgaagtccgtggtgtacttcgccatcatcacatgctgcctgctgcggagaaccgccttctgctgcaacggcgagaagtctagggccaagcgatctggatctggagcaacaaacttctcactactcaaacaagcaggtgacgtggaggagaatcccgggcctactagcatggccttaccagtgaccgccttgctcctgccgctggccttgctgctccacgccgccaggccggacatccagttgacccagtcccccagctcactcagcgccagtgtgggggaccgggtgaccattacctgtaaagccagtcagagtgtggactatgacggggatagcttcctgaattggtatcagcagaagcctggcaaagccccaaagctgctgatctacgctgcatctaatctggagtcaggcgtgccttccaggttctccggtagtgggtctgggaccgatttcacattgaccatttcatccctccaacccgaggatttcgctacatattactgtcagcagtccaatgaggaccctctcacctttggccagggcaccaaagttgaaattaagagaggcggaggcggaagtggaggcggaggatctggcggcggaggctctgaagtccaacttgtggagtctggagggggcctggtgcagcccggcggctctctcagactgtcttgtgcggcaagcggctacaccttcacctcttactggatagaatgggtgaggcaggcacctggaaagggactggagtggattggagagattctgccaggagggggagatacaaattacaatgaaatcttcaaggggcgggccaccttttcagcggataccagcaagaatacagcttacctgcagatgaatagcctccgggcagaagataccgctgtttattattgcacgagacgggtgccaataagactggactattgggggcaagggactcttgtcaccgtcagttcaacgcgtatccagaaccctgatcctgccgtgtaccagctgcgggatagcaagagcagcgacaagagcgtgtgtctgttcaccgacttcgacagccagaccaacgtgtcccagagcaaggactccgacgtgtacatcaccgataagaccgtgctggacatgcggagcatggacttcaagagcaactccgccgtggcctggtccaacaagtccgatttcgcctgcgccaacgccttcaacaacagcattatccccgaggacacattcttcccaagccccgagagcagcgactccaccgaccacgtgaagcccaaagagacagagaacaccaagcagcccagcaagagctgccacaagcccaaggccatcgtgcacaccgagaaagtgaacatgatgagcctgaccgtgctgggcctgcggatgctgttcgccaaaaccgtggccgtgaacttcctgctgaccgccaagctgttcttcctccgcgccaagagaagcggatctggcgtgaagcagaccctgaatttcgacctgctgaagctggctggcgacgtggaatccaacccaggcccttctagaggccatatgaccgagtacaagcccacggtgcgcctcgccacccgcgacgacgtccccagggccgtacgcaccctcgccgccgcgttcgccgactaccccgccacgcgccacaccgtcgatccggaccgccacatcgagcgggtcaccgagctgcaagaactcttcctcacgcgcgtcgggctcgacatcggcaaggtgtgggtcgcggacgacggcgccgcggtggcggtctggaccacgccggagagcgtcgaagcgggggcggtgttcgccgagatcggcccgcgcatggccgagttgagcggttcccggctggccgcgcagcaacagatggaaggcctcctggcgccgcaccggcccaaggagcccgcgtggttcctggccaccgtcggcgtctcgcccgaccaccagggcaagggtctgggcagcgccgtcgtgctccccggagtggaggcggccgagcgcgccggggtgcccgccttcctggagacctccgcgccccgcaacctccccttctacgagcggctcggcttcaccgtcaccgccgacgtcgaggtgcccgaaggaccgcgcacctggtgcatgacccgcaagcccggtgcctga

SEQ ID NO: 37898 - DNA, 2922 bp, synthetic construct
  source 1..2922: mol_type = other DNA
atggccttaccagtgaccgccttgctcctgccgctggccttgctgctccacgccgccaggccgctcgagatccagaaccctgatcctgccgtgtaccagctgcgggatagcaagagcagcgacaagagcgtgtgtctgttcaccgacttcgacagccagaccaacgtgtcccagagcaaggactccgacgtgtacatcaccgataagaccgtgctggacatgcggagcatggacttcaagagcaactccgccgtggcctggtccaacaagtccgatttcgcctgcgccaacgccttcaacaacagcattatccccgaggacacattcttcccaagccccgagagcagcgactccaccgaccacgtgaagcccaaagagacagagaacaccaagcagcccagcaagagctgccacaagcccaaggccatcgtgcacaccgagaaagtgaacatgatgagcctgaccgtgctgggcctgcggatgctgttcgccaaaaccgtggccgtgaacttcctgctgaccgccaagctgttcttcctcagggccaagcgatctggatctggagcaacaaacttctcactactcaaacaagcaggtgacgtggaggagaatcccgggcctactagcatggccttaccagtgaccgccttgctcctgccgctggccttgctgctccacgccgccaggccggacatccagttgacccagtcccccagctcactcagcgccagtgtgggggaccgggtgaccattacctgtaaagccagtcagagtgtggactatgacggggatagcttcctgaattggtatcagcagaagcctggcaaagccccaaagctgctgatctacgctgcatctaatctggagtcaggcgtgccttccaggttctccggtagtgggtctgggaccgatttcacattgaccatttcatccctccaacccgaggatttcgctacatattactgtcagcagtccaatgaggaccctctcacctttggccagggcaccaaagttgaaattaagagaggcggaggcggaagtggaggcggaggatctggcggcggaggctctgaagtccaacttgtggagtctggagggggcctggtgcagcccggcggctctctcagactgtcttgtgcggcaagcggctacaccttcacctcttactggatagaatgggtgaggcaggcacctggaaagggactggagtggattggagagattctgccaggagggggagatacaaattacaatgaaatcttcaaggggcgggccaccttttcagcggataccagcaagaatacagcttacctgcagatgaatagcctccgggcagaagataccgctgtttattattgcacgagacgggtgccaataagactggactattgggggcaagggactcttgtcaccgtcagttcaacgcgtgaggacctgaagaacgtgttcccacctgaggtggccgtgttcgagcctagcgaggccgagatcagccacacccagaaagccaccctcgtgtgcctggctaccggcttctaccccgaccatgtggaactgtcttggtgggtcaacggcaaagaggtgcacagcggcgtgtctaccgacccccagccactgaaagaacagcccgccctgaacgacagccggtactgcctgagcagcagactgagagtgtccgccaccttctggcagaacccccggaaccacttcagatgccaggtgcagttctacggcctgagcgagaacgacgagtggacccaggacagagccaagcccgtgacccagatcgtgtctgccgaagcctggggcagagccgatgatgtgattaagatccactggcaggaaaagaagtccaacaccatcctgggcagccaggaaggcaacaccatgaagaccaacgacacctacatgaagttcagctggctgaccgtgcccgagaagtccctggacaaagaacacagatgcatcgtgcggcacgaaaacaacaagaacggcgtggaccaggaaatcatcttcccacccatcaagaccgatgtgattacaatggaccccaaggacaactgctccaaggacgccaacgataccctgctgctccagctgaccaacaccagcgcctactacatgtacttgttgctgctgctgaagtccgtggtgtacttcgccatcatcacatgctgcctgctgcggagaaccgccttctgctgcaacggcgagaagtctcgcgccaagagaagcggatctggcgtgaagcagaccctgaatttcgacctgctgaagctggctggcgacgtggaatccaacccaggcccttctagaggccatatgaccgagtacaagcccacggtgcgcctcgccacccgcgacgacgtccccagggccgtacgcaccctcgccgccgcgttcgccgactaccccgccacgcgccacaccgtcgatccggaccgccacatcgagcgggtcaccgagctgcaagaactcttcctcacgcgcgtcgggctcgacatcggcaaggtgtgggtcgcggacgacggcgccgcggtggcggtctggaccacgccggagagcgtcgaagcgggggcggtgttcgccgagatcggcccgcgcatggccgagttgagcggttcccggctggccgcgcagcaacagatggaaggcctcctggcgccgcaccggcccaaggagcccgcgtggttcctggccaccgtcggcgtctcgcccgaccaccagggcaagggtctgggcagcgccgtcgtgctccccggagtggaggcggccgagcgcgccggggtgcccgccttcctggagacctccgcgccccgcaacctccccttctacgagcggctcggcttcaccgtcaccgccgacgtcgaggtgcccgaaggaccgcgcacctggtgcatgacccgcaagcccggtgcctga

SEQ ID NO: 37899 - DNA, 2616 bp, synthetic construct
  source 1..2616: mol_type = other DNA
atggccttaccagtgaccgccttgctcctgccgctggccttgctgctccacgccgccaggccgctcgaggaggacctgaagaacgtgttcccacctgaggtggccgtgttcgagcctagcaaggccgagatcgcccacacccagaaagccaccctcgtgtgcctggctaccggcttctaccccgaccatgtggaactgtcttggtgggtcaacggcaaagaggtgcacagcggcgtgtgtaccgacccccagccactgaaagaacagcccgccctgaacgacagccggtactgcctgagcagcagactgagagtgtccgccaccttctggcagaacccccggaaccacttcagatgccaggtgcagttctacggcctgagcgagaacgacgagtggacccaggacagagccaagcccgtgacccagatcgtgtctgccgaagcctggggcagagccgattgcggcatcaccagcgccagctaccaccagggcgtgctgagcgccaccatcctgtacgagatcctgctgggcaaggccaccctgtacgccgtgctggtgtctgccctggtgctgatggctatggtcaagcggaaggacagccggggaagggccaagcgatctggatctggagcaacaaacttctcactactcaaacaagcaggtgacgtggaggagaatcccgggcctactagcatggccttaccagtgaccgccttgctcctgccgctggccttgctgctccacgccgccaggccggacatccagttgacccagtcccccagctcactcagcgccagtgtgggggaccgggtgaccattacctgtaaagccagtcagagtgtggactatgacggggatagcttcctgaattggtatcagcagaagcctggcaaagccccaaagctgctgatctacgctgcatctaatctggagtcaggcgtgccttccaggttctccggtagtgggtctgggaccgatttcacattgaccatttcatccctccaacccgaggatttcgctacatattactgtcagcagtccaatgaggaccctctcacctttggccagggcaccaaagttgaaattaagagaggcggaggcggaagtggaggcggaggatctggcggcggaggctctgaagtccaacttgtggagtctggagggggcctggtgcagcccggcggctctctcagactgtcttgtgcggcaagcggctacaccttcacctcttactggatagaatgggtgaggcaggcacctggaaagggactggagtggattggagagattctgccaggagggggagatacaaattacaatgaaatcttcaaggggcgggccaccttttcagcggataccagcaagaatacagcttacctgcagatgaatagcctccgggcagaagataccgctgtttattattgcacgagacgggtgccaataagactggactattgggggcaagggactcttgtcaccgtcagttcaacgcgtatccagaaccctgatcctgccgtgtaccagctgcgggatagcaagagcagcgacaagagcgtgtgtctgttcaccgacttcgacagccagaccaacgtgtcccagagcaaggactccgacgtgtacatcaccgataagtgcgtgctggacatgcggagcatggacttcaagagcaactccgccgtggcctggtccaacaagtccgatttcgcctgcgccaacgccttcaacaacagcattatccccgaggacacattcttcccaagcagcgacgtgccctgcgacgtgaagctggtggaaaagagcttcgagacagacaccaacctgaacttccagaacctgagcgtgatcggcttcagaatcctgctgctgaaagtggccggctttaacctgctgatgaccctgcggctgtggtccagccgcgccaagagaagcggatctggcgtgaagcagaccctgaatttcgacctgctgaagctggctggcgacgtggaatccaacccaggcccttctagaggccatatgaccgagtacaagcccacggtgcgcctcgccacccgcgacgacgtccccagggccgtacgcaccctcgccgccgcgttcgccgactaccccgccacgcgccacaccgtcgatccggaccgccacatcgagcgggtcaccgagctgcaagaactcttcctcacgcgcgtcgggctcgacatcggcaaggtgtgggtcgcggacgacggcgccgcggtggcggtctggaccacgccggagagcgtcgaagcgggggcggtgttcgccgagatcggcccgcgcatggccgagttgagcggttcccggctggccgcgcagcaacagatggaaggcctcctggcgccgcaccggcccaaggagcccgcgtggttcctggccaccgtcggcgtctcgcccgaccaccagggcaagggtctgggcagcgccgtcgtgctccccggagtggaggcggccgagcgcgccggggtgcccgccttcctggagacctccgcgccccgcaacctccccttctacgagcggctcggcttcaccgtcaccgccgacgtcgaggtgcccgaaggaccgcgcacctggtgcatgacccgcaagcccggtgcctga

SEQ ID NO: 37900 - DNA, 2616 bp, synthetic construct
  source 1..2616: mol_type = other DNA
atggccttaccagtgaccgccttgctcctgccgctggccttgctgctccacgccgccaggccgctcgagatccagaaccctgatcctgccgtgtaccagctgcgggatagcaagagcagcgacaagagcgtgtgtctgttcaccgacttcgacagccagaccaacgtgtcccagagcaaggactccgacgtgtacatcaccgataagtgcgtgctggacatgcggagcatggacttcaagagcaactccgccgtggcctggtccaacaagtccgatttcgcctgcgccaacgccttcaacaacagcattatccccgaggacacattcttcccaagcagcgacgtgccctgcgacgtgaagctggtggaaaagagcttcgagacagacaccaacctgaacttccagaacctgagcgtgatcggcttcagaatcctgctgctgaaagtggccggctttaacctgctgatgaccctgcggctgtggtccagcagggccaagcgatctggatctggagcaacaaacttctcactactcaaacaagcaggtgacgtggaggagaatcccgggcctactagcatggccttaccagtgaccgccttgctcctgccgctggccttgctgctccacgccgccaggccggacatccagttgacccagtcccccagctcactcagcgccagtgtgggggaccgggtgaccattacctgtaaagccagtcagagtgtggactatgacggggatagcttcctgaattggtatcagcagaagcctggcaaagccccaaagctgctgatctacgctgcatctaatctggagtcaggcgtgccttccaggttctccggtagtgggtctgggaccgatttcacattgaccatttcatccctccaacccgaggatttcgctacatattactgtcagcagtccaatgaggaccctctcacctttggccagggcaccaaagttgaaattaagagaggcggaggcggaagtggaggcggaggatctggcggcggaggctctgaagtccaacttgtggagtctggagggggcctggtgcagcccggcggctctctcagactgtcttgtgcggcaagcggctacaccttcacctcttactggatagaatgggtgaggcaggcacctggaaagggactggagtggattggagagattctgccaggagggggagatacaaattacaatgaaatcttcaaggggcgggccaccttttcagcggataccagcaagaatacagcttacctgcagatgaatagcctccgggcagaagataccgctgtttattattgcacgagacgggtgccaataagactggactattgggggcaagggactcttgtcaccgtcagttcaacgcgtgaggacctgaagaacgtgttcccacctgaggtggccgtgttcgagcctagcaaggccgagatcgcccacacccagaaagccaccctcgtgtgcctggctaccggcttctaccccgaccatgtggaactgtcttggtgggtcaacggcaaagaggtgcacagcggcgtgtgtaccgacccccagccactgaaagaacagcccgccctgaacgacagccggtactgcctgagcagcagactgagagtgtccgccaccttctggcagaacccccggaaccacttcagatgccaggtgcagttctacggcctgagcgagaacgacgagtggacccaggacagagccaagcccgtgacccagatcgtgtctgccgaagcctggggcagagccgattgcggcatcaccagcgccagctaccaccagggcgtgctgagcgccaccatcctgtacgagatcctgctgggcaaggccaccctgtacgccgtgctggtgtctgccctggtgctgatggctatggtcaagcggaaggacagccggggacgcgccaagagaagcggatctggcgtgaagcagaccctgaatttcgacctgctgaagctggctggcgacgtggaatccaacccaggcccttctagaggccatatgaccgagtacaagcccacggtgcgcctcgccacccgcgacgacgtccccagggccgtacgcaccctcgccgccgcgttcgccgactaccccgccacgcgccacaccgtcgatccggaccgccacatcgagcgggtcaccgagctgcaagaactcttcctcacgcgcgtcgggctcgacatcggcaaggtgtgggtcgcggacgacggcgccgcggtggcggtctggaccacgccggagagcgtcgaagcgggggcggtgttcgccgagatcggcccgcgcatggccgagttgagcggttcccggctggccgcgcagcaacagatggaaggcctcctggcgccgcaccggcccaaggagcccgcgtggttcctggccaccgtcggcgtctcgcccgaccaccagggcaagggtctgggcagcgccgtcgtgctccccggagtggaggcggccgagcgcgccggggtgcccgccttcctggagacctccgcgccccgcaacctccccttctacgagcggctcggcttcaccgtcaccgccgacgtcgaggtgcccgaaggaccgcgcacctggtgcatgacccgcaagcccggtgcctga

SEQ ID NO: 37901 - DNA, 2295 bp, synthetic construct
  source 1..2295: mol_type = other DNA
atggccttaccagtgaccgccttgctcctgccgctggccttgctgctccacgccgccaggccgctcgagcagagttttgggttgttggaccctaaattgtgctatctgttggacggaatcctgttcatttacggagtgatcctgaccgcattgttcctgcgggttaagttttccagatccgcagacgcacccgcttaccaacaagggcagaaccaactctacaatgaacttaatttggggcggagggaagagtacgacgttctggacaaaaggaggggacgagatcccgagatgggcggaaagcctcagcgaaggaagaatccgcaagaggggctttataacgaactccagaaagataaaatggcagaagcctatagtgagattgggatgaagggagaaaggaggaggggtaaaggtcacgatgggttgtaccaaggattgagcacagccactaaagatacctatgatgcgctccacatgcaggccctgccgccaagaagggccaagcgatctggatctggagcaacaaacttctcactactcaaacaagcaggtgacgtggaggagaatcccgggcctactagcatggccttaccagtgaccgccttgctcctgccgctggccttgctgctccacgccgccaggccggacatccagttgacccagtcccccagctcactcagcgccagtgtgggggaccgggtgaccattacctgtaaagccagtcagagtgtggactatgacggggatagcttcctgaattggtatcagcagaagcctggcaaagccccaaagctgctgatctacgctgcatctaatctggagtcaggcgtgccttccaggttctccggtagtgggtctgggaccgatttcacattgaccatttcatccctccaacccgaggatttcgctacatattactgtcagcagtccaatgaggaccctctcacctttggccagggcaccaaagttgaaattaagagaggcggaggcggaagtggaggcggaggatctggcggcggaggctctgaagtccaacttgtggagtctggagggggcctggtgcagcccggcggctctctcagactgtcttgtgcggcaagcggctacaccttcacctcttactggatagaatgggtgaggcaggcacctggaaagggactggagtggattggagagattctgccaggagggggagatacaaattacaatgaaatcttcaaggggcgggccaccttttcagcggataccagcaagaatacagcttacctgcagatgaatagcctccgggcagaagataccgctgtttattattgcacgagacgggtgccaataagactggactattgggggcaagggactcttgtcaccgtcagttcaacgcgtgagctgggagagcctcagctgtgctatatcctggacgccatcctgtttctgtacggcatcgtgctgaccctgctgtactgccggctgaagatccaagtgcggaaggccgccatcaccagctacgagaaatccgacggcgtgtacaccggcctgagcaccagaaatcaagagacatacgagacactgaagcacgaaaagcctccacaacgcgccaagagaagcggatctggcgtgaagcagaccctgaatttcgacctgctgaagctggctggcgacgtggaatccaacccaggcccttctagaggccatatgaccgagtacaagcccacggtgcgcctcgccacccgcgacgacgtccccagggccgtacgcaccctcgccgccgcgttcgccgactaccccgccacgcgccacaccgtcgatccggaccgccacatcgagcgggtcaccgagctgcaagaactcttcctcacgcgcgtcgggctcgacatcggcaaggtgtgggtcgcggacgacggcgccgcggtggcggtctggaccacgccggagagcgtcgaagcgggggcggtgttcgccgagatcggcccgcgcatggccgagttgagcggttcccggctggccgcgcagcaacagatggaaggcctcctggcgccgcaccggcccaaggagcccgcgtggttcctggccaccgtcggcgtctcgcccgaccaccagggcaagggtctgggcagcgccgtcgtgctccccggagtggaggcggccgagcgcgccggggtgcccgccttcctggagacctccgcgccccgcaacctccccttctacgagcggctcggcttcaccgtcaccgccgacgtcgaggtgcccgaaggaccgcgcacctggtgcatgacccgcaagcccggtgcctga

SEQ ID NO: 37902 - DNA, 2928 bp, synthetic construct; identical to SEQ ID NO: 37893
  source 1..2928: mol_type = other DNA

SEQ ID NO: 37903 - DNA, 2928 bp, synthetic construct; identical to SEQ ID NO: 37894
  source 1..2928: mol_type = other DNA

SEQ ID NO: 37904 - DNA, 2925 bp, synthetic construct
  source 1..2925: mol_type = other DNA
atggccttaccagtgaccgccttgctcctgccgctggccttgctgctccacgccgccaggccgctcgaggaggaggacctgaagaacgtgttcccacctgaggtggccgtgttcgagcctagcgaggccgagatcagccacacccagaaagccaccctcgtgtgcctggctaccggcttctaccccgaccatgtggaactgtcttggtgggtcaacggcaaagaggtgcacagcggcgtgtgtaccgacccccagccactgaaagaacagcccgccctgaacgacagccggtactgcctgagcagcagactgagagtgtccgccaccttctggcagaacccccggaaccacttcagatgccaggtgcagttctacggcctgagcgagaacgacgagtggacccaggacagagccaagcccgtgacccagatcgtgtctgccgaagcctggggcagagccgatgatgtgattaagatccactggcaggaaaagaagtccaacaccatcctgggcagccaggaaggcaacaccatgaagaccaacgacacctacatgaagttcagctggctgaccgtgcccgagaagtccctggacaaagaacacagatgcatcgtgcggcacgaaaacaacaagaacggcgtggaccaggaaatcatcttcccacccatcaagaccgatgtgattacaatggaccccaaggacaactgctccaaggacgccaacgataccctgctgctccagctgaccaacaccagcgcctactacatgtacttgttgctgctgctgaagtccgtggtgtacttcgccatcatcacatgctgcctgctgcggagaaccgccttctgctgcaacggcgagaagtctagggccaagcgatctggatctggagcaacaaacttctcactactcaaacaagcaggtgacgtggaggagaatcccgggcctactagcatggccttaccagtgaccgccttgctcctgccgctggccttgctgctccacgccgccaggccggacatccagttgacccagtcccccagctcactcagcgccagtgtgggggaccgggtgaccattacctgtaaagccagtcagagtgtggactatgacggggatagcttcctgaattggtatcagcagaagcctggcaaagccccaaagctgctgatctacgctgcatctaatctggagtcaggcgtgccttccaggttctccggtagtgggtctgggaccgatttcacattgaccatttcatccctccaacccgaggatttcgctacatattactgtcagcagtccaatgaggaccctctcacctttggccagggcaccaaagttgaaattaagagaggcggaggcggaagtggaggcggaggatctggcggcggaggctctgaagtccaacttgtggagtctggagggggcctggtgcagcccggcggctctctcagactgtcttgtgcggcaagcggctacaccttcacctcttactggatagaatgggtgaggcaggcacctggaaagggactggagtggattggagagattctgccaggagggggagatacaaattacaatgaaatcttcaaggggcgggccaccttttcagcggataccagcaagaatacagcttacctgcagatgaatagcctccgggcagaagataccgctgtttattattgcacgagacgggtgccaataagactggactattgggggcaagggactcttgtcaccgtcagttcaacgcgtatccagaaccctgatcctgccgtgtaccagctgcgggatagcaagagcagcgacaagagcgtgtgtctgttcaccgacttcgacagccagaccaacgtgtcccagagcaaggactccgacgtgtacatcaccgataagtgcgtgctggacatgcggagcatggacttcaagagcaactccgccgtggcctggtccaacaagtccgatttcgcctgcgccaacgccttcaacaacagcattatccccgaggacacattcttcccaagccccgagagcagcgactccaccgaccacgtgaagcccaaagagacagagaacaccaagcagcccagcaagagctgccacaagcccaaggccatcgtgcacaccgagaaagtgaacatgatgagcctgaccgtgctgggcctgcggatgctgttcgccaaaaccgtggccgtgaacttcctgctgaccgccaagctgttcttcctccgcgccaagagaagcggatctggcgtgaagcagaccctgaatttcgacctgctgaagctggctggcgacgtggaatccaacccaggcccttctagaggccatatgaccgagtacaagcccacggtgcgcctcgccacccgcgacgacgtccccagggccgtacgcaccctcgccgccgcgttcgccgactaccccgccacgcgccacaccgtcgatccggaccgccacatcgagcgggtcaccgagctgcaagaactcttcctcacgcgcgtcgggctcgacatcggcaaggtgtgggtcgcggacgacggcgccgcggtggcggtctggaccacgccggagagcgtcgaagcgggggcggtgttcgccgagatcggcccgcgcatggccgagttgagcggttcccggctggccgcgcagcaacagatggaaggcctcctggcgccgcaccggcccaaggagcccgcgtggttcctggccaccgtcggcgtctcgcccgaccaccagggcaagggtctgggcagcgccgtcgtgctccccggagtggaggcggccgagcgcgccggggtgcccgccttcctggagacctccgcgccccgcaacctccccttctacgagcggctcggcttcaccgtcaccgccgacgtcgaggtgcccgaaggaccgcgcacctggtgcatgacccgcaagcccggtgcctga

SEQ ID NO: 37905 - DNA, 2925 bp, synthetic construct
  source 1..2925: mol_type = other DNA
atggccttaccagtgaccgccttgctcctgccgctggccttgctgctccacgccgccaggccgctcgagatccagaaccctgatcctgccgtgtaccagctgcgggatagcaagagcagcgacaagagcgtgtgtctgttcaccgacttcgacagccagaccaacgtgtcccagagcaaggactccgacgtgtacatcaccgataagtgcgtgctggacatgcggagcatggacttcaagagcaactccgccgtggcctggtccaacaagtccgatttcgcctgcgccaacgccttcaacaacagcattatccccgaggacacattcttcccaagccccgagagcagcgactccaccgaccacgtgaagcccaaagagacagagaacaccaagcagcccagcaagagctgccacaagcccaaggccatcgtgcacaccgagaaagtgaacatgatgagcctgaccgtgctgggcctgcggatgctgttcgccaaaaccgtggccgtgaacttcctgctgaccgccaagctgttcttcctcagggccaagcgatctggatctggagcaacaaacttctcactactcaaacaagcaggtgacgtggaggagaatcccgggcctactagcatggccttaccagtgaccgccttgctcctgccgctggccttgctgctccacgccgccaggccggacatccagttgacccagtcccccagctcactcagcgccagtgtgggggaccgggtgaccattacctgtaaagccagtcagagtgtggactatgacggggatagcttcctgaattggtatcagcagaagcctggcaaagccccaaagctgctgatctacgctgcatctaatctggagtcaggcgtgccttccaggttctccggtagtgggtctgggaccgatttcacattgaccatttcatccctccaacccgaggatttcgctacatattactgtcagcagtccaatgaggaccctctcacctttggccagggcaccaaagttgaaattaagagaggcggaggcggaagtggaggcggaggatctggcggcggaggctctgaagtccaacttgtggagtctggagggggcctggtgcagcccggcggctctctcagactgtcttgtgcggcaagcggctacaccttcacctcttactggatagaatgggtgaggcaggcacctggaaagggactggagtggattggagagattctgccaggagggggagatacaaattacaatgaaatcttcaaggggcgggccaccttttcagcggataccagcaagaatacagcttacctgcagatgaatagcctccgggcagaagataccgctgtttattattgcacgagacgggtgccaataagactggactattgggggcaagggactcttgtcaccgtcagttcaacgcgtgaggaggacctgaagaacgtgttcccacctgaggtggccgtgttcgagcctagcgaggccgagatcagccacacccagaaagccaccctcgtgtgcctggctaccggcttctaccccgaccatgtggaactgtcttggtgggtcaacggcaaagaggtgcacagcggcgtgtgtaccgacccccagccactgaaagaacagcccgccctgaacgacagccggtactgcctgagcagcagactgagagtgtccgccaccttctggcagaacccccggaaccacttcagatgccaggtgcagttctacggcctgagcgagaacgacgagtggacccaggacagagccaagcccgtgacccagatcgtgtctgccgaagcctggggcagagccgatgatgtgattaagatccactggcaggaaaagaagtccaacaccatcctgggcagccaggaaggcaacaccatgaagaccaacgacacctacatgaagttcagctggctgaccgtgcccgagaagtccctggacaaagaacacagatgcatcgtgcggcacgaaaacaacaagaacggcgtggaccaggaaatcatcttcccacccatcaagaccgatgtgattacaatggaccccaaggacaactgctccaaggacgccaacgataccctgctgctccagctgaccaacaccagcgcctactacatgtacttgttgctgctgctgaagtccgtggtgtacttcgccatcatcacatgctgcctgctgcggagaaccgccttctgctgcaacggcgagaagtctcgcgccaagagaagcggatctggcgtgaagcagaccctgaatttcgacctgctgaagctggctggcgacgtggaatccaacccaggcccttctagaggccatatgaccgagtacaagcccacggtgcgcctcgccacccgcgacgacgtccccagggccgtacgcaccctcgccgccgcgttcgccgactaccccgccacgcgccacaccgtcgatccggaccgccacatcgagcgggtcaccgagctgcaagaactcttcctcacgcgcgtcgggctcgacatcggcaaggtgtgggtcgcggacgacggcgccgcggtggcggtctggaccacgccggagagcgtcgaagcgggggcggtgttcgccgagatcggcccgcgcatggccgagttgagcggttcccggctggccgcgcagcaacagatggaaggcctcctggcgccgcaccggcccaaggagcccgcgtggttcctggccaccgtcggcgtctcgcccgaccaccagggcaagggtctgggcagcgccgtcgtgctccccggagtggaggcggccgagcgcgccggggtgcccgccttcctggagacctccgcgccccgcaacctccccttctacgagcggctcggcttcaccgtcaccgccgacgtcgaggtgcccgaaggaccgcgcacctggtgcatgacccgcaagcccggtgcctga

SEQ ID NO: 37906 - DNA, 2616 bp, synthetic construct
  source 1..2616: mol_type = other DNA
atggccttaccagtgaccgccttgctcctgccgctggccttgctgctccacgccgccaggccgctcgaggaggacctgaagaacgtgttcccacctgaggtggccgtgttcgagcctagcgaggccgagatcagccacacccagaaagccaccctcgtgtgcctggctaccggcttctaccccgaccatgtggaactgtcttggtgggtcaacggcaaagaggtgcacagcggcgtgtctaccgacccccagccactgaaagaacagcccgccctgaacgacagccggtactgcctgagcagcagactgagagtgtccgccaccttctggcagaacccccggaaccacttcagatgccaggtgcagttctacggcctgagcgagaacgacgagtggacccaggacagagccaagcccgtgacccagatcgtgtctgccgaagcctggggcagagccgattgcggctttaccagcgagagctaccagcagggcgtgctgagcgccaccaacctgagcgtgatcggcttcagaatcctgctgctgaaagtggccggctttaacctgctgatgaccctgcggctgtggtccagcagggccaagcgatctggatctggagcaacaaacttctcactactcaaacaagcaggtgacgtggaggagaatcccgggcctactagcatggccttaccagtgaccgccttgctcctgccgctggccttgctgctccacgccgccaggccggacatccagttgacccagtcccccagctcactcagcgccagtgtgggggaccgggtgaccattacctgtaaagccagtcagagtgtggactatgacggggatagcttcctgaattggtatcagcagaagcctggcaaagccccaaagctgctgatctacgctgcatctaatctggagtcaggcgtgccttccaggttctccggtagtgggtctgggaccgatttcacattgaccatttcatccctccaacccgaggatttcgctacatattactgtcagcagtccaatgaggaccctctcacctttggccagggcaccaaagttgaaattaagagaggcggaggcggaagtggaggcggaggatctggcggcggaggctctgaagtccaacttgtggagtctggagggggcctggtgcagcccggcggctctctcagactgtcttgtgcggcaagcggctacaccttcacctcttactggatagaatgggtgaggcaggcacctggaaagggactggagtggattggagagattctgccaggagggggagatacaaattacaatgaaatcttcaaggggcgggccaccttttcagcggataccagcaagaatacagcttacctgcagatgaatagcctccgggcagaagataccgctgtttattattgcacgagacgggtgccaataagactggactattgggggcaagggactcttgtcaccgtcagttcaacgcgtatccagaaccctgatcctgccgtgtaccagctgcgggatagcaagagcagcgacaagagcgtgtgtctgttcaccgacttcgacagccagaccaacgtgtcccagagcaaggactccgacgtgtacatcaccgataagaccgtgctggacatgcggagcatggacttcaagagcaactccgccgtggcctggtccaacaagtccgatttcgcctgcgccaacgccttcaacaacagcattatccccgaggacacattcttcccaagccccgagagcagctgcgacgtgaagctggtggaaaagagcttcgagacagacaccaacctgaacttccagatcctgtacgagatcctgctgggcaaggccaccctgtacgccgtgctggtgtctgccctggtgctgatggctatggtcaagcggaaggacagccggggacgcgccaagagaagcggatctggcgtgaagcagaccctgaatttcgacctgctgaagctggctggcgacgtggaatccaacccaggcccttctagaggccatatgaccgagtacaagcccacggtgcgcctcgccacccgcgacgacgtccccagggccgtacgcaccctcgccgccgcgttcgccgactaccccgccacgcgccacaccgtcgatccggaccgccacatcgagcgggtcaccgagctgcaagaactcttcctcacgcgcgtcgggctcgacatcggcaaggtgtgggtcgcggacgacggcgccgcggtggcggtctggaccacgccggagagcgtcgaagcgggggcggtgttcgccgagatcggcccgcgcatggccgagttgagcggttcccggctggccgcgcagcaacagatggaaggcctcctggcgccgcaccggcccaaggagcccgcgtggttcctggccaccgtcggcgtctcgcccgaccaccagggcaagggtctgggcagcgccgtcgtgctccccggagtggaggcggccgagcgcgccggggtgcccgccttcctggagacctccgcgccccgcaacctccccttctacgagcggctcggcttcaccgtcaccgccgacgtcgaggtgcccgaaggaccgcgcacctggtgcatgacccgcaagcccggtgcctga

SEQ ID NO: 37907 - DNA, 2616 bp, synthetic construct
  source 1..2616: mol_type = other DNA
atggccttaccagtgaccgccttgctcctgccgctggccttgctgctccacgccgccaggccgctcgagatccagaaccctgatcctgccgtgtaccagctgcgggatagcaagagcagcgacaagagcgtgtgtctgttcaccgacttcgacagccagaccaacgtgtcccagagcaaggactccgacgtgtacatcaccgataagaccgtgctggacatgcggagcatggacttcaagagcaactccgccgtggcctggtccaacaagtccgatttcgcctgcgccaacgccttcaacaacagcattatccccgaggacacattcttcccaagccccgagagcagctgcgacgtgaagctggtggaaaagagcttcgagacagacaccaacctgaacttccagatcctgtacgagatcctgctgggcaaggccaccctgtacgccgtgctggtgtctgccctggtgctgatggctatggtcaagcggaaggacagccggggaagggccaagcgatctggatctggagcaacaaacttctcactactcaaacaagcaggtgacgtggaggagaatcccgggcctactagcatggccttaccagtgaccgccttgctcctgccgctggccttgctgctccacgccgccaggccggacatccagttgacccagtcccccagctcactcagcgccagtgtgggggaccgggtgaccattacctgtaaagccagtcagagtgtggactatgacggggatagcttcctgaattggtatcagcagaagcctggcaaagccccaaagctgctgatctacgctgcatctaatctggagtcaggcgtgccttccaggttctccggtagtgggtctgggaccgatttcacattgaccatttcatccctccaacccgaggatttcgctacatattactgtcagcagtccaatgaggaccctctcacctttggccagggcaccaaagttgaaattaagagaggcggaggcggaagtggaggcggaggatctggcggcggaggctctgaagtccaacttgtggagtctggagggggcctggtgcagcccggcggctctctcagactgtcttgtgcggcaagcggctacaccttcacctcttactggatagaatgggtgaggcaggcacctggaaagggactggagtggattggagagattctgccaggagggggagatacaaattacaatgaaatcttcaaggggcgggccaccttttcagcggataccagcaagaatacagcttacctgcagatgaatagcctccgggcagaagataccgctgtttattattgcacgagacgggtgccaataagactggactattgggggcaagggactcttgtcaccgtcagttcaacgcgtgaggacctgaagaacgtgttcccacctgaggtggccgtgttcgagcctagcgaggccgagatcagccacacccagaaagccaccctcgtgtgcctggctaccggcttctaccccgaccatgtggaactgtcttggtgggtcaacggcaaagaggtgcacagcggcgtgtctaccgacccccagccactgaaagaacagcccgccctgaacgacagccggtactgcctgagcagcagactgagagtgtccgccaccttctggcagaacccccggaaccacttcagatgccaggtgcagttctacggcctgagcgagaacgacgagtggacccaggacagagccaagcccgtgacccagatcgtgtctgccgaagcctggggcagagccgattgcggctttaccagcgagagctaccagcagggcgtgctgagcgccaccaacctgagcgtgatcggcttcagaatcctgctgctgaaagtggccggctttaacctgctgatgaccctgcggctgtggtccagccgcgccaagagaagcggatctggcgtgaagcagaccctgaatttcgacctgctgaagctggctggcgacgtggaatccaacccaggcccttctagaggccatatgaccgagtacaagcccacggtgcgcctcgccacccgcgacgacgtccccagggccgtacgcaccctcgccgccgcgttcgccgactaccccgccacgcgccacaccgtcgatccggaccgccacatcgagcgggtcaccgagctgcaagaactcttcctcacgcgcgtcgggctcgacatcggcaaggtgtgggtcgcggacgacggcgccgcggtggcggtctggaccacgccggagagcgtcgaagcgggggcggtgttcgccgagatcggcccgcgcatggccgagttgagcggttcccggctggccgcgcagcaacagatggaaggcctcctggcgccgcaccggcccaaggagcccgcgtggttcctggccaccgtcggcgtctcgcccgaccaccagggcaagggtctgggcagcgccgtcgtgctccccggagtggaggcggccgagcgcgccggggtgcccgccttcctggagacctccgcgccccgcaacctccccttctacgagcggctcggcttcaccgtcaccgccgacgtcgaggtgcccgaaggaccgcgcacctggtgcatgacccgcaagcccggtgcctga

SEQ ID NO: 37908 - DNA, 2616 bp, synthetic construct
  source 1..2616: mol_type = other DNA
atggccttaccagtgaccgccttgctcctgccgctggccttgctgctccacgccgccaggccgctcgaggaggacctgaagaacgtgttcccacctgaggtggccgtgttcgagcctagcgaggccgagatcagccacacccagaaagccaccctcgtgtgcctggctaccggcttctaccccgaccatgtggaactgtcttggtgggtcaacggcaaagaggtgcacagcggcgtgtgtaccgacccccagccactgaaagaacagcccgccctgaacgacagccggtactgcctgagcagcagactgagagtgtccgccaccttctggcagaacccccggaaccacttcagatgccaggtgcagttctacggcctgagcgagaacgacgagtggacccaggacagagccaagcccgtgacccagatcgtgtctgccgaagcctggggcagagccgattgcgacgtgaagctggtggaaaagagcttcgagacagacaccaacctgaacttccagaacctgagcgtgatcggcttcagaatcctgctgctgaaagtggccggctttaacctgctgatgaccctgcggctgtggtccagcagggccaagcgatctggatctggagcaacaaacttctcactactcaaacaagcaggtgacgtggaggagaatcccgggcctactagcatggccttaccagtgaccgccttgctcctgccgctggccttgctgctccacgccgccaggccggacatccagttgacccagtcccccagctcactcagcgccagtgtgggggaccgggtgaccattacctgtaaagccagtcagagtgtggactatgacggggatagcttcctgaattggtatcagcagaagcctggcaaagccccaaagctgctgatctacgctgcatctaatctggagtcaggcgtgccttccaggttctccggtagtgggtctgggaccgatttcacattgaccatttcatccctccaacccgaggatttcgctacatattactgtcagcagtccaatgaggaccctctcacctttggccagggcaccaaagttgaaattaagagaggcggaggcggaagtggaggcggaggatctggcggcggaggctctgaagtccaacttgtggagtctggagggggcctggtgcagcccggcggctctctcagactgtcttgtgcggcaagcggctacaccttcacctcttactggatagaatgggtgaggcaggcacctggaaagggactggagtggattggagagattctgccaggagggggagatacaaattacaatgaaatcttcaaggggcgggccaccttttcagcggataccagcaagaatacagcttacctgcagatgaatagcctccgggcagaagataccgctgtttattattgcacgagacgggtgccaataagactggactattgggggcaagggactcttgtcaccgtcagttcaacgcgtatccagaaccctgatcctgccgtgtaccagctgcgggatagcaagagcagcgacaagagcgtgtgtctgttcaccgacttcgacagccagaccaacgtgtcccagagcaaggactccgacgtgtacatcaccgataagtgcgtgctggacatgcggagcatggacttcaagagcaactccgccgtggcctggtccaacaagtccgatttcgcctgcgccaacgccttcaacaacagcattatccccgaggacacattcttcccaagccccgagagcagctgcggctttaccagcgagagctaccagcagggcgtgctgagcgccaccatcctgtacgagatcctgctgggcaaggccaccctgtacgccgtgctggtgtctgccctggtgctgatggctatggtcaagcggaaggacagccggggacgcgccaagagaagcggatctggcgtgaagcagaccctgaatttcgacctgctgaagctggctggcgacgtggaatccaacccaggcccttctagaggccatatgaccgagtacaagcccacggtgcgcctcgccacccgcgacgacgtccccagggccgtacgcaccctcgccgccgcgttcgccgactaccccgccacgcgccacaccgtcgatccggaccgccacatcgagcgggtcaccgagctgcaagaactcttcctcacgcgcgtcgggctcgacatcggcaaggtgtgggtcgcggacgacggcgccgcggtggcggtctggaccacgccggagagcgtcgaagcgggggcggtgttcgccgagatcggcccgcgcatggccgagttgagcggttcccggctggccgcgcagcaacagatggaaggcctcctggcgccgcaccggcccaaggagcccgcgtggttcctggccaccgtcggcgtctcgcccgaccaccagggcaagggtctgggcagcgccgtcgtgctccccggagtggaggcggccgagcgcgccggggtgcccgccttcctggagacctccgcgccccgcaacctccccttctacgagcggctcggcttcaccgtcaccgccgacgtcgaggtgcccgaaggaccgcgcacctggtgcatgacccgcaagcccggtgcctga

SEQ ID NO: 37909 - DNA, 2616 bp, synthetic construct
  source 1..2616: mol_type = other DNA
atggccttaccagtgaccgccttgctcctgccgctggccttgctgctccacgccgccaggccgctcgaggaggacctgaagaacgtgttcccacctgaggtggccgtgttcgagcctagcgaggccgagatcagccacacccagaaagccaccctcgtgtgcctggctaccggcttctaccccgaccatgtggaactgtcttggtgggtcaacggcaaagaggtgcacagcggcgtgtctaccgacccccagccactgaaagaacagcccgccctgaacgacagccggtactgcctgagcagcagactgagagtgtccgccaccttctggcagaacccccggaaccacttcagatgccaggtgcagttctacggcctgagcgagaacgacgagtggacccaggacagagccaagcccgtgacccagatcgtgtctgccgaagcctggggcagagccgattgcgacgtgaagctggtggaaaagagcttcgagacagacaccaacctgaacttccagaacctgagcgtgatcggcttcagaatcctgctgctgaaagtggccggctttaacctgctgatgaccctgcggctgtggtccagcagggccaagcgatctggatctggagcaacaaacttctcactactcaaacaagcaggtgacgtggaggagaatcccgggcctactagcatggccttaccagtgaccgccttgctcctgccgctggccttgctgctccacgccgccaggccggacatccagttgacccagtcccccagctcactcagcgccagtgtgggggaccgggtgaccattacctgtaaagccagtcagagtgtggactatgacggggatagcttcctgaattggtatcagcagaagcctggcaaagccccaaagctgctgatctacgctgcatctaatctggagtcaggcgtgccttccaggttctccggtagtgggtctgggaccgatttcacattgaccatttcatccctccaacccgaggatttcgctacatattactgtcagcagtccaatgaggaccctctcacctttggccagggcaccaaagttgaaattaagagaggcggaggcggaagtggaggcggaggatctggcggcggaggctctgaagtccaacttgtggagtctggagggggcctggtgcagcccggcggctctctcagactgtcttgtgcggcaagcggctacaccttcacctcttactggatagaatgggtgaggcaggcacctggaaagggactggagtggattggagagattctgccaggagggggagatacaaattacaatgaaatcttcaaggggcgggccaccttttcagcggataccagcaagaatacagcttacctgcagatgaatagcctccgggcagaagataccgctgtttattattgcacgagacgggtgccaataagactggactattgggggcaagggactcttgtcaccgtcagttcaacgcgtatccagaaccctgatcctgccgtgtaccagctgcgggatagcaagagcagcgacaagagcgtgtgtctgttcaccgacttcgacagccagaccaacgtgtcccagagcaaggactccgacgtgtacatcaccgataagaccgtgctggacatgcggagcatggacttcaagagcaactccgccgtggcctggtccaacaagtccgatttcgcctgcgccaacgccttcaacaacagcattatccccgaggacacattcttcccaagccccgagagcagctgcggctttaccagcgagagctaccagcagggcgtgctgagcgccaccatcctgtacgagatcctgctgggcaaggccaccctgtacgccgtgctggtgtctgccctggtgctgatggctatggtcaagcggaaggacagccggggacgcgccaagagaagcggatctggcgtgaagcagaccctgaatttcgacctgctgaagctggctggcgacgtggaatccaacccaggcccttctagaggccatatgaccgagtacaagcccacggtgcgcctcgccacccgcgacgacgtccccagggccgtacgcaccctcgccgccgcgttcgccgactaccccgccacgcgccacaccgtcgatccggaccgccacatcgagcgggtcaccgagctgcaagaactcttcctcacgcgcgtcgggctcgacatcggcaaggtgtgggtcgcggacgacggcgccgcggtggcggtctggaccacgccggagagcgtcgaagcgggggcggtgttcgccgagatcggcccgcgcatggccgagttgagcggttcccggctggccgcgcagcaacagatggaaggcctcctggcgccgcaccggcccaaggagcccgcgtggttcctggccaccgtcggcgtctcgcccgaccaccagggcaagggtctgggcagcgccgtcgtgctccccggagtggaggcggccgagcgcgccggggtgcccgccttcctggagacctccgcgccccgcaacctccccttctacgagcggctcggcttcaccgtcaccgccgacgtcgaggtgcccgaaggaccgcgcacctggtgcatgacccgcaagcccggtgcctga

SEQ ID NO: 37910 - DNA, 2925 bp, synthetic construct
  source 1..2925: mol_type = other DNA
atggccttaccagtgaccgccttgctcctgccgctggccttgctgctccacgccgccaggccgctcgaggaggaggacctgaagaacgtgttcccacctgaggtggccgtgttcgagcctagcgaggccgagatcagccacacccagaaagccaccctcgtgtgcctggctaccggcttctaccccgaccatgtggaactgtcttggtgggtcaacggcaaagaggtgcacagcggcgtgtctaccgacccccagccactgaaagaacagcccgccctgaacgacagccggtactgcctgagcagcagactgagagtgtccgccaccttctggcagaacccccggaaccacttcagatgccaggtgcagttctacggcctgagcgagaacgacgagtggacccaggacagagccaagcccgtgacccagatcgtgtctgccgaagcctggggcagagccgatgatgtgattaagatccactggcaggaaaagaagtccaacaccatcctgggcagccaggaaggcaacaccatgaagaccaacgacacctacatgaagttcagctggctgaccgtgcccgagaagtccctggacaaagaacacagatgcatcgtgcggcacgaaaacaacaagaacggcgtggaccaggaaatcatcttcccacccatcaagaccgatgtgattacaatggaccccaaggacaactgctccaaggacgccaacgataccctgctgctccagctgaccaacaccagcgcctactacatgtacttgttgctgctgctgaagtccgtggtgtacttcgccatcatcacatgctgcctgctgcggagaaccgccttctgctgcaacggcgagaagtctagggccaagcgatctggatctggagcaacaaacttctcactactcaaacaagcaggtgacgtggaggagaatcccgggcctactagcatggccttaccagtgaccgccttgctcctgccgctggccttgctgctccacgccgccaggccggacatccagttgacccagtcccccagctcactcagcgccagtgtgggggaccgggtgaccattacctgtaaagccagtcagagtgtggactatgacggggatagcttcctgaattggtatcagcagaagcctggcaaagccccaaagctgctgatctacgctgcatctaatctggagtcaggcgtgccttccaggttctccggtagtgggtctgggaccgatttcacattgaccatttcatccctccaacccgaggatttcgctacatattactgtcagcagtccaatgaggaccctctcacctttggccagggcaccaaagttgaaattaagagaggcggaggcggaagtggaggcggaggatctggcggcggaggctctgaagtccaacttgtggagtctggagggggcctggtgcagcccggcggctctctcagactgtcttgtgcggcaagcggctacaccttcacctcttactggatagaatgggtgaggcaggcacctggaaagggactggagtggattggagagattctgccaggagggggagatacaaattacaatgaaatcttcaaggggcgggccaccttttcagcggataccagcaagaatacagcttacctgcagatgaatagcctccgggcagaagataccgctgtttattattgcacgagacgggtgccaataagactggactattgggggcaagggactcttgtcaccgtcagttcaacgcgtatccagaaccctgatcctgccgtgtaccagctgcgggatagcaagagcagcgacaagagcgtgtgtctgttcaccgacttcgacagccagaccaacgtgtcccagagcaaggactccgacgtgtacatcaccgataagaccgtgctggacatgcggagcatggacttcaagagcaactccgccgtggcctggtccaacaagtccgatttcgcctgcgccaacgccttcaacaacagcattatccccgaggacacattcttcccaagccccgagagcagcgactccaccgaccacgtgaagcccaaagagacagagaacaccaagcagcccagcaagagctgccacaagcccaaggccatcgtgcacaccgagaaagtgaacatgatgagcctgaccgtgctgggcctgcggatgctgttcgccaaaaccgtggccgtgaacttcctgctgaccgccaagctgttcttcctccgcgccaagagaagcggatctggcgtgaagcagaccctgaatttcgacctgctgaagctggctggcgacgtggaatccaacccaggcccttctagaggccatatgaccgagtacaagcccacggtgcgcctcgccacccgcgacgacgtccccagggccgtacgcaccctcgccgccgcgttcgccgactaccccgccacgcgccacaccgtcgatccggaccgccacatcgagcgggtcaccgagctgcaagaactcttcctcacgcgcgtcgggctcgacatcggcaaggtgtgggtcgcggacgacggcgccgcggtggcggtctggaccacgccggagagcgtcgaagcgggggcggtgttcgccgagatcggcccgcgcatggccgagttgagcggttcccggctggccgcgcagcaacagatggaaggcctcctggcgccgcaccggcccaaggagcccgcgtggttcctggccaccgtcggcgtctcgcccgaccaccagggcaagggtctgggcagcgccgtcgtgctccccggagtggaggcggccgagcgcgccggggtgcccgccttcctggagacctccgcgccccgcaacctccccttctacgagcggctcggcttcaccgtcaccgccgacgtcgaggtgcccgaaggaccgcgcacctggtgcatgacccgcaagcccggtgcctga

SEQ ID NO: 37911 - DNA, 2616 bp, synthetic construct
  source 1..2616: mol_type = other DNA
atggccttaccagtgaccgccttgctcctgccgctggccttgctgctccacgccgccaggccgctcgaggaggacctgaagaacgtgttcccacctgaggtggccgtgttcgagcctagcgaggccgagatcagccacacccagaaagccaccctcgtgtgcctggctaccggcttctaccccgaccatgtggaactgtcttggtgggtcaacggcaaagaggtgcacagcggcgtgtgtaccgacccccagccactgaaagaacagcccgccctgaacgacagccggtactgcctgagcagcagactgagagtgtccgccaccttctggcagaacccccggaaccacttcagatgccaggtgcagttctacggcctgagcgagaacgacgagtggacccaggacagagccaagcccgtgacccagatcgtgtctgccgaagcctggggcagagccgattgcggctttaccagcgagagctaccagcagggcgtgctgagcgccaccaacctgagcgtgatcggcttcagaatcctgctgctgaaagtggccggctttaacctgctgatgaccctgcggctgtggtccagcagggccaagcgatctggatctggagcaacaaacttctcactactcaaacaagcaggtgacgtggaggagaatcccgggcctactagcatggccttaccagtgaccgccttgctcctgccgctggccttgctgctccacgccgccaggccggacatccagttgacccagtcccccagctcactcagcgccagtgtgggggaccgggtgaccattacctgtaaagccagtcagagtgtggactatgacggggatagcttcctgaattggtatcagcagaagcctggcaaagccccaaagctgctgatctacgctgcatctaatctggagtcaggcgtgccttccaggttctccggtagtgggtctgggaccgatttcacattgaccatttcatccctccaacccgaggatttcgctacatattactgtcagcagtccaatgaggaccctctcacctttggccagggcaccaaagttgaaattaagagaggcggaggcggaagtggaggcggaggatctggcggcggaggctctgaagtccaacttgtggagtctggagggggcctggtgcagcccggcggctctctcagactgtcttgtgcggcaagcggctacaccttcacctcttactggatagaatgggtgaggcaggcacctggaaagggactggagtggattggagagattctgccaggagggggagatacaaattacaatgaaatcttcaaggggcgggccaccttttcagcggataccagcaagaatacagcttacctgcagatgaatagcctccgggcagaagataccgctgtttattattgcacgagacgggtgccaataagactggactattgggggcaagggactcttgtcaccgtcagttcaacgcgtatccagaaccctgatcctgccgtgtaccagctgcgggatagcaagagcagcgacaagagcgtgtgtctgttcaccgacttcgacagccagaccaacgtgtcccagagcaaggactccgacgtgtacatcaccgataagtgcgtgctggacatgcggagcatggacttcaagagcaactccgccgtggcctggtccaacaagtccgatttcgcctgcgccaacgccttcaacaacagcattatccccgaggacacattcttcccaagccccgagagcagctgcgacgtgaagctggtggaaaagagcttcgagacagacaccaacctgaacttccagatcctgtacgagatcctgctgggcaaggccaccctgtacgccgtgctggtgtctgccctggtgctgatggctatggtcaagcggaaggacagccggggacgcgccaagagaagcggatctggcgtgaagcagaccctgaatttcgacctgctgaagctggctggcgacgtggaatccaacccaggcccttctagaggccatatgaccgagtacaagcccacggtgcgcctcgccacccgcgacgacgtccccagggccgtacgcaccctcgccgccgcgttcgccgactaccccgccacgcgccacaccgtcgatccggaccgccacatcgagcgggtcaccgagctgcaagaactcttcctcacgcgcgtcgggctcgacatcggcaaggtgtgggtcgcggacgacggcgccgcggtggcggtctggaccacgccggagagcgtcgaagcgggggcggtgttcgccgagatcggcccgcgcatggccgagttgagcggttcccggctggccgcgcagcaacagatggaaggcctcctggcgccgcaccggcccaaggagcccgcgtggttcctggccaccgtcggcgtctcgcccgaccaccagggcaagggtctgggcagcgccgtcgtgctccccggagtggaggcggccgagcgcgccggggtgcccgccttcctggagacctccgcgccccgcaacctccccttctacgagcggctcggcttcaccgtcaccgccgacgtcgaggtgcccgaaggaccgcgcacctggtgcatgacccgcaagcccggtgcctga

SEQ ID NO: 37912 - DNA, 2703 bp, synthetic construct
  source 1..2703: mol_type = other DNA
atggccttaccagtgaccgccttgctcctgccgctggccttgctgctccacgccgccaggccgctcgaggaggaggacctgaagaacgtgttcccacctgaggtggccgtgttcgagcctagcgaggccgagatcagccacacccagaaagccaccctcgtgtgcctggctaccggcttctaccccgaccatgtggaactgtcttggtgggtcaacggcaaagaggtgcacagcggcgtgtgtaccgacccccagccactgaaagaacagcccgccctgaacgacagccggtactgcctgagcagcagactgagagtgtccgccaccttctggcagaacccccggaaccacttcagatgccaggtgcagttctacggcctgagcgagaacgacgagtggacccaggacagagccaagcccgtgacccagatcgtgtctgccgaagcctggggcagagccgattgcggctttaccagcgagagctaccagcagggcgtgctgagcgccaccaacctgagcgtgatcggcttcagaatcctgctgctgaaagtggccggctttaacctgctgatgaccctgcggctgtggtccagcagggccaagcgatctggatctggagcaacaaacttctcactactcaaacaagcaggtgacgtggaggagaatcccgggcctactagcatggccttaccagtgaccgccttgctcctgccgctggccttgctgctccacgccgccaggccggacatccagttgacccagtcccccagctcactcagcgccagtgtgggggaccgggtgaccattacctgtaaagccagtcagagtgtggactatgacggggatagcttcctgaattggtatcagcagaagcctggcaaagccccaaagctgctgatctacgctgcatctaatctggagtcaggcgtgccttccaggttctccggtagtgggtctgggaccgatttcacattgaccatttcatccctccaacccgaggatttcgctacatattactgtcagcagtccaatgaggaccctctcacctttggccagggcaccaaagttgaaattaagagaggcggaggcggaagtggaggcggaggatctggcggcggaggctctgaagtccaacttgtggagtctggagggggcctggtgcagcccggcggctctctcagactgtcttgtgcggcaagcggctacaccttcacctcttactggatagaatgggtgaggcaggcacctggaaagggactggagtggattggagagattctgccaggagggggagatacaaattacaatgaaatcttcaaggggcgggccaccttttcagcggataccagcaagaatacagcttacctgcagatgaatagcctccgggcagaagataccgctgtttattattgcacgagacgggtgccaataagactggactattgggggcaagggactcttgtcaccgtcagttcaacgcgtggacagcctaaggccaatcctaccgtgacactgttccctccaagcagcgaagaactccaggccaacaaggccacacttgtgtgcctgatctccgacttctaccctggggctgtgacagtggcttggaaggccgatggatctcctgtgaaagccggcgtggaaaccaccaagccatccaagcagagcaacaacaaatacgccgccagctcctacctgagcctgacacctgagcagtggaagtcccacagatcctacagctgccaagtgacccacgaaggcagcaccgtggaaaagacagtggcccctacagagtgcagccccatcaagaccgatgtgattacaatggaccccaaggacaactgctccaaggacgccaacgataccctgctgctccagctgaccaacaccagcgcctactacatgtacttgttgctgctgctgaagtccgtggtgtacttcgccatcatcacatgctgcctgctgcggagaaccgccttctgctgcaacggcgagaagtctcgcgccaagagaagcggatctggcgtgaagcagaccctgaatttcgacctgctgaagctggctggcgacgtggaatccaacccaggcccttctagaggccatatgaccgagtacaagcccacggtgcgcctcgccacccgcgacgacgtccccagggccgtacgcaccctcgccgccgcgttcgccgactaccccgccacgcgccacaccgtcgatccggaccgccacatcgagcgggtcaccgagctgcaagaactcttcctcacgcgcgtcgggctcgacatcggcaaggtgtgggtcgcggacgacggcgccgcggtggcggtctggaccacgccggagagcgtcgaagcgggggcggtgttcgccgagatcggcccgcgcatggccgagttgagcggttcccggctggccgcgcagcaacagatggaaggcctcctggcgccgcaccggcccaaggagcccgcgtggttcctggccaccgtcggcgtctcgcccgaccaccagggcaagggtctgggcagcgccgtcgtgctccccggagtggaggcggccgagcgcgccggggtgcccgccttcctggagacctccgcgccccgcaacctccccttctacgagcggctcggcttcaccgtcaccgccgacgtcgaggtgcccgaaggaccgcgcacctggtgcatgacccgcaagcccggtgcctga

SEQ ID NO: 37913 - DNA, 2703 bp, synthetic construct
  source 1..2703: mol_type = other DNA
atggccttaccagtgaccgccttgctcctgccgctggccttgctgctccacgccgccaggccgctcgagggacagcctaaggccaatcctaccgtgacactgttccctccaagcagcgaagaactccaggccaacaaggccacacttgtgtgcctgatctccgacttctaccctggggctgtgacagtggcttggaaggccgatggatctcctgtgaaagccggcgtggaaaccaccaagccatccaagcagagcaacaacaaatacgccgccagctcctacctgagcctgacacctgagcagtggaagtcccacagatcctacagctgccaagtgacccacgaaggcagcaccgtggaaaagacagtggcccctacagagtgcagccccatcaagaccgatgtgattacaatggaccccaaggacaactgctccaaggacgccaacgataccctgctgctccagctgaccaacaccagcgcctactacatgtacttgttgctgctgctgaagtccgtggtgtacttcgccatcatcacatgctgcctgctgcggagaaccgccttctgctgcaacggcgagaagtctagggccaagcgatctggatctggagcaacaaacttctcactactcaaacaagcaggtgacgtggaggagaatcccgggcctactagcatggccttaccagtgaccgccttgctcctgccgctggccttgctgctccacgccgccaggccggacatccagttgacccagtcccccagctcactcagcgccagtgtgggggaccgggtgaccattacctgtaaagccagtcagagtgtggactatgacggggatagcttcctgaattggtatcagcagaagcctggcaaagccccaaagctgctgatctacgctgcatctaatctggagtcaggcgtgccttccaggttctccggtagtgggtctgggaccgatttcacattgaccatttcatccctccaacccgaggatttcgctacatattactgtcagcagtccaatgaggaccctctcacctttggccagggcaccaaagttgaaattaagagaggcggaggcggaagtggaggcggaggatctggcggcggaggctctgaagtccaacttgtggagtctggagggggcctggtgcagcccggcggctctctcagactgtcttgtgcggcaagcggctacaccttcacctcttactggatagaatgggtgaggcaggcacctggaaagggactggagtggattggagagattctgccaggagggggagatacaaattacaatgaaatcttcaaggggcgggccaccttttcagcggataccagcaagaatacagcttacctgcagatgaatagcctccgggcagaagataccgctgtttattattgcacgagacgggtgccaataagactggactattgggggcaagggactcttgtcaccgtcagttcaacgcgtgaggaggacctgaagaacgtgttcccacctgaggtggccgtgttcgagcctagcgaggccgagatcagccacacccagaaagccaccctcgtgtgcctggctaccggcttctaccccgaccatgtggaactgtcttggtgggtcaacggcaaagaggtgcacagcggcgtgtgtaccgacccccagccactgaaagaacagcccgccctgaacgacagccggtactgcctgagcagcagactgagagtgtccgccaccttctggcagaacccccggaaccacttcagatgccaggtgcagttctacggcctgagcgagaacgacgagtggacccaggacagagccaagcccgtgacccagatcgtgtctgccgaagcctggggcagagccgattgcggctttaccagcgagagctaccagcagggcgtgctgagcgccaccaacctgagcgtgatcggcttcagaatcctgctgctgaaagtggccggctttaacctgctgatgaccctgcggctgtggtccagccgcgccaagagaagcggatctggcgtgaagcagaccctgaatttcgacctgctgaagctggctggcgacgtggaatccaacccaggcccttctagaggccatatgaccgagtacaagcccacggtgcgcctcgccacccgcgacgacgtccccagggccgtacgcaccctcgccgccgcgttcgccgactaccccgccacgcgccacaccgtcgatccggaccgccacatcgagcgggtcaccgagctgcaagaactcttcctcacgcgcgtcgggctcgacatcggcaaggtgtgggtcgcggacgacggcgccgcggtggcggtctggaccacgccggagagcgtcgaagcgggggcggtgttcgccgagatcggcccgcgcatggccgagttgagcggttcccggctggccgcgcagcaacagatggaaggcctcctggcgccgcaccggcccaaggagcccgcgtggttcctggccaccgtcggcgtctcgcccgaccaccagggcaagggtctgggcagcgccgtcgtgctccccggagtggaggcggccgagcgcgccggggtgcccgccttcctggagacctccgcgccccgcaacctccccttctacgagcggctcggcttcaccgtcaccgccgacgtcgaggtgcccgaaggaccgcgcacctggtgcatgacccgcaagcccggtgcctga

SEQ ID NO: 37914 - DNA, 2694 bp, synthetic construct
  source 1..2694: mol_type = other DNA
atggccttaccagtgaccgccttgctcctgccgctggccttgctgctccacgccgccaggccgctcgaggaggcctctacaaagggaccctccgtgtttcctctggctcccagcagcaagtctacaagcggaggaacagccgctctgggctgcctggtcaaggattactttcccgagcctgtgaccgtgtcctggaatagcggagcactgacaagcggcgtgcacacctttccagccgtgctgcaaagcagcggcctgtactctctgagcagcgtggtcacagtgcctagctctagcctgggcacccagacctacatctgcaatgtgaaccacaagcctagcaacaccaaggtggacaagagagtggaacccaagagctgtcccatcaagaccgatgtgattacaatggaccccaaggacaactgctccaaggacgccaacgataccctgctgctccagctgaccaacaccagcgcctactacatgtacttgttgctgctgctgaagtccgtggtgtacttcgccatcatcacatgctgcctgctgcggagaaccgccttctgctgcaacggcgagaagtctagggccaagcgatctggatctggagcaacaaacttctcactactcaaacaagcaggtgacgtggaggagaatcccgggcctactagcatggccttaccagtgaccgccttgctcctgccgctggccttgctgctccacgccgccaggccggacatccagttgacccagtcccccagctcactcagcgccagtgtgggggaccgggtgaccattacctgtaaagccagtcagagtgtggactatgacggggatagcttcctgaattggtatcagcagaagcctggcaaagccccaaagctgctgatctacgctgcatctaatctggagtcaggcgtgccttccaggttctccggtagtgggtctgggaccgatttcacattgaccatttcatccctccaacccgaggatttcgctacatattactgtcagcagtccaatgaggaccctctcacctttggccagggcaccaaagttgaaattaagagaggcggaggcggaagtggaggcggaggatctggcggcggaggctctgaagtccaacttgtggagtctggagggggcctggtgcagcccggcggctctctcagactgtcttgtgcggcaagcggctacaccttcacctcttactggatagaatgggtgaggcaggcacctggaaagggactggagtggattggagagattctgccaggagggggagatacaaattacaatgaaatcttcaaggggcgggccaccttttcagcggataccagcaagaatacagcttacctgcagatgaatagcctccgggcagaagataccgctgtttattattgcacgagacgggtgccaataagactggactattgggggcaagggactcttgtcaccgtcagttcaacgcgtggacagcctaaggccaatcctaccgtgacactgttccctccaagcagcgaagaactccaggccaacaaggccacacttgtgtgcctgatctccgacttctaccctggggctgtgacagtggcttggaaggccgatggatctcctgtgaaagccggcgtggaaaccaccaagccatccaagcagagcaacaacaaatacgccgccagctcctacctgagcctgacacctgagcagtggaagtcccacagatcctacagctgccaagtgacccacgaaggcagcaccgtggaaaagacagtggcccctacagagtgcagcgaagtgaaaaccgactccaccgaccacgtgaagcccaaagagacagagaacaccaagcagcccagcaagagctgccacaagcccaaggccatcgtgcacaccgagaaagtgaacatgatgagcctgaccgtgctgggcctgcggatgctgttcgccaaaaccgtggccgtgaacttcctgctgaccgccaagctgttcttcctccgcgccaagagaagcggatctggcgtgaagcagaccctgaatttcgacctgctgaagctggctggcgacgtggaatccaacccaggcccttctagaggccatatgaccgagtacaagcccacggtgcgcctcgccacccgcgacgacgtccccagggccgtacgcaccctcgccgccgcgttcgccgactaccccgccacgcgccacaccgtcgatccggaccgccacatcgagcgggtcaccgagctgcaagaactcttcctcacgcgcgtcgggctcgacatcggcaaggtgtgggtcgcggacgacggcgccgcggtggcggtctggaccacgccggagagcgtcgaagcgggggcggtgttcgccgagatcggcccgcgcatggccgagttgagcggttcccggctggccgcgcagcaacagatggaaggcctcctggcgccgcaccggcccaaggagcccgcgtggttcctggccaccgtcggcgtctcgcccgaccaccagggcaagggtctgggcagcgccgtcgtgctccccggagtggaggcggccgagcgcgccggggtgcccgccttcctggagacctccgcgccccgcaacctccccttctacgagcggctcggcttcaccgtcaccgccgacgtcgaggtgcccgaaggaccgcgcacctggtgcatgacccgcaagcccggtgcctga

SEQ ID NO: 37915 - DNA, 2628 bp, synthetic construct
  source 1..2628: mol_type = other DNA
atggccttaccagtgaccgccttgctcctgccgctggccttgctgctccacgccgccaggccgctcgaggaggcctctacaaagggaccctccgtgtttcctctggctcccagcagcaagtctacaagcggaggaacagccgctctgggctgcctggtcaaggattactttcccgagcctgtgaccgtgtcctggaatagcggagcactgacaagcggcgtgcacacctttccagccgtgctgcaaagcagcggcctgtactctctgagcagcgtggtcacagtgcctagctctagcctgggcacccagacctacatctgcaatgtgaaccacaagcctagcaacaccaaggtggacaagagagtggaacccaagagctgtggcagagccgattgcggctttaccagcgagagctaccagcagggcgtgctgagcgccaccatcctgtacgagatcctgctgggcaaggccaccctgtacgccgtgctggtgtctgccctggtgctgatggctatggtcaagcggaaggacagccggggaagggccaagcgatctggatctggagcaacaaacttctcactactcaaacaagcaggtgacgtggaggagaatcccgggcctactagcatggccttaccagtgaccgccttgctcctgccgctggccttgctgctccacgccgccaggccggacatccagttgacccagtcccccagctcactcagcgccagtgtgggggaccgggtgaccattacctgtaaagccagtcagagtgtggactatgacggggatagcttcctgaattggtatcagcagaagcctggcaaagccccaaagctgctgatctacgctgcatctaatctggagtcaggcgtgccttccaggttctccggtagtgggtctgggaccgatttcacattgaccatttcatccctccaacccgaggatttcgctacatattactgtcagcagtccaatgaggaccctctcacctttggccagggcaccaaagttgaaattaagagaggcggaggcggaagtggaggcggaggatctggcggcggaggctctgaagtccaacttgtggagtctggagggggcctggtgcagcccggcggctctctcagactgtcttgtgcggcaagcggctacaccttcacctcttactggatagaatgggtgaggcaggcacctggaaagggactggagtggattggagagattctgccaggagggggagatacaaattacaatgaaatcttcaaggggcgggccaccttttcagcggataccagcaagaatacagcttacctgcagatgaatagcctccgggcagaagataccgctgtttattattgcacgagacgggtgccaataagactggactattgggggcaagggactcttgtcaccgtcagttcaacgcgtggacagcctaaggccaatcctaccgtgacactgttccctccaagcagcgaagaactccaggccaacaaggccacacttgtgtgcctgatctccgacttctaccctggggctgtgacagtggcttggaaggccgatggatctcctgtgaaagccggcgtggaaaccaccaagccatccaagcagagcaacaacaaatacgccgccagctcctacctgagcctgacacctgagcagtggaagtcccacagatcctacagctgccaagtgacccacgaaggcagcaccgtggaaaagacagtggcccctacagagtgcagcatccccgaggacacattcttcccaagccccgagagcagctgcgacgtgaagctggtggaaaagagcttcgagacagacaccaacctgaacttccagaacctgagcgtgatcggcttcagaatcctgctgctgaaagtggccggctttaacctgctgatgaccctgcggctgtggtccagccgcgccaagagaagcggatctggcgtgaagcagaccctgaatttcgacctgctgaagctggctggcgacgtggaatccaacccaggcccttctagaggccatatgaccgagtacaagcccacggtgcgcctcgccacccgcgacgacgtccccagggccgtacgcaccctcgccgccgcgttcgccgactaccccgccacgcgccacaccgtcgatccggaccgccacatcgagcgggtcaccgagctgcaagaactcttcctcacgcgcgtcgggctcgacatcggcaaggtgtgggtcgcggacgacggcgccgcggtggcggtctggaccacgccggagagcgtcgaagcgggggcggtgttcgccgagatcggcccgcgcatggccgagttgagcggttcccggctggccgcgcagcaacagatggaaggcctcctggcgccgcaccggcccaaggagcccgcgtggttcctggccaccgtcggcgtctcgcccgaccaccagggcaagggtctgggcagcgccgtcgtgctccccggagtggaggcggccgagcgcgccggggtgcccgccttcctggagacctccgcgccccgcaacctccccttctacgagcggctcggcttcaccgtcaccgccgacgtcgaggtgcccgaaggaccgcgcacctggtgcatgacccgcaagcccggtgcctga

SEQ ID NO: 37916 - DNA, 2628 bp, synthetic construct
  source 1..2628: mol_type = other DNA
atggccttaccagtgaccgccttgctcctgccgctggccttgctgctccacgccgccaggccgctcgaggaggcctctacaaagggaccctccgtgtttcctctggctcccagcagcaagtctacaagcggaggaacagccgctctgggctgcctggtcaaggattactttcccgagcctgtgaccgtgtcctggaatagcggagcactgacaagcggcgtgcacacctttccagccgtgctgcaaagcagcggcctgtactctctgagcagcgtggtcacagtgcctagctctagcctgggcacccagacctacatctgcaatgtgaaccacaagcctagcaacaccaaggtggacaagagagtggaacccaagagctgtatccccgaggacacattcttcccaagccccgagagcagctgcgacgtgaagctggtggaaaagagcttcgagacagacaccaacctgaacttccagaacctgagcgtgatcggcttcagaatcctgctgctgaaagtggccggctttaacctgctgatgaccctgcggctgtggtccagcagggccaagcgatctggatctggagcaacaaacttctcactactcaaacaagcaggtgacgtggaggagaatcccgggcctactagcatggccttaccagtgaccgccttgctcctgccgctggccttgctgctccacgccgccaggccggacatccagttgacccagtcccccagctcactcagcgccagtgtgggggaccgggtgaccattacctgtaaagccagtcagagtgtggactatgacggggatagcttcctgaattggtatcagcagaagcctggcaaagccccaaagctgctgatctacgctgcatctaatctggagtcaggcgtgccttccaggttctccggtagtgggtctgggaccgatttcacattgaccatttcatccctccaacccgaggatttcgctacatattactgtcagcagtccaatgaggaccctctcacctttggccagggcaccaaagttgaaattaagagaggcggaggcggaagtggaggcggaggatctggcggcggaggctctgaagtccaacttgtggagtctggagggggcctggtgcagcccggcggctctctcagactgtcttgtgcggcaagcggctacaccttcacctcttactggatagaatgggtgaggcaggcacctggaaagggactggagtggattggagagattctgccaggagggggagatacaaattacaatgaaatcttcaaggggcgggccaccttttcagcggataccagcaagaatacagcttacctgcagatgaatagcctccgggcagaagataccgctgtttattattgcacgagacgggtgccaataagactggactattgggggcaagggactcttgtcaccgtcagttcaacgcgtggacagcctaaggccaatcctaccgtgacactgttccctccaagcagcgaagaactccaggccaacaaggccacacttgtgtgcctgatctccgacttctaccctggggctgtgacagtggcttggaaggccgatggatctcctgtgaaagccggcgtggaaaccaccaagccatccaagcagagcaacaacaaatacgccgccagctcctacctgagcctgacacctgagcagtggaagtcccacagatcctacagctgccaagtgacccacgaaggcagcaccgtggaaaagacagtggcccctacagagtgcagcggcagagccgattgcggctttaccagcgagagctaccagcagggcgtgctgagcgccaccatcctgtacgagatcctgctgggcaaggccaccctgtacgccgtgctggtgtctgccctggtgctgatggctatggtcaagcggaaggacagccggggacgcgccaagagaagcggatctggcgtgaagcagaccctgaatttcgacctgctgaagctggctggcgacgtggaatccaacccaggcccttctagaggccatatgaccgagtacaagcccacggtgcgcctcgccacccgcgacgacgtccccagggccgtacgcaccctcgccgccgcgttcgccgactaccccgccacgcgccacaccgtcgatccggaccgccacatcgagcgggtcaccgagctgcaagaactcttcctcacgcgcgtcgggctcgacatcggcaaggtgtgggtcgcggacgacggcgccgcggtggcggtctggaccacgccggagagcgtcgaagcgggggcggtgttcgccgagatcggcccgcgcatggccgagttgagcggttcccggctggccgcgcagcaacagatggaaggcctcctggcgccgcaccggcccaaggagcccgcgtggttcctggccaccgtcggcgtctcgcccgaccaccagggcaagggtctgggcagcgccgtcgtgctccccggagtggaggcggccgagcgcgccggggtgcccgccttcctggagacctccgcgccccgcaacctccccttctacgagcggctcggcttcaccgtcaccgccgacgtcgaggtgcccgaaggaccgcgcacctggtgcatgacccgcaagcccggtgcctga

SEQ ID NO: 37917 - DNA, 1866 bp, synthetic construct
  source 1..1866: mol_type = other DNA
atggccttaccagtgaccgccttgctcctgccgctggccttgctgctccacgccgccaggccggacatccagttgacccagtcccccagctcactcagcgccagtgtgggggaccgggtgaccattacctgtaaagccagtcagagtgtggactatgacggggatagcttcctgaattggtatcagcagaagcctggcaaagccccaaagctgctgatctacgctgcatctaatctggagtcaggcgtgccttccaggttctccggtagtgggtctgggaccgatttcacattgaccatttcatccctccaacccgaggatttcgctacatattactgtcagcagtccaatgaggaccctctcacctttggccagggcaccaaagttgaaattaagagactcgaggacctgaagaacgtgttcccacctgaggtggccgtgttcgagcctagcgaggccgagatcagccacacccagaaagccaccctcgtgtgcctggctaccggcttctaccccgaccatgtggaactgtcttggtgggtcaacggcaaagaggtgcacagcggcgtgtgtaccgacccccagccactgaaagaacagcccgccctgaacgacagccggtactgcctgagcagcagactgagagtgtccgccaccttctggcagaacccccggaaccacttcagatgccaggtgcagttctacggcctgagcgagaacgacgagtggacccaggacagagccaagcccgtgacccagatcgtgtctgccgaagcctggggcagagccgatagcggctttaccagcgagagctaccagcagggcgtgctgagcgccaccatcctgtacgagatcctgctgggcaaggccaccctgtacgccgtgctggtgtctgccctggtgctgatggctatggtcaagcggaaggacagccggggaagggccaagcgatctggatctggagcaacaaacttctcactactcaaacaagcaggtgacgtggaggagaatcccgggcctactagtatggactggatttggcgcatccttttccttgtcggcgctgctaccggcgcgcattccttcgaagaagtccaacttgtggagtctggagggggcctggtgcagcccggcggctctctcagactgtcttgtgcggcaagcggctacaccttcacctcttactggatagaatgggtgaggcaggcacctggaaagggactggagtggattggagagattctgccaggagggggagatacaaattacaatgaaatcttcaaggggcgggccaccttttcagcggataccagcaagaatacagcttacctgcagatgaatagcctccgggcagaagataccgctgtttattattgcacgagacgggtgccaataagactggactattgggggcaagggactcttgtcaccgtcagttcaacgcgtatccagaaccctgatcctgccgtgtaccagctgcgggatagcaagagcagcgacaagagcgtgtgtctgttcaccgacttcgacagccagaccaacgtgtcccagagcaaggactccgacgtgtacatcaccgataagtgcgtgctggacatgcggagcatggacttcaagagcaactccgccgtggcctggtccaacaagtccgatttcgcctgcgccaacgccttcaacaacagcattatccccgaggacacattcttcccaagccccgagagcagcagcgacgtgaagctggtggaaaagagcttcgagacagacaccaacctgaacttccagaacctgagcgtgatcggcttcagaatcctgctgctgaaagtggccggctttaacctgctgatgaccctgcggctgtggtccagc

SEQ ID NO: 37918 - DNA, 2706 bp, synthetic construct
  source 1..2706: mol_type = other DNA
atggccttaccagtgaccgccttgctcctgccgctggccttgctgctccacgccgccaggccggaggttcagctgcttgagtctggcggaggactggttcaacctggcggaagcctgagactgtcttgtgccgcctctggcagaaccttcagcatgggctggtatagacaggcccctggcaagggcctcgaatttgtgtctgccatcacatacagcggcggcagcccttactacgccgattctgtgaagggcagattcaccatcagccgggacaacagcaagaacaccgtgtacctccagatgaacagcctgagagccgaggacaccgccgtgtactactgtgccgccaatccaacctacggcagcgactggaatgccgagaattggggccagggcacactggtcacagtgtctagtggtaccggcggaggcggatctggcggcggaggtagcggtggcggaggatctgaattcgacatccagttgacccagtcccccagctcactcagcgccagtgtgggggaccgggtgaccattacctgtaaagccagtcagagtgtggactatgacggggatagcttcctgaattggtatcagcagaagcctggcaaagccccaaagctgctgatctacgctgcatctaatctggagtcaggcgtgccttccaggttctccggtagtgggtctgggaccgatttcacattgaccatttcatccctccaacccgaggatttcgctacatattactgtcagcagtccaatgaggaccctctcacctttggccagggcaccaaagttgaaattaagagactcgagatccagaaccctgatcctgccgtgtaccagctgcgggatagcaagagcagcgacaagagcgtgtgtctgttcaccgacttcgacagccagaccaacgtgtcccagagcaaggactccgacgtgtacatcaccgataagtgcgtgctggacatgcggagcatggacttcaagagcaactccgccgtggcctggtccaacaagtccgatttcgcctgcgccaacgccttcaacaacagcattatccccgaggacacattcttcccaagcagcgacgtgccctgcgacgtgaagctggtggaaaagagcttcgagacagacaccaacctgaacttccagaacctgagcgtgatcggcttcagaatcctgctgctgaaagtggccggctttaacctgctgatgaccctgcggctgtggtccagccgcgccaagagaagcggatctggcgtgaagcagaccctgaatttcgacctgctgaagctggctggcgacgtggaatccaacccaggccctactagtaccatggactggatttggcgcatccttttccttgtcggcgctgctaccggcacccattccgggcccgaagtgcaactggttgaatccggtggcggcctggtgcaacccggcggatctctcagacttagctgtgccgcctccggcagaaccttcacaatgggatggtacaggcaggctccagggaaagagagagagttcgtcgccgccatctctctgtctcccacactggcctactacgccgactctgtgaaaggccggttcaccatctccagagataatagcaagaacaccgtggtgctgcaaatgaactctctgagagccgaggatacagccctgtactattgtgccgctgaccggaagtccgtgatgagcatcagacccgattactggggacagggcacactggtcacagtgtctagtggatccggcggcggaggatctggcggaggcggatctgggggcggaggctctttcgaagaagtccaacttgtggagtctggagggggcctggtgcagcccggcggctctctcagactgtcttgtgcggcaagcggctacaccttcacctcttactggatagaatgggtgaggcaggcacctggaaagggactggagtggattggagagattctgccaggagggggagatacaaattacaatgaaatcttcaaggggcgggccaccttttcagcggataccagcaagaatacagcttacctgcagatgaatagcctccgggcagaagataccgctgtttattattgcacgagacgggtgccaataagactggactattgggggcaagggactcttgtcaccgtcagttcaacgcgtgaggacctgaagaacgtgttcccacctgaggtggccgtgttcgagcctagcaaggccgagatcgcccacacccagaaagccaccctcgtgtgcctggctaccggcttctaccccgaccatgtggaactgtcttggtgggtcaacggcaaagaggtgcacagcggcgtgtgtaccgacccccagccactgaaagaacagcccgccctgaacgacagccggtactgcctgagcagcagactgagagtgtccgccaccttctggcagaacccccggaaccacttcagatgccaggtgcagttctacggcctgagcgagaacgacgagtggacccaggacagagccaagcccgtgacccagatcgtgtctgccgaagcctggggcagagccgattgcggcatcaccagcgccagctaccaccagggcgtgctgagcgccaccatcctgtacgagatcctgctgggcaaggccaccctgtacgccgtgctggtgtctgccctggtgctgatggctatggtcaagcggaaggacagccggggataa

SEQ ID NO: 37919 - DNA, 2706 bp, synthetic construct
  source 1..2706: mol_type = other DNA
atggccttaccagtgaccgccttgctcctgccgctggccttgctgctccacgccgccaggccggaagtgcagctggttgaatctggcggaggactggttcaggctggcggatctctgagactgtcttgtgccgccagcggcagaacctttagcatgggctggtttagacaggcccctggcaaagagagagagttcgtcgccgccatcacatactctggcggcagcccttactacgccgactctgtgaagggcagattcaccatcagccgggacaacgccaagaacaccgtgtacctccagatgaacagcctgaagcctgaggacaccgccgtgtactactgcgccgccaatccaacatacggcagcgactggaacgccgagaattggggccagggaacccaagtgacagtgtctagcggtaccggcggaggcggatctggcggcggaggtagcggtggcggaggatctgaattcgacatccagttgacccagtcccccagctcactcagcgccagtgtgggggaccgggtgaccattacctgtaaagccagtcagagtgtggactatgacggggatagcttcctgaattggtatcagcagaagcctggcaaagccccaaagctgctgatctacgctgcatctaatctggagtcaggcgtgccttccaggttctccggtagtgggtctgggaccgatttcacattgaccatttcatccctccaacccgaggatttcgctacatattactgtcagcagtccaatgaggaccctctcacctttggccagggcaccaaagttgaaattaagagactcgagatccagaaccctgatcctgccgtgtaccagctgcgggatagcaagagcagcgacaagagcgtgtgtctgttcaccgacttcgacagccagaccaacgtgtcccagagcaaggactccgacgtgtacatcaccgataagtgcgtgctggacatgcggagcatggacttcaagagcaactccgccgtggcctggtccaacaagtccgatttcgcctgcgccaacgccttcaacaacagcattatccccgaggacacattcttcccaagcagcgacgtgccctgcgacgtgaagctggtggaaaagagcttcgagacagacaccaacctgaacttccagaacctgagcgtgatcggcttcagaatcctgctgctgaaagtggccggctttaacctgctgatgaccctgcggctgtggtccagccgcgccaagagaagcggatctggcgtgaagcagaccctgaatttcgacctgctgaagctggctggcgacgtggaatccaacccaggccctactagtaccatggactggatttggcgcatccttttccttgtcggcgctgctaccggcgcccattccgggcccgaagtgcaactggttgaatccggtggcggcctggtgcaacccggcggatctctcagacttagctgtgccgcctccggcagaaccttcacaatgggatggtacaggcaggctccagggaaagagagagagttcgtcgccgccatctctctgtctcccacactggcctactacgccgactctgtgaaaggccggttcaccatctccagagataatagcaagaacaccgtggtgctgcaaatgaactctctgagagccgaggatacagccctgtactattgtgccgctgaccggaagtccgtgatgagcatcagacccgattactggggacagggcacactggtcacagtgtctagtggatccggcggcggaggatctggcggaggcggatctgggggcggaggctctttcgaagaagtccaacttgtggagtctggagggggcctggtgcagcccggcggctctctcagactgtcttgtgcggcaagcggctacaccttcacctcttactggatagaatgggtgaggcaggcacctggaaagggactggagtggattggagagattctgccaggagggggagatacaaattacaatgaaatcttcaaggggcgggccaccttttcagcggataccagcaagaatacagcttacctgcagatgaatagcctccgggcagaagataccgctgtttattattgcacgagacgggtgccaataagactggactattgggggcaagggactcttgtcaccgtcagttcaacgcgtgaggacctgaagaacgtgttcccacctgaggtggccgtgttcgagcctagcaaggccgagatcgcccacacccagaaagccaccctcgtgtgcctggctaccggcttctaccccgaccatgtggaactgtcttggtgggtcaacggcaaagaggtgcacagcggcgtgtgtaccgacccccagccactgaaagaacagcccgccctgaacgacagccggtactgcctgagcagcagactgagagtgtccgccaccttctggcagaacccccggaaccacttcagatgccaggtgcagttctacggcctgagcgagaacgacgagtggacccaggacagagccaagcccgtgacccagatcgtgtctgccgaagcctggggcagagccgattgcggcatcaccagcgccagctaccaccagggcgtgctgagcgccaccatcctgtacgagatcctgctgggcaaggccaccctgtacgccgtgctggtgtctgccctggtgctgatggctatggtcaagcggaaggacagccggggataa

SEQ ID NO: 37920 - DNA, 2697 bp, synthetic construct
  source 1..2697: mol_type = other DNA
atggccttaccagtgaccgccttgctcctgccgctggccttgctgctccacgccgccaggccggaagtgcagctggttgaatctggcggaggactggttcaggctggcggatctctgagactgtcttgtgccgccagcggcagaacctttagcatgggctggtttagacaggcccctggcaaagagagagagttcgtcgccgccatcacatactctggcggcagcccttactacgccgactctgtgaagggcagattcaccatcagccgggacaacgccaagaacaccgtgtacctccagatgaacagcctgaagcctgaggacaccgccgtgtactactgcgccgccaatccaacatacggcagcgactggaacgccgagaattggggccagggaacccaagtgacagtgtctagcggtaccggcggaggcggatctggcggcggaggtagcggtggcggaggatctgaattcgacatccagttgacccagtcccccagctcactcagcgccagtgtgggggaccgggtgaccattacctgtaaagccagtcagagtgtggactatgacggggatagcttcctgaattggtatcagcagaagcctggcaaagccccaaagctgctgatctacgctgcatctaatctggagtcaggcgtgccttccaggttctccggtagtgggtctgggaccgatttcacattgaccatttcatccctccaacccgaggatttcgctacatattactgtcagcagtccaatgaggaccctctcacctttggccagggcaccaaagttgaaattaagagactcgaggacctgaagaacgtgttcccacctgaggtggccgtgttcgagcctagcgaggccgagatcagccacacccagaaagccaccctcgtgtgcctggctaccggcttctaccccgaccatgtggaactgtcttggtgggtcaacggcaaagaggtgcacagcggcgtgtgtaccgacccccagccactgaaagaacagcccgccctgaacgacagccggtactgcctgagcagcagactgagagtgtccgccaccttctggcagaacccccggaaccacttcagatgccaggtgcagttctacggcctgagcgagaacgacgagtggacccaggacagagccaagcccgtgacccagatcgtgtctgccgaagcctggggcagagccgattgcggctttaccagcgagagctaccagcagggcgtgctgagcgccaccatcctgtacgagatcctgctgggcaaggccaccctgtacgccgtgctggtgtctgccctggtgctgatggctatggtcaagcggaaggacagccggggaagggccaagcgatctggatctggagcaacaaacttctcactactcaaacaagcaggtgacgtggaggagaatcccgggcctactagtgccaccatggactggatttggcgcatccttttccttgtcggcgctgctaccggcgcccattccgggcccgaagtgcaactggttgaatccggtggcggcctggtgcaagcaggcggatctctcagacttagctgtgccgcctccggcagaaccttcacaatgggatggtttaggcaggctccagggaaagagagagagttcgtcgccgccatctctctgtctcccacactggcctactacgccgactctgtgaaaggccggttcaccatctccagagataatgccaagaacaccgtggtgctgcaaatgaactctctgaaacccgaggatacagccctgtactattgtgccgctgaccggaagtccgtgatgagcatcagacccgattactggggacagggcacacaagtcacagtgtcctctggatccggcggcggaggatctggcggaggcggatctgggggcggaggctctttcgaagaagtccaacttgtggagtctggagggggcctggtgcagcccggcggctctctcagactgtcttgtgcggcaagcggctacaccttcacctcttactggatagaatgggtgaggcaggcacctggaaagggactggagtggattggagagattctgccaggagggggagatacaaattacaatgaaatcttcaaggggcgggccaccttttcagcggataccagcaagaatacagcttacctgcagatgaatagcctccgggcagaagataccgctgtttattattgcacgagacgggtgccaataagactggactattgggggcaagggactcttgtcaccgtcagttcaacgcgtatccagaaccctgatcctgccgtgtaccagctgcgggatagcaagagcagcgacaagagcgtgtgtctgttcaccgacttcgacagccagaccaacgtgtcccagagcaaggactccgacgtgtacatcaccgataagtgcgtgctggacatgcggagcatggacttcaagagcaactccgccgtggcctggtccaacaagtccgatttcgcctgcgccaacgccttcaacaacagcattatccccgaggacacattcttcccaagccccgagagcagctgcgacgtgaagctggtggaaaagagcttcgagacagacaccaacctgaacttccagaacctgagcgtgatcggcttcagaatcctgctgctgaaagtggccggctttaacctgctgatgaccctgcggctgtggtccagctaa

SEQ ID NO: 37921 - DNA, 2310 bp, synthetic construct
  source 1..2310: mol_type = other DNA
atggccttaccagtgaccgccttgctcctgccgctggccttgctgctccacgccgccaggccggaagtgcagctggttgaatctggcggaggactggttcagcctggcggatctctgagactgagctgtgaagccagcggcttcgccagcgacgattacatcatcggctggttcagacaggcccctggcaaagagagagagggcgtcagctgcatcagctctaagtacgccaacaccgtgtacaccgacagcgtgaagggcagattcagactgagcagaggcaccgccaagaataccgtgtacctccagatgagcgccctgaagcctgaggataccgccgtgtactactgcgctatggacagccgcagagtgacatgccctgagatcagcaccatgcaccggaacttcgattcttggggccagggcacactggtcacagtgtcatctggtaccggcggaggcggatctggcggcggaggtagcggtggcggaggatctgaattcgacatccagttgacccagtcccccagctcactcagcgccagtgtgggggaccgggtgaccattacctgtaaagccagtcagagtgtggactatgacggggatagcttcctgaattggtatcagcagaagcctggcaaagccccaaagctgctgatctacgctgcatctaatctggagtcaggcgtgccttccaggttctccggtagtgggtctgggaccgatttcacattgaccatttcatccctccaacccgaggatttcgctacatattactgtcagcagtccaatgaggaccctctcacctttggccagggcaccaaagttgaaattaagagactcgaggacctgaagaacgtgttcccacctgaggtggccgtgttcgagcctagcaaggccgagatcgcccacacccagaaagccaccctcgtgtgcctggctaccggcttctaccccgaccatgtggaactgtcttggtgggtcaacggcaaagaggtgcacagcggcgtgtgtaccgacccccagccactgaaagaacagcccgccctgaacgacagccggtactgcctgagcagcagactgagagtgtccgccaccttctggcagaacccccggaaccacttcagatgccaggtgcagttctacggcctgagcgagaacgacgagtggacccaggacagagccaagcccgtgacccagatcgtgtctgccgaagcctggggcagagccgattgcggcatcaccagcgccagctaccaccagggcgtgctgagcgccaccatcctgtacgagatcctgctgggcaaggccaccctgtacgccgtgctggtgtctgccctggtgctgatggctatggtcaagcggaaggacagccggggaagggccaagcgatctggatctggagcaacaaacttctcactactcaaacaagcaggtgacgtggaggagaatcccgggcctactagtatggactggatttggcgcatccttttccttgtcggcgctgctaccggcgcgcattccttcgaagaagtccaacttgtggagtctggagggggcctggtgcagcccggcggctctctcagactgtcttgtgcggcaagcggctacaccttcacctcttactggatagaatgggtgaggcaggcacctggaaagggactggagtggattggagagattctgccaggagggggagatacaaattacaatgaaatcttcaaggggcgggccaccttttcagcggataccagcaagaatacagcttacctgcagatgaatagcctccgggcagaagataccgctgtttattattgcacgagacgggtgccaataagactggactattgggggcaagggactcttgtcaccgtcagttcaacgcgtatccagaaccctgatcctgccgtgtaccagctgcgggatagcaagagcagcgacaagagcgtgtgtctgttcaccgacttcgacagccagaccaacgtgtcccagagcaaggactccgacgtgtacatcaccgataagtgcgtgctggacatgcggagcatggacttcaagagcaactccgccgtggcctggtccaacaagtccgatttcgcctgcgccaacgccttcaacaacagcattatccccgaggacacattcttcccaagcagcgacgtgccctgcgacgtgaagctggtggaaaagagcttcgagacagacaccaacctgaacttccagaacctgagcgtgatcggcttcagaatcctgctgctgaaagtggccggctttaacctgctgatgaccctgcggctgtggtccagctaa

SEQ ID NO: 37922 - DNA, 2283 bp, synthetic construct
  source 1..2283: mol_type = other DNA
atggccttaccagtgaccgccttgctcctgccgctggccttgctgctccacgccgccaggccggacatccagttgacccagtcccccagctcactcagcgccagtgtgggggaccgggtgaccattacctgtaaagccagtcagagtgtggactatgacggggatagcttcctgaattggtatcagcagaagcctggcaaagccccaaagctgctgatctacgctgcatctaatctggagtcaggcgtgccttccaggttctccggtagtgggtctgggaccgatttcacattgaccatttcatccctccaacccgaggatttcgctacatattactgtcagcagtccaatgaggaccctctcacctttggccagggcaccaaagttgaaattaagagactcgaggacctgaagaacgtgttcccacctgaggtggccgtgttcgagcctagcgaggccgagatcagccacacccagaaagccaccctcgtgtgcctggctaccggcttctaccccgaccatgtggaactgtcttggtgggtcaacggcaaagaggtgcacagcggcgtgtgtaccgacccccagccactgaaagaacagcccgccctgaacgacagccggtactgcctgagcagcagactgagagtgtccgccaccttctggcagaacccccggaaccacttcagatgccaggtgcagttctacggcctgagcgagaacgacgagtggacccaggacagagccaagcccgtgacccagatcgtgtctgccgaagcctggggcagagccgattgcggctttaccagcgagagctaccagcagggcgtgctgagcgccaccatcctgtacgagatcctgctgggcaaggccaccctgtacgccgtgctggtgtctgccctggtgctgatggctatggtcaagcggaaggacagccggggaagggccaagcgatctggatctggagcaacaaacttctcactactcaaacaagcaggtgacgtggaggagaatcccgggcctactagtaccatggactggatttggcgcatccttttccttgtcggcgctgctaccggcgcccattccgggcccgaagtgcaactggttgaatccggtggcggcctggtgcaacccggcggatctctcagacttagctgtgccgcctccggcagaaccttcacaatgggatggtacaggcaggctccagggaaagagagagagttcgtcgccgccatctctctgtctcccacactggcctactacgccgactctgtgaaaggccggttcaccatctccagagataatagcaagaacaccgtggtgctgcaaatgaactctctgagagccgaggatacagccctgtactattgtgccgctgaccggaagtccgtgatgagcatcagacccgattactggggacagggcacactggtcacagtgtctagtggatccggcggcggaggatctggcggaggcggatctgggggcggaggctctttcgaagaagtccaacttgtggagtctggagggggcctggtgcagcccggcggctctctcagactgtcttgtgcggcaagcggctacaccttcacctcttactggatagaatgggtgaggcaggcacctggaaagggactggagtggattggagagattctgccaggagggggagatacaaattacaatgaaatcttcaaggggcgggccaccttttcagcggataccagcaagaatacagcttacctgcagatgaatagcctccgggcagaagataccgctgtttattattgcacgagacgggtgccaataagactggactattgggggcaagggactcttgtcaccgtcagttcaacgcgtatccagaaccctgatcctgccgtgtaccagctgcgggatagcaagagcagcgacaagagcgtgtgtctgttcaccgacttcgacagccagaccaacgtgtcccagagcaaggactccgacgtgtacatcaccgataagtgcgtgctggacatgcggagcatggacttcaagagcaactccgccgtggcctggtccaacaagtccgatttcgcctgcgccaacgccttcaacaacagcattatccccgaggacacattcttcccaagccccgagagcagctgcgacgtgaagctggtggaaaagagcttcgagacagacaccaacctgaacttccagaacctgagcgtgatcggcttcagaatcctgctgctgaaagtggccggctttaacctgctgatgaccctgcggctgtggtccagctaa

SEQ ID NO: 37923 - DNA, 2301 bp, synthetic construct
  source 1..2301: mol_type = other DNA
atggccttaccagtgaccgccttgctcctgccgctggccttgctgctccacgccgccaggccggacatccagttgacccagtcccccagctcactcagcgccagtgtgggggaccgggtgaccattacctgtaaagccagtcagagtgtggactatgacggggatagcttcctgaattggtatcagcagaagcctggcaaagccccaaagctgctgatctacgctgcatctaatctggagtcaggcgtgccttccaggttctccggtagtgggtctgggaccgatttcacattgaccatttcatccctccaacccgaggatttcgctacatattactgtcagcagtccaatgaggaccctctcacctttggccagggcaccaaagttgaaattaagagactcgaggacctgaagaacgtgttcccacctgaggtggccgtgttcgagcctagcgaggccgagatcagccacacccagaaagccaccctcgtgtgcctggctaccggcttctaccccgaccatgtggaactgtcttggtgggtcaacggcaaagaggtgcacagcggcgtgtgtaccgacccccagccactgaaagaacagcccgccctgaacgacagccggtactgcctgagcagcagactgagagtgtccgccaccttctggcagaacccccggaaccacttcagatgccaggtgcagttctacggcctgagcgagaacgacgagtggacccaggacagagccaagcccgtgacccagatcgtgtctgccgaagcctggggcagagccgattgcggctttaccagcgagagctaccagcagggcgtgctgagcgccaccatcctgtacgagatcctgctgggcaaggccaccctgtacgccgtgctggtgtctgccctggtgctgatggctatggtcaagcggaaggacagccggggaagggccaagcgatctggatctggagcaacaaacttctcactactcaaacaagcaggtgacgtggaggagaatcccgggcctactagtaccatggactggatttggcgcatccttttccttgtcggcgctgctaccggcgcccattccgggccccaggtgcagctggttgaatctggcggaggactggttcagcctggcggatctctgagactgtcttgtgccgccagcggcaacatcaacagcagaaactgcatgggctggttcagacaggcccctggcaagggaagagaaggcgtggcagctatcggccaagtgaccggcagaacctactacgtggacagcgtgaagggcagattcaccatcagcctggacaacagcaagaacaccctgtacctccagatgaacagcctgagagccgaggacaccgccgtgtactattgtgctgctgcccctggctgtctgctgtctgcacttagaagcgccgactacagaaactggggccagggcacactggtcaccgtttcttctggatccggcggcggaggatctggcggaggcggatctgggggcggaggctctttcgaagaagtccaacttgtggagtctggagggggcctggtgcagcccggcggctctctcagactgtcttgtgcggcaagcggctacaccttcacctcttactggatagaatgggtgaggcaggcacctggaaagggactggagtggattggagagattctgccaggagggggagatacaaattacaatgaaatcttcaaggggcgggccaccttttcagcggataccagcaagaatacagcttacctgcagatgaatagcctccgggcagaagataccgctgtttattattgcacgagacgggtgccaataagactggactattgggggcaagggactcttgtcaccgtcagttcaacgcgtatccagaaccctgatcctgccgtgtaccagctgcgggatagcaagagcagcgacaagagcgtgtgtctgttcaccgacttcgacagccagaccaacgtgtcccagagcaaggactccgacgtgtacatcaccgataagtgcgtgctggacatgcggagcatggacttcaagagcaactccgccgtggcctggtccaacaagtccgatttcgcctgcgccaacgccttcaacaacagcattatccccgaggacacattcttcccaagccccgagagcagctgcgacgtgaagctggtggaaaagagcttcgagacagacaccaacctgaacttccagaacctgagcgtgatcggcttcagaatcctgctgctgaaagtggccggctttaacctgctgatgaccctgcggctgtggtccagc

SEQ ID NO: 37924 - DNA, 2304 bp, synthetic construct
  source 1..2304: mol_type = other DNA
atggccttaccagtgaccgccttgctcctgccgctggccttgctgctccacgccgccaggccggacatccagttgacccagtcccccagctcactcagcgccagtgtgggggaccgggtgaccattacctgtaaagccagtcagagtgtggactatgacggggatagcttcctgaattggtatcagcagaagcctggcaaagccccaaagctgctgatctacgctgcatctaatctggagtcaggcgtgccttccaggttctccggtagtgggtctgggaccgatttcacattgaccatttcatccctccaacccgaggatttcgctacatattactgtcagcagtccaatgaggaccctctcacctttggccagggcaccaaagttgaaattaagagactcgaggacctgaagaacgtgttcccacctgaggtggccgtgttcgagcctagcgaggccgagatcagccacacccagaaagccaccctcgtgtgcctggctaccggcttctaccccgaccatgtggaactgtcttggtgggtcaacggcaaagaggtgcacagcggcgtgtgtaccgacccccagccactgaaagaacagcccgccctgaacgacagccggtactgcctgagcagcagactgagagtgtccgccaccttctggcagaacccccggaaccacttcagatgccaggtgcagttctacggcctgagcgagaacgacgagtggacccaggacagagccaagcccgtgacccagatcgtgtctgccgaagcctggggcagagccgattgcggctttaccagcgagagctaccagcagggcgtgctgagcgccaccatcctgtacgagatcctgctgggcaaggccaccctgtacgccgtgctggtgtctgccctggtgctgatggctatggtcaagcggaaggacagccggggaagggccaagcgatctggatctggagcaacaaacttctcactactcaaacaagcaggtgacgtggaggagaatcccgggcctactagtaccatggactggatttggcgcatccttttccttgtcggcgctgctaccggcgcccattccgggccccaggtgcagctggttgaatctggcggaggatctgttcaggctggcggctctctgagactgtcttgtggcgcttccggcaacatcagcagcagaaactgcatgggctggttcagacaggcccctggcaaagagagagaaggcgttgccgccatcggacaagtgaccggcagatcctactacgtggacagcgtgaagggcagattcaccatcagcctggacaacgccaagaacaccctgtacctccagatgaacacactgaagcccgaggacaccgccatgtactactgtgctgctgcccctggctgtctgctgtctgcacttagaagcgccgactacagaaactggggccagggaacccaagtgacagtgtctagtggatccggcggcggaggatctggcggaggcggatctgggggcggaggctctttcgaagaagtccaacttgtggagtctggagggggcctggtgcagcccggcggctctctcagactgtcttgtgcggcaagcggctacaccttcacctcttactggatagaatgggtgaggcaggcacctggaaagggactggagtggattggagagattctgccaggagggggagatacaaattacaatgaaatcttcaaggggcgggccaccttttcagcggataccagcaagaatacagcttacctgcagatgaatagcctccgggcagaagataccgctgtttattattgcacgagacgggtgccaataagactggactattgggggcaagggactcttgtcaccgtcagttcaacgcgtatccagaaccctgatcctgccgtgtaccagctgcgggatagcaagagcagcgacaagagcgtgtgtctgttcaccgacttcgacagccagaccaacgtgtcccagagcaaggactccgacgtgtacatcaccgataagtgcgtgctggacatgcggagcatggacttcaagagcaactccgccgtggcctggtccaacaagtccgatttcgcctgcgccaacgccttcaacaacagcattatccccgaggacacattcttcccaagccccgagagcagctgcgacgtgaagctggtggaaaagagcttcgagacagacaccaacctgaacttccagaacctgagcgtgatcggcttcagaatcctgctgctgaaagtggccggctttaacctgctgatgaccctgcggctgtggtccagctaa

SEQ ID NO: 37925 - DNA, 2727 bp, synthetic construct
  source 1..2727: mol_type = other DNA
atggccttaccagtgaccgccttgctcctgccgctggccttgctgctccacgccgccaggccggaagtgcagctggttgaatctggcggaggactggttcaggctggcggatctctgagactgtcttgtgccgccagcggcagaacctttagcatgggctggtttagacaggcccctggcaaagagagagagttcgtcgccgccatcacatactctggcggcagcccttactacgccgactctgtgaagggcagattcaccatcagccgggacaacgccaagaacaccgtgtacctccagatgaacagcctgaagcctgaggacaccgccgtgtactactgcgccgccaatccaacatacggcagcgactggaacgccgagaattggggccagggaacccaagtgacagtgtctagcggtaccggcggaggcggatctggcggcggaggtagcggtggcggaggatctgaattcgacatccagttgacccagtcccccagctcactcagcgccagtgtgggggaccgggtgaccattacctgtaaagccagtcagagtgtggactatgacggggatagcttcctgaattggtatcagcagaagcctggcaaagccccaaagctgctgatctacgctgcatctaatctggagtcaggcgtgccttccaggttctccggtagtgggtctgggaccgatttcacattgaccatttcatccctccaacccgaggatttcgctacatattactgtcagcagtccaatgaggaccctctcacctttggccagggcaccaaagttgaaattaagagactcgagatccagaaccctgatcctgccgtgtaccagctgcgggatagcaagagcagcgacaagagcgtgtgtctgttcaccgacttcgacagccagaccaacgtgtcccagagcaaggactccgacgtgtacatcaccgataagtgcgtgctggacatgcggagcatggacttcaagagcaactccgccgtggcctggtccaacaagtccgatttcgcctgcgccaacgccttcaacaacagcattatccccgaggacacattcttcccaagcagcgacgtgccctgcgacgtgaagctggtggaaaagagcttcgagacagacaccaacctgaacttccagaacctgagcgtgatcggcttcagaatcctgctgctgaaagtggccggctttaacctgctgatgaccctgcggctgtggtccagccgcgccaagagaagcggatctggcgtgaagcagaccctgaatttcgacctgctgaagctggctggcgacgtggaatccaacccaggccctactagtaccatggactggatttggcgcatccttttccttgtcggcgctgctaccggcgcccattccgggccccaggtgcagctggttgaatctggcggaggatctgttcaggctggcggctctctgagactgtcttgtggcgcttccggcaacatcagcagcagaaactgcatgggctggttcagacaggcccctggcaaagagagagaaggcgttgccgccatcggacaagtgaccggcagatcctactacgtggacagcgtgaagggcagattcaccatcagcctggacaacgccaagaacaccctgtacctccagatgaacacactgaagcccgaggacaccgccatgtactactgtgctgctgcccctggctgtctgctgtctgcacttagaagcgccgactacagaaactggggccagggaacccaagtgacagtgtctagtggatccggcggcggaggatctggcggaggcggatctgggggcggaggctctttcgaagaagtccaacttgtggagtctggagggggcctggtgcagcccggcggctctctcagactgtcttgtgcggcaagcggctacaccttcacctcttactggatagaatgggtgaggcaggcacctggaaagggactggagtggattggagagattctgccaggagggggagatacaaattacaatgaaatcttcaaggggcgggccaccttttcagcggataccagcaagaatacagcttacctgcagatgaatagcctccgggcagaagataccgctgtttattattgcacgagacgggtgccaataagactggactattgggggcaagggactcttgtcaccgtcagttcaacgcgtgaggacctgaagaacgtgttcccacctgaggtggccgtgttcgagcctagcaaggccgagatcgcccacacccagaaagccaccctcgtgtgcctggctaccggcttctaccccgaccatgtggaactgtcttggtgggtcaacggcaaagaggtgcacagcggcgtgtgtaccgacccccagccactgaaagaacagcccgccctgaacgacagccggtactgcctgagcagcagactgagagtgtccgccaccttctggcagaacccccggaaccacttcagatgccaggtgcagttctacggcctgagcgagaacgacgagtggacccaggacagagccaagcccgtgacccagatcgtgtctgccgaagcctggggcagagccgattgcggcatcaccagcgccagctaccaccagggcgtgctgagcgccaccatcctgtacgagatcctgctgggcaaggccaccctgtacgccgtgctggtgtctgccctggtgctgatggctatggtcaagcggaaggacagccggggataa

SEQ ID NO: 37926 - DNA, 2718 bp, synthetic construct
  source 1..2718: mol_type = other DNA
atggccttaccagtgaccgccttgctcctgccgctggccttgctgctccacgccgccaggccgcaggtgcagctggttgaatctggcggaggatctgttcaggctggcggctctctgagactgtcttgtggcgcttccggcaacatcagcagcagaaactgcatgggctggttcagacaggcccctggcaaagagagagaaggcgttgccgccatcggacaagtgaccggcagatcctactacgtggacagcgtgaagggcagattcaccatcagcctggacaacgccaagaacaccctgtacctccagatgaacacactgaagcccgaggacaccgccatgtactactgtgctgctgcccctggctgtctgctgtctgcacttagaagcgccgactacagaaactggggccagggaacccaagtgacagtgtctagtggtaccggcggaggcggatctggcggcggaggtagcggtggcggaggatctgaattcgacatccagttgacccagtcccccagctcactcagcgccagtgtgggggaccgggtgaccattacctgtaaagccagtcagagtgtggactatgacggggatagcttcctgaattggtatcagcagaagcctggcaaagccccaaagctgctgatctacgctgcatctaatctggagtcaggcgtgccttccaggttctccggtagtgggtctgggaccgatttcacattgaccatttcatccctccaacccgaggatttcgctacatattactgtcagcagtccaatgaggaccctctcacctttggccagggcaccaaagttgaaattaagagactcgaggacctgaagaacgtgttcccacctgaggtggccgtgttcgagcctagcgaggccgagatcagccacacccagaaagccaccctcgtgtgcctggctaccggcttctaccccgaccatgtggaactgtcttggtgggtcaacggcaaagaggtgcacagcggcgtgtgtaccgacccccagccactgaaagaacagcccgccctgaacgacagccggtactgcctgagcagcagactgagagtgtccgccaccttctggcagaacccccggaaccacttcagatgccaggtgcagttctacggcctgagcgagaacgacgagtggacccaggacagagccaagcccgtgacccagatcgtgtctgccgaagcctggggcagagccgattgcggctttaccagcgagagctaccagcagggcgtgctgagcgccaccatcctgtacgagatcctgctgggcaaggccaccctgtacgccgtgctggtgtctgccctggtgctgatggctatggtcaagcggaaggacagccggggaagggccaagcgatctggatctggagcaacaaacttctcactactcaaacaagcaggtgacgtggaggagaatcccgggcctactagtgccaccatggactggatttggcgcatccttttccttgtcggcgctgctaccggcgcccattccgggcccgaagtgcaactggttgaatccggtggcggcctggtgcaagcaggcggatctctcagacttagctgtgccgcctccggcagaaccttcacaatgggatggtttaggcaggctccagggaaagagagagagttcgtcgccgccatctctctgtctcccacactggcctactacgccgactctgtgaaaggccggttcaccatctccagagataatgccaagaacaccgtggtgctgcaaatgaactctctgaaacccgaggatacagccctgtactattgtgccgctgaccggaagtccgtgatgagcatcagacccgattactggggacagggcacacaagtcacagtgtcctctggatccggcggcggaggatctggcggaggcggatctgggggcggaggctctttcgaagaagtccaacttgtggagtctggagggggcctggtgcagcccggcggctctctcagactgtcttgtgcggcaagcggctacaccttcacctcttactggatagaatgggtgaggcaggcacctggaaagggactggagtggattggagagattctgccaggagggggagatacaaattacaatgaaatcttcaaggggcgggccaccttttcagcggataccagcaagaatacagcttacctgcagatgaatagcctccgggcagaagataccgctgtttattattgcacgagacgggtgccaataagactggactattgggggcaagggactcttgtcaccgtcagttcaacgcgtatccagaaccctgatcctgccgtgtaccagctgcgggatagcaagagcagcgacaagagcgtgtgtctgttcaccgacttcgacagccagaccaacgtgtcccagagcaaggactccgacgtgtacatcaccgataagtgcgtgctggacatgcggagcatggacttcaagagcaactccgccgtggcctggtccaacaagtccgatttcgcctgcgccaacgccttcaacaacagcattatccccgaggacacattcttcccaagccccgagagcagctgcgacgtgaagctggtggaaaagagcttcgagacagacaccaacctgaacttccagaacctgagcgtgatcggcttcagaatcctgctgctgaaagtggccggctttaacctgctgatgaccctgcggctgtggtccagctaa

SEQ ID NO: 37927 - DNA, 2307 bp, synthetic construct
  source 1..2307: mol_type = other DNA
atggccttaccagtgaccgccttgctcctgccgctggccttgctgctccacgccgccaggccgcaggtgcagctggttgaatctggcggaggatctgttcaggctggcggctctctgagactgtcttgtggcgcttccggcaacatcagcagcagaaactgcatgggctggttcagacaggcccctggcaaagagagagaaggcgttgccgccatcggacaagtgaccggcagatcctactacgtggacagcgtgaagggcagattcaccatcagcctggacaacgccaagaacaccctgtacctccagatgaacacactgaagcccgaggacaccgccatgtactactgtgctgctgcccctggctgtctgctgtctgcacttagaagcgccgactacagaaactggggccagggaacccaagtgacagtgtctagtggtaccggcggaggcggatctggcggcggaggtagcggtggcggaggatctgaattcgacatccagttgacccagtcccccagctcactcagcgccagtgtgggggaccgggtgaccattacctgtaaagccagtcagagtgtggactatgacggggatagcttcctgaattggtatcagcagaagcctggcaaagccccaaagctgctgatctacgctgcatctaatctggagtcaggcgtgccttccaggttctccggtagtgggtctgggaccgatttcacattgaccatttcatccctccaacccgaggatttcgctacatattactgtcagcagtccaatgaggaccctctcacctttggccagggcaccaaagttgaaattaagagactcgaggacctgaagaacgtgttcccacctgaggtggccgtgttcgagcctagcgaggccgagatcagccacacccagaaagccaccctcgtgtgcctggctaccggcttctaccccgaccatgtggaactgtcttggtgggtcaacggcaaagaggtgcacagcggcgtgtgtaccgacccccagccactgaaagaacagcccgccctgaacgacagccggtactgcctgagcagcagactgagagtgtccgccaccttctggcagaacccccggaaccacttcagatgccaggtgcagttctacggcctgagcgagaacgacgagtggacccaggacagagccaagcccgtgacccagatcgtgtctgccgaagcctggggcagagccgattgcggctttaccagcgagagctaccagcagggcgtgctgagcgccaccatcctgtacgagatcctgctgggcaaggccaccctgtacgccgtgctggtgtctgccctggtgctgatggctatggtcaagcggaaggacagccggggaagggccaagcgatctggatctggagcaacaaacttctcactactcaaacaagcaggtgacgtggaggagaatcccgggcctactagtgccaccatggactggatttggcgcatccttttccttgtcggcgctgctaccggcgcccattccttcgaagaagtccaacttgtggagtctggagggggcctggtgcagcccggcggctctctcagactgtcttgtgcggcaagcggctacaccttcacctcttactggatagaatgggtgaggcaggcacctggaaagggactggagtggattggagagattctgccaggagggggagatacaaattacaatgaaatcttcaaggggcgggccaccttttcagcggataccagcaagaatacagcttacctgcagatgaatagcctccgggcagaagataccgctgtttattattgcacgagacgggtgccaataagactggactattgggggcaagggactcttgtcaccgtcagttcaacgcgtatccagaaccctgatcctgccgtgtaccagctgcgggatagcaagagcagcgacaagagcgtgtgtctgttcaccgacttcgacagccagaccaacgtgtcccagagcaaggactccgacgtgtacatcaccgataagtgcgtgctggacatgcggagcatggacttcaagagcaactccgccgtggcctggtccaacaagtccgatttcgcctgcgccaacgccttcaacaacagcattatccccgaggacacattcttcccaagccccgagagcagctgcgacgtgaagctggtggaaaagagcttcgagacagacaccaacctgaacttccagaacctgagcgtgatcggcttcagaatcctgctgctgaaagtggccggctttaacctgctgatgaccctgcggctgtggtccagctaa

SEQ ID NO: 37928 - DNA, 2307 bp, synthetic construct
  source 1..2307: mol_type = other DNA
atggccttaccagtgaccgccttgctcctgccgctggccttgctgctccacgccgccaggccgcaagttcagctggtggaaagcggtggtggcgttgtgcaacctggtggaagtctgaggctgagctgtgccgcttctggcctgagctttagcacctacactgtggcctggttcaggcaggctcccggaaagggtcttgaaggcgtggccgccattccttacaccagccagcacatggtgtacacagacagcgtcagaggccggttcaccatcagcagagacaactccaagaatacgctctatctccagatgaactctctgcgcgccgaagatacagccgtgtattactgcgccaccgacagacggcctggcacctctatgctggctatcaacggctacaacagatggggacagggaaccaccgtgaccgtgtcatctggtaccggcggaggcggatctggcggcggaggtagcggtggcggaggatctgaattcgacatccagttgacccagtcccccagctcactcagcgccagtgtgggggaccgggtgaccattacctgtaaagccagtcagagtgtggactatgacggggatagcttcctgaattggtatcagcagaagcctggcaaagccccaaagctgctgatctacgctgcatctaatctggagtcaggcgtgccttccaggttctccggtagtgggtctgggaccgatttcacattgaccatttcatccctccaacccgaggatttcgctacatattactgtcagcagtccaatgaggaccctctcacctttggccagggcaccaaagttgaaattaagagactcgaggacctgaagaacgtgttcccacctgaggtggccgtgttcgagcctagcgaggccgagatcagccacacccagaaagccaccctcgtgtgcctggctaccggcttctaccccgaccatgtggaactgtcttggtgggtcaacggcaaagaggtgcacagcggcgtgtgtaccgacccccagccactgaaagaacagcccgccctgaacgacagccggtactgcctgagcagcagactgagagtgtccgccaccttctggcagaacccccggaaccacttcagatgccaggtgcagttctacggcctgagcgagaacgacgagtggacccaggacagagccaagcccgtgacccagatcgtgtctgccgaagcctggggcagagccgattgcggctttaccagcgagagctaccagcagggcgtgctgagcgccaccatcctgtacgagatcctgctgggcaaggccaccctgtacgccgtgctggtgtctgccctggtgctgatggctatggtcaagcggaaggacagccggggaagggccaagcgatctggatctggagcaacaaacttctcactactcaaacaagcaggtgacgtggaggagaatcccgggcctactagtgccaccatggactggatttggcgcatccttttccttgtcggcgctgctaccggcgcccattccttcgaagaagtccaacttgtggagtctggagggggcctggtgcagcccggcggctctctcagactgtcttgtgcggcaagcggctacaccttcacctcttactggatagaatgggtgaggcaggcacctggaaagggactggagtggattggagagattctgccaggagggggagatacaaattacaatgaaatcttcaaggggcgggccaccttttcagcggataccagcaagaatacagcttacctgcagatgaatagcctccgggcagaagataccgctgtttattattgcacgagacgggtgccaataagactggactattgggggcaagggactcttgtcaccgtcagttcaacgcgtatccagaaccctgatcctgccgtgtaccagctgcgggatagcaagagcagcgacaagagcgtgtgtctgttcaccgacttcgacagccagaccaacgtgtcccagagcaaggactccgacgtgtacatcaccgataagtgcgtgctggacatgcggagcatggacttcaagagcaactccgccgtggcctggtccaacaagtccgatttcgcctgcgccaacgccttcaacaacagcattatccccgaggacacattcttcccaagccccgagagcagctgcgacgtgaagctggtggaaaagagcttcgagacagacaccaacctgaacttccagaacctgagcgtgatcggcttcagaatcctgctgctgaaagtggccggctttaacctgctgatgaccctgcggctgtggtccagctaa

SEQ ID NO: 37929 - DNA, 2304 bp, synthetic construct
  source 1..2304: mol_type = other DNA
atggccttaccagtgaccgccttgctcctgccgctggccttgctgctccacgccgccaggccggacatccagttgacccagtcccccagctcactcagcgccagtgtgggggaccgggtgaccattacctgtaaagccagtcagagtgtggactatgacggggatagcttcctgaattggtatcagcagaagcctggcaaagccccaaagctgctgatctacgctgcatctaatctggagtcaggcgtgccttccaggttctccggtagtgggtctgggaccgatttcacattgaccatttcatccctccaacccgaggatttcgctacatattactgtcagcagtccaatgaggaccctctcacctttggccagggcaccaaagttgaaattaagagactcgaggacctgaagaacgtgttcccacctgaggtggccgtgttcgagcctagcgaggccgagatcagccacacccagaaagccaccctcgtgtgcctggctaccggcttctaccccgaccatgtggaactgtcttggtgggtcaacggcaaagaggtgcacagcggcgtgtgtaccgacccccagccactgaaagaacagcccgccctgaacgacagccggtactgcctgagcagcagactgagagtgtccgccaccttctggcagaacccccggaaccacttcagatgccaggtgcagttctacggcctgagcgagaacgacgagtggacccaggacagagccaagcccgtgacccagatcgtgtctgccgaagcctggggcagagccgattgcggctttaccagcgagagctaccagcagggcgtgctgagcgccaccatcctgtacgagatcctgctgggcaaggccaccctgtacgccgtgctggtgtctgccctggtgctgatggctatggtcaagcggaaggacagccggggaagggccaagcgatctggatctggagcaacaaacttctcactactcaaacaagcaggtgacgtggaggagaatcccgggcctactagtaccatggactggatttggcgcatccttttccttgtcggcgctgctaccggcgcccattccgggccccaagttcagctggtggaaagcggtggtggcgttgtgcaacctggtggaagtctgaggctgagctgtgccgcttctggcctgagctttagcacctacactgtggcctggttcaggcaggctcccggaaagggtcttgaaggcgtggccgccattccttacaccagccagcacatggtgtacacagacagcgtcagaggccggttcaccatcagcagagacaactccaagaatacgctctatctccagatgaactctctgcgcgccgaagatacagccgtgtattactgcgccaccgacagacggcctggcacctctatgctggctatcaacggctacaacagatggggacagggaaccaccgtgaccgtgtcatctggatccggcggcggaggatctggcggaggcggatctgggggcggaggctctttcgaagaagtccaacttgtggagtctggagggggcctggtgcagcccggcggctctctcagactgtcttgtgcggcaagcggctacaccttcacctcttactggatagaatgggtgaggcaggcacctggaaagggactggagtggattggagagattctgccaggagggggagatacaaattacaatgaaatcttcaaggggcgggccaccttttcagcggataccagcaagaatacagcttacctgcagatgaatagcctccgggcagaagataccgctgtttattattgcacgagacgggtgccaataagactggactattgggggcaagggactcttgtcaccgtcagttcaacgcgtatccagaaccctgatcctgccgtgtaccagctgcgggatagcaagagcagcgacaagagcgtgtgtctgttcaccgacttcgacagccagaccaacgtgtcccagagcaaggactccgacgtgtacatcaccgataagtgcgtgctggacatgcggagcatggacttcaagagcaactccgccgtggcctggtccaacaagtccgatttcgcctgcgccaacgccttcaacaacagcattatccccgaggacacattcttcccaagccccgagagcagctgcgacgtgaagctggtggaaaagagcttcgagacagacaccaacctgaacttccagaacctgagcgtgatcggcttcagaatcctgctgctgaaagtggccggctttaacctgctgatgaccctgcggctgtggtccagctaa

SEQ ID NO: 37930 - DNA, 2310 bp, synthetic construct
  source 1..2310: mol_type = other DNA
atggccttaccagtgaccgccttgctcctgccgctggccttgctgctccacgccgccaggccggacatccagttgacccagtcccccagctcactcagcgccagtgtgggggaccgggtgaccattacctgtaaagccagtcagagtgtggactatgacggggatagcttcctgaattggtatcagcagaagcctggcaaagccccaaagctgctgatctacgctgcatctaatctggagtcaggcgtgccttccaggttctccggtagtgggtctgggaccgatttcacattgaccatttcatccctccaacccgaggatttcgctacatattactgtcagcagtccaatgaggaccctctcacctttggccagggcaccaaagttgaaattaagagactcgaggacctgaagaacgtgttcccacctgaggtggccgtgttcgagcctagcgaggccgagatcagccacacccagaaagccaccctcgtgtgcctggctaccggcttctaccccgaccatgtggaactgtcttggtgggtcaacggcaaagaggtgcacagcggcgtgtgtaccgacccccagccactgaaagaacagcccgccctgaacgacagccggtactgcctgagcagcagactgagagtgtccgccaccttctggcagaacccccggaaccacttcagatgccaggtgcagttctacggcctgagcgagaacgacgagtggacccaggacagagccaagcccgtgacccagatcgtgtctgccgaagcctggggcagagccgattgcggctttaccagcgagagctaccagcagggcgtgctgagcgccaccatcctgtacgagatcctgctgggcaaggccaccctgtacgccgtgctggtgtctgccctggtgctgatggctatggtcaagcggaaggacagccggggaagggccaagcgatctggatctggagcaacaaacttctcactactcaaacaagcaggtgacgtggaggagaatcccgggcctactagtaccatggactggatttggcgcatccttttccttgtcggcgctgctaccggcgcccattccgggcccgaggtgcagctggttgaatctggcggaggatctgttcaggctggcggctctctgagactgtcttgtgccgccagcggctacacctacagcatcaactgcatgggctggttcagacaggcccctggcaaagagagagaaggcgttgccgccatctctaccggcggaggcagaaccgattaccgggattctgtgaagggcagattcaccatcagccaggacaacgccaagaacaccgtgtacctccagatgaacagcctgaagcctgaggacaccgccatgtactactgtgccggcaagaccacctatcctggctacggatgtggcctgggcagaagcgcctacaattattggggccagggcacccaagtgaccgtgtcatctggatccggcggcggaggatctggcggaggcggatctgggggcggaggctctttcgaagaagtccaacttgtggagtctggagggggcctggtgcagcccggcggctctctcagactgtcttgtgcggcaagcggctacaccttcacctcttactggatagaatgggtgaggcaggcacctggaaagggactggagtggattggagagattctgccaggagggggagatacaaattacaatgaaatcttcaaggggcgggccaccttttcagcggataccagcaagaatacagcttacctgcagatgaatagcctccgggcagaagataccgctgtttattattgcacgagacgggtgccaataagactggactattgggggcaagggactcttgtcaccgtcagttcaacgcgtatccagaaccctgatcctgccgtgtaccagctgcgggatagcaagagcagcgacaagagcgtgtgtctgttcaccgacttcgacagccagaccaacgtgtcccagagcaaggactccgacgtgtacatcaccgataagtgcgtgctggacatgcggagcatggacttcaagagcaactccgccgtggcctggtccaacaagtccgatttcgcctgcgccaacgccttcaacaacagcattatccccgaggacacattcttcccaagccccgagagcagctgcgacgtgaagctggtggaaaagagcttcgagacagacaccaacctgaacttccagaacctgagcgtgatcggcttcagaatcctgctgctgaaagtggccggctttaacctgctgatgaccctgcggctgtggtccagctaa

SEQ ID NO: 37931 - DNA, 1866 bp, synthetic construct
  source 1..1866: mol_type = other DNA
atggccttaccagtgaccgccttgctcctgccgctggccttgctgctccacgccgccaggccggacatccagttgacccagtcccccagctcactcagcgccagtgtgggggaccgggtgaccattacctgtaaagccagtcagagtgtggactatgacggggatagcttcctgaattggtatcagcagaagcctggcaaagccccaaagctgctgatctacgctgcatctaatctggagtcaggcgtgccttccaggttctccggtagtgggtctgggaccgatttcacattgaccatttcatccctccaacccgaggatttcgctacatattactgtcagcagtccaatgaggaccctctcacctttggccagggcaccaaagttgaaattaagagactcgaggacctgaagcacgtgttcccacctgaggtggccgtgttcgagcctagcgacgccgagatctggcacacccagaaagccaccctcgtgtgcctggctaccggcttctaccccgaccatgtggaactgtcttggtgggtcaacggcaaagaggtgcacagcggcgtgtctaccgacccccagccactgaaagaacagcccgccctgaacgacagccggtactgcctgagcagcagactgagagtgtccgccaccttctggcagaacccccggaaccacttcagatgccaggtgcagttctacggcctgagcgagaacgacgagtggacccaggacagagccaagcccgtgacccagatcgtgtctgccgaagcctggggcagagccgattgcggctttaccagcgagagctaccagcagggcgtgctgagcgccaccatcctgtacgagatcctgctgggcaaggccaccctgtacgccgtgctggtgtctgccctggtgctgatggctatggtcaagcggaaggacagccggggaagggccaagcgatctggatctggagcaacaaacttctcactactcaaacaagcaggtgacgtggaggagaatcccgggcctactagtatggactggatttggcgcatccttttccttgtcggcgctgctaccggcgcgcattccttcgaagaagtccaacttgtggagtctggagggggcctggtgcagcccggcggctctctcagactgtcttgtgcggcaagcggctacaccttcacctcttactggatagaatgggtgaggcaggcacctggaaagggactggagtggattggagagattctgccaggagggggagatacaaattacaatgaaatcttcaaggggcgggccaccttttcagcggataccagcaagaatacagcttacctgcagatgaatagcctccgggcagaagataccgctgtttattattgcacgagacgggtgccaataagactggactattgggggcaagggactcttgtcaccgtcagttcaacgcgtatccagaaccctgatcctgccgtgtaccagctgcgggatagcaagagcagcgacaagagcgtgtgtctgttcaccgacttcgacagccagaccaacgtgtcccagagcaaggactccgacgtgtacatcaccgataagaccgtgctggacatgcggagcatggacttcaagagcaactccgccgtggcctggtccagcaagtccgatttcgcctgcgccaacgccttcaacaacagcattatccccgaggacacattcttcccaagccccgagatggcctgcgacgtgaagctggtggaaaagagcttcgagacagacaccaacctgaacttccagaacctgctcgtgatctggctgagaatcctgctgctgaaagtggccggctttaacctgctgatgaccctgcggctgtggtccagc

SEQ ID NO: 37932 - DNA, 1866 bp, synthetic construct
  source 1..1866: mol_type = other DNA
atggccttaccagtgaccgccttgctcctgccgctggccttgctgctccacgccgccaggccggacatccagttgacccagtcccccagctcactcagcgccagtgtgggggaccgggtgaccattacctgtaaagccagtcagagtgtggactatgacggggatagcttcctgaattggtatcagcagaagcctggcaaagccccaaagctgctgatctacgctgcatctaatctggagtcaggcgtgccttccaggttctccggtagtgggtctgggaccgatttcacattgaccatttcatccctccaacccgaggatttcgctacatattactgtcagcagtccaatgaggaccctctcacctttggccagggcaccaaagttgaaattaagagactcgaggacctgaagcacgtgttcccacctgaggtggccgtgttcgagcctagcgacgccgagatctggcacacccagaaagccaccctcgtgtgcctggctaccggcttctaccccgaccatgtggaactgtcttggtgggtcaacggcaaagaggtgcacagcggcgtgtctaccgacccccagccactgaaagaacagcccgccctgaacgacagccggtactgcctgagcagcagactgagagtgtccgccaccttctggcagaacccccggaaccacttcagatgccaggtgcagttctacggcctgagcgagaacgacgagtggacccaggacagagccaagcccgtgacccagatcgtgtctgccgaagcctggggcagagccgattgcggctttaccagcgagagctaccagcagggcgtgctgagcgccaccatcctgtacgagatcctgctgggcaaggccaccctgtacgccgtgctggtgtctgccctggtgctgatggctatggtcaagcggaaggacagccggggaagggccaagcgatctggatctggagcaacaaacttctcactactcaaacaagcaggtgacgtggaggagaatcccgggcctactagtatggactggatttggcgcatccttttccttgtcggcgctgctaccggcgcgcattccttcgaagaagtccaacttgtggagtctggagggggcctggtgcagcccggcggctctctcagactgtcttgtgcggcaagcggctacaccttcacctcttactggatagaatgggtgaggcaggcacctggaaagggactggagtggattggagagattctgccaggagggggagatacaaattacaatgaaatcttcaaggggcgggccaccttttcagcggataccagcaagaatacagcttacctgcagatgaatagcctccgggcagaagataccgctgtttattattgcacgagacgggtgccaataagactggactattgggggcaagggactcttgtcaccgtcagttcaacgcgtatccagaaccctgatcctgccgtgtaccagctgcgggatagcaagagcagcgacaagagcgtgtgtctgttcaccgacttcgacagccagaccaacgtgtcccagagcaaggactccgacgtgtacatcaccgataagaccgtgctggacatgcggagcatggacttcaagagcaactccgccgtggcctggtccaccaagtccgatttcgcctgcgccaacgccttcaacaacagcattatccccgaggacacattcttcccaagccccgaggtggtgtgcgacgtgaagctggtggaaaagagcttcgagacagacaccaacctgaacttccagaacctggtggtgatcggcgccagaatcctgctgctgaaagtggccggctttaacctgctgatgaccctgcggctgtggtccagc

SEQ ID NO: 37933 - DNA, 1866 bp, synthetic construct
  source 1..1866: mol_type = other DNA
atggccttaccagtgaccgccttgctcctgccgctggccttgctgctccacgccgccaggccggacatccagttgacccagtcccccagctcactcagcgccagtgtgggggaccgggtgaccattacctgtaaagccagtcagagtgtggactatgacggggatagcttcctgaattggtatcagcagaagcctggcaaagccccaaagctgctgatctacgctgcatctaatctggagtcaggcgtgccttccaggttctccggtagtgggtctgggaccgatttcacattgaccatttcatccctccaacccgaggatttcgctacatattactgtcagcagtccaatgaggaccctctcacctttggccagggcaccaaagttgaaattaagagactcgaggacctgaagaacgtgttcccacctgaggtggccgtgttcgagcctagcaaggccgagatcagcagaacccagaaagccaccctcgtgtgcctggctaccggcttctaccctcctcatgtggaactgtcttggtgggtcaacggcaaagaggtgcacgacggcgtgtgtaccgacccccagccactgaaagaacagcccgccctgaacgacagccggtactgcctgagcagcagactgagagtgtccgccaccttctggcagaacccccggaaccacttcagatgccaggtgcagttctacggcctgagcgagaacgacgagtggacccaggacagagccaagcccgtgacccagatcgtgtctgccgaagcctggggcagagccgattgcggctttaccagcgagagctaccagcagggcgtgctgagcgccaccatcctgtacgagatcctgctgggcaaggccaccctgtacgccgtgctggtgtctgccctggtgctgatggctatggtcaagcggaaggacagccggggaagggccaagcgatctggatctggagcaacaaacttctcactactcaaacaagcaggtgacgtggaggagaatcccgggcctactagtatggactggatttggcgcatccttttccttgtcggcgctgctaccggcgcgcattccttcgaagaagtccaacttgtggagtctggagggggcctggtgcagcccggcggctctctcagactgtcttgtgcggcaagcggctacaccttcacctcttactggatagaatgggtgaggcaggcacctggaaagggactggagtggattggagagattctgccaggagggggagatacaaattacaatgaaatcttcaaggggcgggccaccttttcagcggataccagcaagaatacagcttacctgcagatgaatagcctccgggcagaagataccgctgtttattattgcacgagacgggtgccaataagactggactattgggggcaagggactcttgtcaccgtcagttcaacgcgtatccagaaccctgatcctgccgtgtaccagctgcgggatagcaagagcagcgacaagttcgtgtgtctgttcaccgacttcgacagccagatcaacgtgtcccagagcaaggactccgacgtgtacatcaccgataagtgcgtgctggacatgcggagcatggacttcaagagcaactccgccgtggcctggtccaacaagtccgatttcacctgcgccaacgccttcaacaacagcattatccccgaggacacattcttcccaagccccgagagcagctgcgacgtgaagctggtggaaaagagcttcgagacagacaccaacctgaacttccagaacctgagcgtgatcggcttcagaatcctgctgctgaaagtggccggctttaacctgctgatgaccctgcggctgtggtccagc

SEQ ID NO: 37934 - DNA, 2292 bp, synthetic construct
  source 1..2292: mol_type = other DNA
atggccttaccagtgaccgccttgctcctgccgctggccttgctgctccacgccgccaggccggacatccagttgacccagtcccccagctcactcagcgccagtgtgggggaccgggtgaccattacctgtaaagccagtcagagtgtggactatgacggggatagcttcctgaattggtatcagcagaagcctggcaaagccccaaagctgctgatctacgctgcatctaatctggagtcaggcgtgccttccaggttctccggtagtgggtctgggaccgatttcacattgaccatttcatccctccaacccgaggatttcgctacatattactgtcagcagtccaatgaggaccctctcacctttggccagggcaccaaagttgaaattaagagactcgaggacctgaagaacgtgttcccacctgaggtggccgtgttcgagcctagcgaggccgagatcagccacacccagaaagccaccctcgtgtgcctggctaccggcttctaccccgaccatgtggaactgtcttggtgggtcaacggcaaagaggtgcacagcggcgtgtgtaccgacccccagccactgaaagaacagcccgccctgaacgacagccggtactgcctgagcagcagactgagagtgtccgccaccttctggcagaacccccggaaccacttcagatgccaggtgcagttctacggcctgagcgagaacgacgagtggacccaggacagagccaagcccgtgacccagatcgtgtctgccgaagcctggggcagagccgattgcggctttaccagcgagagctaccagcagggcgtgctgagcgccaccatcctgtacgagatcctgctgggcaaggccaccctgtacgccgtgctggtgtctgccctggtgctgatggctatggtcaagcggaaggacagccggggaagggccaagcgatctggatctggagcaacaaacttctcactactcaaacaagcaggtgacgtggaggagaatcccgggcctactagtaccatggactggatttggcgcatccttttccttgtcggcgctgctaccggcgcccattccgggccccaggtgcagctccaagaaagcggacccggactggttaagccctctcagaccctgtctctgacctgcacagttagcggagccagcattaccacaggcgagtattattggaattggtttcggcagccaccaggcaaggggcttgagtggatgggtgctattgctgcctctggcagcaccacctactctcccagctttgagagcagaacctccatcagccgggacacctccaaaaaccagttctctctgaagctgtcctccgtgaccgctgctgacaccgccgtctattattgtggccggtctttcggcgtggcagctgtgaccacaggacagaacagaggccagggaacacttgtgaccgtgtcctctggatccggcggcggaggatctggcggaggcggatctgggggcggaggctctttcgaagaagtccaacttgtggagtctggagggggcctggtgcagcccggcggctctctcagactgtcttgtgcggcaagcggctacaccttcacctcttactggatagaatgggtgaggcaggcacctggaaagggactggagtggattggagagattctgccaggagggggagatacaaattacaatgaaatcttcaaggggcgggccaccttttcagcggataccagcaagaatacagcttacctgcagatgaatagcctccgggcagaagataccgctgtttattattgcacgagacgggtgccaataagactggactattgggggcaagggactcttgtcaccgtcagttcaacgcgtatccagaaccctgatcctgccgtgtaccagctgcgggatagcaagagcagcgacaagagcgtgtgtctgttcaccgacttcgacagccagaccaacgtgtcccagagcaaggactccgacgtgtacatcaccgataagtgcgtgctggacatgcggagcatggacttcaagagcaactccgccgtggcctggtccaacaagtccgatttcgcctgcgccaacgccttcaacaacagcattatccccgaggacacattcttcccaagccccgagagcagctgcgacgtgaagctggtggaaaagagcttcgagacagacaccaacctgaacttccagaacctgagcgtgatcggcttcagaatcctgctgctgaaagtggccggctttaacctgctgatgaccctgcggctgtggtccagc

SEQ ID NO: 37935 - DNA, 2715 bp, synthetic construct
  source 1..2715: mol_type = other DNA
atggccttaccagtgaccgccttgctcctgccgctggccttgctgctccacgccgccaggccgcaggttcagctgcaagagtctggccctggcctggtcaagcctagccaaacactgagcctgacctgtaccgtgtctggcggctctatcaccaccggcgagttctactggaactggttcagacagcctcctggcaaaggactggaatggatgggagccattgccgccagcggcagcacaacatacagccctagcttcgagagccggaccagcatcagcagagacaccagcaagaatcagttcagcctgaagctgagcagcgtgacagccgccgatacagccgtgtattactgcggcagatcctttggagtggccgccgtgacaaccggccagaatagaggacagggcaccctggtcacagtgtctagcggtaccggcggaggcggatctggcggcggaggtagcggtggcggaggatctgaattcgacatccagttgacccagtcccccagctcactcagcgccagtgtgggggaccgggtgaccattacctgtaaagccagtcagagtgtggactatgacggggatagcttcctgaattggtatcagcagaagcctggcaaagccccaaagctgctgatctacgctgcatctaatctggagtcaggcgtgccttccaggttctccggtagtgggtctgggaccgatttcacattgaccatttcatccctccaacccgaggatttcgctacatattactgtcagcagtccaatgaggaccctctcacctttggccagggcaccaaagttgaaattaagagactcgagatccagaaccctgatcctgccgtgtaccagctgcgggatagcaagagcagcgacaagagcgtgtgtctgttcaccgacttcgacagccagaccaacgtgtcccagagcaaggactccgacgtgtacatcaccgataagtgcgtgctggacatgcggagcatggacttcaagagcaactccgccgtggcctggtccaacaagtccgatttcgcctgcgccaacgccttcaacaacagcattatccccgaggacacattcttcccaagcagcgacgtgccctgcgacgtgaagctggtggaaaagagcttcgagacagacaccaacctgaacttccagaacctgagcgtgatcggcttcagaatcctgctgctgaaagtggccggctttaacctgctgatgaccctgcggctgtggtccagccgcgccaagagaagcggatctggcgtgaagcagaccctgaatttcgacctgctgaagctggctggcgacgtggaatccaacccaggccctactagtaccatggactggatttggcgcatccttttccttgtcggcgctgctaccggcgcccattccgggcccgaagtgcaactggttgaatccggtggcggcctggtgcaacccggcggatctctcagacttagctgtgccgcctccggcagaaccttcacaatgggatggtacaggcaggctccagggaaagagagagagttcgtcgccgccatctctctgtctcccacactggcctactacgccgactctgtgaaaggccggttcaccatctccagagataatagcaagaacaccgtggtgctgcaaatgaactctctgagagccgaggatacagccctgtactattgtgccgctgaccggaagtccgtgatgagcatcagacccgattactggggacagggcacactggtcacagtgtctagtggatccggcggcggaggatctggcggaggcggatctgggggcggaggctctttcgaagaagtccaacttgtggagtctggagggggcctggtgcagcccggcggctctctcagactgtcttgtgcggcaagcggctacaccttcacctcttactggatagaatgggtgaggcaggcacctggaaagggactggagtggattggagagattctgccaggagggggagatacaaattacaatgaaatcttcaaggggcgggccaccttttcagcggataccagcaagaatacagcttacctgcagatgaatagcctccgggcagaagataccgctgtttattattgcacgagacgggtgccaataagactggactattgggggcaagggactcttgtcaccgtcagttcaacgcgtgaggacctgaagaacgtgttcccacctgaggtggccgtgttcgagcctagcaaggccgagatcgcccacacccagaaagccaccctcgtgtgcctggctaccggcttctaccccgaccatgtggaactgtcttggtgggtcaacggcaaagaggtgcacagcggcgtgtgtaccgacccccagccactgaaagaacagcccgccctgaacgacagccggtactgcctgagcagcagactgagagtgtccgccaccttctggcagaacccccggaaccacttcagatgccaggtgcagttctacggcctgagcgagaacgacgagtggacccaggacagagccaagcccgtgacccagatcgtgtctgccgaagcctggggcagagccgattgcggcatcaccagcgccagctaccaccagggcgtgctgagcgccaccatcctgtacgagatcctgctgggcaaggccaccctgtacgccgtgctggtgtctgccctggtgctgatggctatggtcaagcggaaggacagccgggga

SEQ ID NO: 37936 - DNA, 2304 bp, synthetic construct
  source 1..2304: mol_type = other DNA
atggccttaccagtgaccgccttgctcctgccgctggccttgctgctccacgccgccaggccgcaggttcagctgcaagagtctggccctggcctggtcaagcctagccaaacactgagcctgacctgtaccgtgtctggcggctctatcaccaccggcgagttctactggaactggttcagacagcctcctggcaaaggactggaatggatgggagccattgccgccagcggcagcacaacatacagccctagcttcgagagccggaccagcatcagcagagacaccagcaagaatcagttcagcctgaagctgagcagcgtgacagccgccgatacagccgtgtattactgcggcagatcctttggagtggccgccgtgacaaccggccagaatagaggacagggcaccctggtcacagtgtctagcggtaccggcggaggcggatctggcggcggaggtagcggtggcggaggatctgaattcgacatccagttgacccagtcccccagctcactcagcgccagtgtgggggaccgggtgaccattacctgtaaagccagtcagagtgtggactatgacggggatagcttcctgaattggtatcagcagaagcctggcaaagccccaaagctgctgatctacgctgcatctaatctggagtcaggcgtgccttccaggttctccggtagtgggtctgggaccgatttcacattgaccatttcatccctccaacccgaggatttcgctacatattactgtcagcagtccaatgaggaccctctcacctttggccagggcaccaaagttgaaattaagagactcgagatccagaaccctgatcctgccgtgtaccagctgcgggatagcaagagcagcgacaagagcgtgtgtctgttcaccgacttcgacagccagaccaacgtgtcccagagcaaggactccgacgtgtacatcaccgataagtgcgtgctggacatgcggagcatggacttcaagagcaactccgccgtggcctggtccaacaagtccgatttcgcctgcgccaacgccttcaacaacagcattatccccgaggacacattcttcccaagcagcgacgtgccctgcgacgtgaagctggtggaaaagagcttcgagacagacaccaacctgaacttccagaacctgagcgtgatcggcttcagaatcctgctgctgaaagtggccggctttaacctgctgatgaccctgcggctgtggtccagccgcgccaagagaagcggatctggcgtgaagcagaccctgaatttcgacctgctgaagctggctggcgacgtggaatccaacccaggccctactagtaccatggactggatttggcgcatccttttccttgtcggcgctgctaccggcgcccattccttcgaagaagtccaacttgtggagtctggagggggcctggtgcagcccggcggctctctcagactgtcttgtgcggcaagcggctacaccttcacctcttactggatagaatgggtgaggcaggcacctggaaagggactggagtggattggagagattctgccaggagggggagatacaaattacaatgaaatcttcaaggggcgggccaccttttcagcggataccagcaagaatacagcttacctgcagatgaatagcctccgggcagaagataccgctgtttattattgcacgagacgggtgccaataagactggactattgggggcaagggactcttgtcaccgtcagttcaacgcgtgaggacctgaagaacgtgttcccacctgaggtggccgtgttcgagcctagcaaggccgagatcgcccacacccagaaagccaccctcgtgtgcctggctaccggcttctaccccgaccatgtggaactgtcttggtgggtcaacggcaaagaggtgcacagcggcgtgtgtaccgacccccagccactgaaagaacagcccgccctgaacgacagccggtactgcctgagcagcagactgagagtgtccgccaccttctggcagaacccccggaaccacttcagatgccaggtgcagttctacggcctgagcgagaacgacgagtggacccaggacagagccaagcccgtgacccagatcgtgtctgccgaagcctggggcagagccgattgcggcatcaccagcgccagctaccaccagggcgtgctgagcgccaccatcctgtacgagatcctgctgggcaaggccaccctgtacgccgtgctggtgtctgccctggtgctgatggctatggtcaagcggaaggacagccgggga

SEQ ID NO: 37937 - DNA, 2703 bp, synthetic construct
  source 1..2703: mol_type = other DNA
atggccttaccagtgaccgccttgctcctgccgctggccttgctgctccacgccgccaggccggaagtgcagctggttgaatctggcggaggactggttcaggctggcggatctctgagactgtcttgtgccgccagcggcagaacctttagcatgggctggtttagacaggcccctggcaaagagagagagttcgtcgccgccatcacatactctggcggcagcccttactacgccgactctgtgaagggcagattcaccatcagccgggacaacgccaagaacaccgtgtacctccagatgaacagcctgaagcctgaggacaccgccgtgtactactgcgccgccaatccaacatacggcagcgactggaacgccgagaattggggccagggaacccaagtgacagtgtctagcggtaccggcggaggcggatctggcggcggaggtagcggtggcggaggatctgaattcgacatccagttgacccagtcccccagctcactcagcgccagtgtgggggaccgggtgaccattacctgtaaagccagtcagagtgtggactatgacggggatagcttcctgaattggtatcagcagaagcctggcaaagccccaaagctgctgatctacgctgcatctaatctggagtcaggcgtgccttccaggttctccggtagtgggtctgggaccgatttcacattgaccatttcatccctccaacccgaggatttcgctacatattactgtcagcagtccaatgaggaccctctcacctttggccagggcaccaaagttgaaattaagagactcgaggacctgaagaacgtgttcccacctgaggtggccgtgttcgagcctagcgaggccgagatcagccacacccagaaagccaccctcgtgtgcctggctaccggcttctaccccgaccatgtggaactgtcttggtgggtcaacggcaaagaggtgcacagcggcgtgtgtaccgacccccagccactgaaagaacagcccgccctgaacgacagccggtactgcctgagcagcagactgagagtgtccgccaccttctggcagaacccccggaaccacttcagatgccaggtgcagttctacggcctgagcgagaacgacgagtggacccaggacagagccaagcccgtgacccagatcgtgtctgccgaagcctggggcagagccgattgcggctttaccagcgagagctaccagcagggcgtgctgagcgccaccatcctgtacgagatcctgctgggcaaggccaccctgtacgccgtgctggtgtctgccctggtgctgatggctatggtcaagcggaaggacagccggggaagggccaagcgatctggatctggagcaacaaacttctcactactcaaacaagcaggtgacgtggaggagaatcccgggcctactagtaccatggactggatttggcgcatccttttccttgtcggcgctgctaccggcgcccattccgggccccaggtgcagctccaagaaagcggacccggactggttaagccctctcagaccctgtctctgacctgcacagttagcggagccagcattaccacaggcgagtattattggaattggtttcggcagccaccaggcaaggggcttgagtggatgggtgctattgctgcctctggcagcaccacctactctcccagctttgagagcagaacctccatcagccgggacacctccaaaaaccagttctctctgaagctgtcctccgtgaccgctgctgacaccgccgtctattattgtggccggtctttcggcgtggcagctgtgaccacaggacagaacagaggccagggaacacttgtgaccgtgtcctctggatccggcggcggaggatctggcggaggcggatctgggggcggaggctctttcgaagaagtccaacttgtggagtctggagggggcctggtgcagcccggcggctctctcagactgtcttgtgcggcaagcggctacaccttcacctcttactggatagaatgggtgaggcaggcacctggaaagggactggagtggattggagagattctgccaggagggggagatacaaattacaatgaaatcttcaaggggcgggccaccttttcagcggataccagcaagaatacagcttacctgcagatgaatagcctccgggcagaagataccgctgtttattattgcacgagacgggtgccaataagactggactattgggggcaagggactcttgtcaccgtcagttcaacgcgtatccagaaccctgatcctgccgtgtaccagctgcgggatagcaagagcagcgacaagagcgtgtgtctgttcaccgacttcgacagccagaccaacgtgtcccagagcaaggactccgacgtgtacatcaccgataagtgcgtgctggacatgcggagcatggacttcaagagcaactccgccgtggcctggtccaacaagtccgatttcgcctgcgccaacgccttcaacaacagcattatccccgaggacacattcttcccaagccccgagagcagctgcgacgtgaagctggtggaaaagagcttcgagacagacaccaacctgaacttccagaacctgagcgtgatcggcttcagaatcctgctgctgaaagtggccggctttaacctgctgatgaccctgcggctgtggtccagc

SEQ ID NO: 37938 - DNA, 2724 bp, synthetic construct
  source 1..2724: mol_type = other DNA
atggccttaccagtgaccgccttgctcctgccgctggccttgctgctccacgccgccaggccggaagtgcagctggttgaatctggcggaggactggttcaggctggcggatctctgagactgtcttgtgccgccagcggcagaacctttagcatgggctggtttagacaggcccctggcaaagagagagagttcgtcgccgccatcacatactctggcggcagcccttactacgccgactctgtgaagggcagattcaccatcagccgggacaacgccaagaacaccgtgtacctccagatgaacagcctgaagcctgaggacaccgccgtgtactactgcgccgccaatccaacatacggcagcgactggaacgccgagaattggggccagggaacccaagtgacagtgtctagcggtaccggcggaggcggatctggcggcggaggtagcggtggcggaggatctgaattcgacatccagttgacccagtcccccagctcactcagcgccagtgtgggggaccgggtgaccattacctgtaaagccagtcagagtgtggactatgacggggatagcttcctgaattggtatcagcagaagcctggcaaagccccaaagctgctgatctacgctgcatctaatctggagtcaggcgtgccttccaggttctccggtagtgggtctgggaccgatttcacattgaccatttcatccctccaacccgaggatttcgctacatattactgtcagcagtccaatgaggaccctctcacctttggccagggcaccaaagttgaaattaagagactcgagatccagaaccctgatcctgccgtgtaccagctgcgggatagcaagagcagcgacaagagcgtgtgtctgttcaccgacttcgacagccagaccaacgtgtcccagagcaaggactccgacgtgtacatcaccgataagtgcgtgctggacatgcggagcatggacttcaagagcaactccgccgtggcctggtccaacaagtccgatttcgcctgcgccaacgccttcaacaacagcattatccccgaggacacattcttcccaagcagcgacgtgccctgcgacgtgaagctggtggaaaagagcttcgagacagacaccaacctgaacttccagaacctgagcgtgatcggcttcagaatcctgctgctgaaagtggccggctttaacctgctgatgaccctgcggctgtggtccagccgcgccaagagaagcggatctggcgtgaagcagaccctgaatttcgacctgctgaagctggctggcgacgtggaatccaacccaggccctactagtaccatggactggatttggcgcatccttttccttgtcggcgctgctaccggcgcccattccgggccccaggtgcagctggttgaatctggcggaggactggttcagcctggcggatctctgagactgtcttgtgccgccagcggcaacatcaacagcagaaactgcatgggctggttcagacaggcccctggcaagggaagagaaggcgtggcagctatcggccaagtgaccggcagaacctactacgtggacagcgtgaagggcagattcaccatcagcctggacaacagcaagaacaccctgtacctccagatgaacagcctgagagccgaggacaccgccgtgtactattgtgctgctgcccctggctgtctgctgtctgcacttagaagcgccgactacagaaactggggccagggcacactggtcaccgtttcttctggatccggcggcggaggatctggcggaggcggatctgggggcggaggctctttcgaagaagtccaacttgtggagtctggagggggcctggtgcagcccggcggctctctcagactgtcttgtgcggcaagcggctacaccttcacctcttactggatagaatgggtgaggcaggcacctggaaagggactggagtggattggagagattctgccaggagggggagatacaaattacaatgaaatcttcaaggggcgggccaccttttcagcggataccagcaagaatacagcttacctgcagatgaatagcctccgggcagaagataccgctgtttattattgcacgagacgggtgccaataagactggactattgggggcaagggactcttgtcaccgtcagttcaacgcgtgaggacctgaagaacgtgttcccacctgaggtggccgtgttcgagcctagcaaggccgagatcgcccacacccagaaagccaccctcgtgtgcctggctaccggcttctaccccgaccatgtggaactgtcttggtgggtcaacggcaaagaggtgcacagcggcgtgtgtaccgacccccagccactgaaagaacagcccgccctgaacgacagccggtactgcctgagcagcagactgagagtgtccgccaccttctggcagaacccccggaaccacttcagatgccaggtgcagttctacggcctgagcgagaacgacgagtggacccaggacagagccaagcccgtgacccagatcgtgtctgccgaagcctggggcagagccgattgcggcatcaccagcgccagctaccaccagggcgtgctgagcgccaccatcctgtacgagatcctgctgggcaaggccaccctgtacgccgtgctggtgtctgccctggtgctgatggctatggtcaagcggaaggacagccgggga

SEQ ID NO: 37939 - DNA, 2712 bp, synthetic construct
  source 1..2712: mol_type = other DNA
atggccttaccagtgaccgccttgctcctgccgctggccttgctgctccacgccgccaggccggaagtgcagctggttgaatctggcggaggactggttcaggctggcggatctctgagactgtcttgtgccgccagcggcagaacctttagcatgggctggtttagacaggcccctggcaaagagagagagttcgtcgccgccatcacatactctggcggcagcccttactacgccgactctgtgaagggcagattcaccatcagccgggacaacgccaagaacaccgtgtacctccagatgaacagcctgaagcctgaggacaccgccgtgtactactgcgccgccaatccaacatacggcagcgactggaacgccgagaattggggccagggaacccaagtgacagtgtctagcggtaccggcggaggcggatctggcggcggaggtagcggtggcggaggatctgaattcgacatccagttgacccagtcccccagctcactcagcgccagtgtgggggaccgggtgaccattacctgtaaagccagtcagagtgtggactatgacggggatagcttcctgaattggtatcagcagaagcctggcaaagccccaaagctgctgatctacgctgcatctaatctggagtcaggcgtgccttccaggttctccggtagtgggtctgggaccgatttcacattgaccatttcatccctccaacccgaggatttcgctacatattactgtcagcagtccaatgaggaccctctcacctttggccagggcaccaaagttgaaattaagagactcgaggacctgaagaacgtgttcccacctgaggtggccgtgttcgagcctagcgaggccgagatcagccacacccagaaagccaccctcgtgtgcctggctaccggcttctaccccgaccatgtggaactgtcttggtgggtcaacggcaaagaggtgcacagcggcgtgtgtaccgacccccagccactgaaagaacagcccgccctgaacgacagccggtactgcctgagcagcagactgagagtgtccgccaccttctggcagaacccccggaaccacttcagatgccaggtgcagttctacggcctgagcgagaacgacgagtggacccaggacagagccaagcccgtgacccagatcgtgtctgccgaagcctggggcagagccgattgcggctttaccagcgagagctaccagcagggcgtgctgagcgccaccatcctgtacgagatcctgctgggcaaggccaccctgtacgccgtgctggtgtctgccctggtgctgatggctatggtcaagcggaaggacagccggggaagggccaagcgatctggatctggagcaacaaacttctcactactcaaacaagcaggtgacgtggaggagaatcccgggcctactagtaccatggactggatttggcgcatccttttccttgtcggcgctgctaccggcgcccattccgggccccaggtgcagctggttgaatctggcggaggactggttcagcctggcggatctctgagactgtcttgtgccgccagcggcaacatcaacagcagaaactgcatgggctggttcagacaggcccctggcaagggaagagaaggcgtggcagctatcggccaagtgaccggcagaacctactacgtggacagcgtgaagggcagattcaccatcagcctggacaacagcaagaacaccctgtacctccagatgaacagcctgagagccgaggacaccgccgtgtactattgtgctgctgcccctggctgtctgctgtctgcacttagaagcgccgactacagaaactggggccagggcacactggtcaccgtttcttctggatccggcggcggaggatctggcggaggcggatctgggggcggaggctctttcgaagaagtccaacttgtggagtctggagggggcctggtgcagcccggcggctctctcagactgtcttgtgcggcaagcggctacaccttcacctcttactggatagaatgggtgaggcaggcacctggaaagggactggagtggattggagagattctgccaggagggggagatacaaattacaatgaaatcttcaaggggcgggccaccttttcagcggataccagcaagaatacagcttacctgcagatgaatagcctccgggcagaagataccgctgtttattattgcacgagacgggtgccaataagactggactattgggggcaagggactcttgtcaccgtcagttcaacgcgtatccagaaccctgatcctgccgtgtaccagctgcgggatagcaagagcagcgacaagagcgtgtgtctgttcaccgacttcgacagccagaccaacgtgtcccagagcaaggactccgacgtgtacatcaccgataagtgcgtgctggacatgcggagcatggacttcaagagcaactccgccgtggcctggtccaacaagtccgatttcgcctgcgccaacgccttcaacaacagcattatccccgaggacacattcttcccaagccccgagagcagctgcgacgtgaagctggtggaaaagagcttcgagacagacaccaacctgaacttccagaacctgagcgtgatcggcttcagaatcctgctgctgaaagtggccggctttaacctgctgatgaccctgcggctgtggtccagc

SEQ ID NO: 37940 - DNA, 2712 bp, synthetic construct
  source 1..2712: mol_type = other DNA
atggccttaccagtgaccgccttgctcctgccgctggccttgctgctccacgccgccaggccggaagtgcaactggttgaatccggtggcggcctggtgcaagcaggcggatctctcagacttagctgtgccgcctccggcagaaccttcacaatgggatggtttaggcaggctccagggaaagagagagagttcgtcgccgccatctctctgtctcccacactggcctactacgccgactctgtgaaaggccggttcaccatctccagagataatgccaagaacaccgtggtgctgcaaatgaactctctgaaacccgaggatacagccctgtactattgtgccgctgaccggaagtccgtgatgagcatcagacccgattactggggacagggcacacaagtcacagtgtcctctggtaccggcggaggcggatctggcggcggaggtagcggtggcggaggatctgaattcgacatccagttgacccagtcccccagctcactcagcgccagtgtgggggaccgggtgaccattacctgtaaagccagtcagagtgtggactatgacggggatagcttcctgaattggtatcagcagaagcctggcaaagccccaaagctgctgatctacgctgcatctaatctggagtcaggcgtgccttccaggttctccggtagtgggtctgggaccgatttcacattgaccatttcatccctccaacccgaggatttcgctacatattactgtcagcagtccaatgaggaccctctcacctttggccagggcaccaaagttgaaattaagagactcgaggacctgaagaacgtgttcccacctgaggtggccgtgttcgagcctagcgaggccgagatcagccacacccagaaagccaccctcgtgtgcctggctaccggcttctaccccgaccatgtggaactgtcttggtgggtcaacggcaaagaggtgcacagcggcgtgtgtaccgacccccagccactgaaagaacagcccgccctgaacgacagccggtactgcctgagcagcagactgagagtgtccgccaccttctggcagaacccccggaaccacttcagatgccaggtgcagttctacggcctgagcgagaacgacgagtggacccaggacagagccaagcccgtgacccagatcgtgtctgccgaagcctggggcagagccgattgcggctttaccagcgagagctaccagcagggcgtgctgagcgccaccatcctgtacgagatcctgctgggcaaggccaccctgtacgccgtgctggtgtctgccctggtgctgatggctatggtcaagcggaaggacagccggggaagggccaagcgatctggatctggagcaacaaacttctcactactcaaacaagcaggtgacgtggaggagaatcccgggcctactagtaccatggactggatttggcgcatccttttccttgtcggcgctgctaccggcgcccattccgggccccaggtgcagctggttgaatctggcggaggactggttcagcctggcggatctctgagactgtcttgtgccgccagcggcaacatcaacagcagaaactgcatgggctggttcagacaggcccctggcaagggaagagaaggcgtggcagctatcggccaagtgaccggcagaacctactacgtggacagcgtgaagggcagattcaccatcagcctggacaacagcaagaacaccctgtacctccagatgaacagcctgagagccgaggacaccgccgtgtactattgtgctgctgcccctggctgtctgctgtctgcacttagaagcgccgactacagaaactggggccagggcacactggtcaccgtttcttctggatccggcggcggaggatctggcggaggcggatctgggggcggaggctctttcgaagaagtccaacttgtggagtctggagggggcctggtgcagcccggcggctctctcagactgtcttgtgcggcaagcggctacaccttcacctcttactggatagaatgggtgaggcaggcacctggaaagggactggagtggattggagagattctgccaggagggggagatacaaattacaatgaaatcttcaaggggcgggccaccttttcagcggataccagcaagaatacagcttacctgcagatgaatagcctccgggcagaagataccgctgtttattattgcacgagacgggtgccaataagactggactattgggggcaagggactcttgtcaccgtcagttcaacgcgtatccagaaccctgatcctgccgtgtaccagctgcgggatagcaagagcagcgacaagagcgtgtgtctgttcaccgacttcgacagccagaccaacgtgtcccagagcaaggactccgacgtgtacatcaccgataagtgcgtgctggacatgcggagcatggacttcaagagcaactccgccgtggcctggtccaacaagtccgatttcgcctgcgccaacgccttcaacaacagcattatccccgaggacacattcttcccaagccccgagagcagctgcgacgtgaagctggtggaaaagagcttcgagacagacaccaacctgaacttccagaacctgagcgtgatcggcttcagaatcctgctgctgaaagtggccggctttaacctgctgatgaccctgcggctgtggtccagc

SEQ ID NO: 37941 - DNA, 2724 bp, synthetic construct
  source 1..2724: mol_type = other DNA
atggccttaccagtgaccgccttgctcctgccgctggccttgctgctccacgccgccaggccgcaggttcagctgcaagagtctggccctggcctggtcaagcctagccaaacactgagcctgacctgtaccgtgtctggcggctctatcaccaccggcgagttctactggaactggttcagacagcctcctggcaaaggactggaatggatgggagccattgccgccagcggcagcacaacatacagccctagcttcgagagccggaccagcatcagcagagacaccagcaagaatcagttcagcctgaagctgagcagcgtgacagccgccgatacagccgtgtattactgcggcagatcctttggagtggccgccgtgacaaccggccagaatagaggacagggcaccctggtcacagtgtctagcggtaccggcggaggcggatctggcggcggaggtagcggtggcggaggatctgaattcgacatccagttgacccagtcccccagctcactcagcgccagtgtgggggaccgggtgaccattacctgtaaagccagtcagagtgtggactatgacggggatagcttcctgaattggtatcagcagaagcctggcaaagccccaaagctgctgatctacgctgcatctaatctggagtcaggcgtgccttccaggttctccggtagtgggtctgggaccgatttcacattgaccatttcatccctccaacccgaggatttcgctacatattactgtcagcagtccaatgaggaccctctcacctttggccagggcaccaaagttgaaattaagagactcgaggacctgaagaacgtgttcccacctgaggtggccgtgttcgagcctagcgaggccgagatcagccacacccagaaagccaccctcgtgtgcctggctaccggcttctaccccgaccatgtggaactgtcttggtgggtcaacggcaaagaggtgcacagcggcgtgtgtaccgacccccagccactgaaagaacagcccgccctgaacgacagccggtactgcctgagcagcagactgagagtgtccgccaccttctggcagaacccccggaaccacttcagatgccaggtgcagttctacggcctgagcgagaacgacgagtggacccaggacagagccaagcccgtgacccagatcgtgtctgccgaagcctggggcagagccgattgcggctttaccagcgagagctaccagcagggcgtgctgagcgccaccatcctgtacgagatcctgctgggcaaggccaccctgtacgccgtgctggtgtctgccctggtgctgatggctatggtcaagcggaaggacagccggggaagggccaagcgatctggatctggagcaacaaacttctcactactcaaacaagcaggtgacgtggaggagaatcccgggcctactagtaccatggactggatttggcgcatccttttccttgtcggcgctgctaccggcgcccattccgggccccaggtgcagctggttgaatctggcggaggactggttcagcctggcggatctctgagactgtcttgtgccgccagcggcaacatcaacagcagaaactgcatgggctggttcagacaggcccctggcaagggaagagaaggcgtggcagctatcggccaagtgaccggcagaacctactacgtggacagcgtgaagggcagattcaccatcagcctggacaacagcaagaacaccctgtacctccagatgaacagcctgagagccgaggacaccgccgtgtactattgtgctgctgcccctggctgtctgctgtctgcacttagaagcgccgactacagaaactggggccagggcacactggtcaccgtttcttctggatccggcggcggaggatctggcggaggcggatctgggggcggaggctctttcgaagaagtccaacttgtggagtctggagggggcctggtgcagcccggcggctctctcagactgtcttgtgcggcaagcggctacaccttcacctcttactggatagaatgggtgaggcaggcacctggaaagggactggagtggattggagagattctgccaggagggggagatacaaattacaatgaaatcttcaaggggcgggccaccttttcagcggataccagcaagaatacagcttacctgcagatgaatagcctccgggcagaagataccgctgtttattattgcacgagacgggtgccaataagactggactattgggggcaagggactcttgtcaccgtcagttcaacgcgtatccagaaccctgatcctgccgtgtaccagctgcgggatagcaagagcagcgacaagagcgtgtgtctgttcaccgacttcgacagccagaccaacgtgtcccagagcaaggactccgacgtgtacatcaccgataagtgcgtgctggacatgcggagcatggacttcaagagcaactccgccgtggcctggtccaacaagtccgatttcgcctgcgccaacgccttcaacaacagcattatccccgaggacacattcttcccaagccccgagagcagctgcgacgtgaagctggtggaaaagagcttcgagacagacaccaacctgaacttccagaacctgagcgtgatcggcttcagaatcctgctgctgaaagtggccggctttaacctgctgatgaccctgcggctgtggtccagc

SEQ ID NO: 37942 - DNA, 1461 bp, synthetic construct
  source 1..1461: mol_type = other DNA
atggccttaccagtgaccgccttgctcctgccgctggccttgctgctccacgccgccaggccggacatccagttgacccagtcccccagctcactcagcgccagtgtgggggaccgggtgaccattacctgtaaagccagtcagagtgtggactatgagggggatagcttcctgaattggtatcagcagaagcctggcaaagccccaaagctgctgatctacgctgcatctaatctggagtcaggcgtgccttctaggttctccggtagtgggtctgggaccgatttcacattgaccatttcatccctccaacccgaggatttcgctacatattactgtcagcagtccaatgaggaccctctcacctttggccagggcaccaaagttgaaattaagagaggcggaggcggaagtggaggcggaggatctggcggcggaggctctgaagtccaacttgtggagtctggagggggcctggtgcagcccggcggctctctcagactgtcttgtgcggcaagcggctacaccttcacctcttactggatagaatgggtgaggcaggcacctggaaagggactggagtggattggagagattctgccaggagggggagatacaaattacaatgaaatcttcaaggggcgggccaccttttcagcggataccagcaagaatacagcttacctgcagatgaatagcctccgggcagaagataccgctgtttattattgcacgagacgggtgccaataagactggactattgggggcaagggactcttgtcaccgtcagttcaacgcgtaaaattgaagttatgtatcctcctccttacctagacaatgagaagagcaatggaaccattatccatgtgaaagggaaacacctttgtccaagtcccctatttcccggaccttctaagcccttttgggtgctggtggtggttgggggagtcctggcttgctatagcttgctagtaacagtggcctttattattttctgggtgaggagtaagaggagcaggctcctgcacagtgactacatgaacatgactccacgccgccccggacccacccgcaagcattaccagccctatgccccaccacgcgacttcgcagcctatcgctccagagtgaagttcagcaggagcgcagacgcccccgcgtaccagcagggccagaaccagctctataacgagctcaatctaggacgaagagaggagtacgatgttttggacaagagacgtggccgggaccctgagatggggggaaagccgagaaggaagaaccctcaggaaggcctgtacaatgaactgcagaaagataagatggcggaggcctacagtgagattgggatgaaaggcgagcgccggaggggcaaggggcacgatggcctttaccagggtctcagtacagccaccaaggacacctacgacgcccttcacatgcaggccctgccccctcgc

SEQ ID NO: 37943 - DNA, 1479 bp, synthetic construct
  source 1..1479: mol_type = other DNA
atggccttaccagtgaccgccttgctcctgccgctggccttgctgctccacgccgccaggccggacatccagttgacccagtcccccagctcactcagcgccagtgtgggggaccgggtgaccattacctgtaaagccagtcagagtgtggactatgagggggatagcttcctgaattggtatcagcagaagcctggcaaagccccaaagctgctgatctacgctgcatctaatctggagtcaggcgtgccttctaggttctccggtagtgggtctgggaccgatttcacattgaccatttcatccctccaacccgaggatttcgctacatattactgtcagcagtccaatgaggaccctctcacctttggccagggcaccaaagttgaaattaagagaggcggaggcggaagtggaggcggaggatctggcggcggaggctctgaagtccaacttgtggagtctggagggggcctggtgcagcccggcggctctctcagactgtcttgtgcggcaagcggctacaccttcacctcttactggatagaatgggtgaggcaggcacctggaaagggactggagtggattggagagattctgccaggagggggagatacaaattacaatgaaatcttcaaggggcgggccaccttttcagcggataccagcaagaatacagcttacctgcagatgaatagcctccgggcagaagataccgctgtttattattgcacgagacgggtgccaataagactggactattgggggcaagggactcttgtcaccgtcagttcaacgcgtgcgaagcccaccacgacgccagcgccgcgaccaccaacaccggcgcccaccatcgcgtcgcagcccctgtccctgcgcccagaggcgtgccggccagcggcggggggcgcagtgcacacgagggggctggacttcgcctgtgacatctacatctgggcgcccttggccgggacttgtggggtccttctcctgtcactggttatcaccctttactgcaaacggggcagaaagaaactcctgtatatattcaaacaaccatttatgagaccagtacaaactactcaagaggaagatggctgtagctgccgatttccagaagaagaagaaggaggatgtgaactgagagtgaagttcagcaggagcgcagacgcccccgcgtaccagcagggccagaaccagctctataacgagctgaatctaggacgaagagaggagtacgatgttttggacaagagacgtggccgggaccctgagatggggggaaagccgagaaggaagaaccctcaggaaggcctgtacaatgaactgcagaaagataagatggcggaggcctacagtgagattgggatgaaaggcgagcgccggaggggcaaggggcacgatggcctttaccagggtctcagtacagccaccaaggacacctacgacgcccttcacatgcaggccctgccccctcgc

SEQ ID NO: 37944 - DNA, 1479 bp, synthetic construct
  source 1..1479: mol_type = other DNA
atggccttaccagtgaccgccttgctcctgccgctggccttgctgctccacgccgccaggccggaagtccaacttgtggagtctggagggggcctggtgcagcccggcggctctctcagactgtcttgtgcggcaagcggctacaccttcacctcttactggatagaatgggtgaggcaggcacctggaaagggactggagtggattggagagattctgccaggagggggagatacaaattacaatgaaatcttcaaggggcgggccaccttttcagcggataccagcaagaatacagcttacctgcagatgaatagcctccgggcagaagataccgctgtttattattgcacgagacgggtgccaataagactggactattgggggcaagggactcttgtcaccgtcagttcaggcggaggcggaagtggaggcggaggatctggcggcggaggctctgacatccagttgacccagtcccccagctcactcagcgccagtgtgggggaccgggtgaccattacctgtaaagccagtcagagtgtggactatgagggggatagcttcctgaattggtatcagcagaagcctggcaaagccccaaagctgctgatctacgctgcatctaatctggagtcaggcgtgccttctaggttctccggtagtgggtctgggaccgatttcacattgaccatttcatccctccaacccgaggatttcgctacatattactgtcagcagtccaatgaggaccctctcacctttggccagggcaccaaagttgaaattaagagaacgcgtgcgaagcccaccacgacgccagcgccgcgaccaccaacaccggcgcccaccatcgcgtcgcagcccctgtccctgcgcccagaggcgtgccggccagcggcggggggcgcagtgcacacgagggggctggacttcgcctgtgacatctacatctgggcgcccttggccgggacttgtggggtccttctcctgtcactggttatcaccctttactgcaaacggggcagaaagaaactcctgtatatattcaaacaaccatttatgagaccagtacaaactactcaagaggaagatggctgtagctgccgatttccagaagaagaagaaggaggatgtgaactgagagtgaagttcagcaggagcgcagacgcccccgcgtaccagcagggccagaaccagctctataacgagctgaatctaggacgaagagaggagtacgatgttttggacaagagacgtggccgggaccctgagatggggggaaagccgagaaggaagaaccctcaggaaggcctgtacaatgaactgcagaaagataagatggcggaggcctacagtgagattgggatgaaaggcgagcgccggaggggcaaggggcacgatggcctttaccagggtctcagtacagccaccaaggacacctacgacgcccttcacatgcaggccctgccccctcgc

SEQ ID NO: 37945 - DNA, 1878 bp, synthetic construct
  source 1..1878: mol_type = other DNA
atggccttaccagtgaccgccttgctcctgccgctggccttgctgctccacgccgccaggccggacatccagttgacccagtcccccagctcactcagcgccagtgtgggggaccgggtgaccattacctgtaaagccagtcagagtgtggactatgagggggatagcttcctgaattggtatcagcagaagcctggcaaagccccaaagctgctgatctacgctgcatctaatctggagtcaggcgtgccttctaggttctccggtagtgggtctgggaccgatttcacattgaccatttcatccctccaacccgaggatttcgctacatattactgtcagcagtccaatgaggaccctctcacctttggccagggcaccaaagttgaaattaagagactcgagatccagaaccctgatcctgccgtgtaccagctgcgggatagcaagagcagcgacaagagcgtgtgtctgttcaccgacttcgacagccagaccaacgtgtcccagagcaaggactccgacgtgtacatcaccgataagtgcgtgctggacatgcggagcatggacttcaagagcaactccgccgtggcctggtccaacaagtccgatttcgcctgcgccaacgccttcaacaacagcattatccccgaggacacattcttcccaagcagcgacgtgccctgcgacgtgaagctggtggaaaagagcttcgagacagacaccaacctgaacttccagaacctgagcgtgatcggcttcagaatcctgctgctgaaagtggccggctttaacctgctgatgaccctgcggctgtggtccagccgcgccaagagaagcggatctggcgtgaagcagaccctgaatttcgacctgctgaagctggctggcgacgtggaatccaacccaggccctactagtatggactggatttggcgcatccttttccttgtcggcgctgctaccggcgcgcattccttcgaagaagtccaacttgtggagtctggagggggcctggtgcagcccggcggctctctcagactgtcttgtgcggcaagcggctacaccttcacctcttactggatagaatgggtgaggcaggcacctggaaagggactggagtggattggagagattctgccaggagggggagatacaaattacaatgaaatcttcaaggggcgggccaccttttcagcggataccagcaagaatacagcttacctgcagatgaatagcctccgggcagaagataccgctgtttattattgcacgagacgggtgccaataagactggactattgggggcaagggactcttgtcaccgtcagttcaacgcgtgaggacctgaagaacgtgttcccacctgaggtggccgtgttcgagcctagcaaggccgagatcgcccacacccagaaagccaccctcgtgtgcctggctaccggcttctaccccgaccatgtggaactgtcttggtgggtcaacggcaaagaggtgcacagcggcgtgtgtaccgacccccagccactgaaagaacagcccgccctgaacgacagccggtactgcctgagcagcagactgagagtgtccgccaccttctggcagaacccccggaaccacttcagatgccaggtgcagttctacggcctgagcgagaacgacgagtggacccaggacagagccaagcccgtgacccagatcgtgtctgccgaagcctggggcagagccgattgcggcatcaccagcgccagctaccaccagggcgtgctgagcgccaccatcctgtacgagatcctgctgggcaaggccaccctgtacgccgtgctggtgtctgccctggtgctgatggctatggtcaagcggaaggacagccgggga

SEQ ID NO: 37946 - DNA, 1866 bp, synthetic construct
  source 1..1866: mol_type = other DNA
atggccttaccagtgaccgccttgctcctgccgctggccttgctgctccacgccgccaggccggacatccagttgacccagtcccccagctcactcagcgccagtgtgggggaccgggtgaccattacctgtaaagccagtcagagtgtggactatgagggggatagcttcctgaattggtatcagcagaagcctggcaaagccccaaagctgctgatctacgctgcatctaatctggagtcaggcgtgccttctaggttctccggtagtgggtctgggaccgatttcacattgaccatttcatccctccaacccgaggatttcgctacatattactgtcagcagtccaatgaggaccctctcacctttggccagggcaccaaagttgaaattaagagactcgaggacctgaagaacgtgttcccacctgaggtggccgtgttcgagcctagcaaggccgagatcgcccacacccagaaagccaccctcgtgtgcctggctaccggcttctaccccgaccatgtggaactgtcttggtgggtcaacggcaaagaggtgcacagcggcgtgtgtaccgacccccagccactgaaagaacagcccgccctgaacgacagccggtactgcctgagcagcagactgagagtgtccgccaccttctggcagaacccccggaaccacttcagatgccaggtgcagttctacggcctgagcgagaacgacgagtggacccaggacagagccaagcccgtgacccagatcgtgtctgccgaagcctggggcagagccgattgcggcatcaccagcgccagctaccaccagggcgtgctgagcgccaccatcctgtacgagatcctgctgggcaaggccaccctgtacgccgtgctggtgtctgccctggtgctgatggctatggtcaagcggaaggacagccggggaagggccaagcgatctggatctggagcaacaaacttctcactactcaaacaagcaggtgacgtggaggagaatcccgggcctactagtatggactggatttggcgcatccttttccttgtcggcgctgctaccggcgcgcattccttcgaagaagtccaacttgtggagtctggagggggcctggtgcagcccggcggctctctcagactgtcttgtgcggcaagcggctacaccttcacctcttactggatagaatgggtgaggcaggcacctggaaagggactggagtggattggagagattctgccaggagggggagatacaaattacaatgaaatcttcaaggggcgggccaccttttcagcggataccagcaagaatacagcttacctgcagatgaatagcctccgggcagaagataccgctgtttattattgcacgagacgggtgccaataagactggactattgggggcaagggactcttgtcaccgtcagttcaacgcgtatccagaaccctgatcctgccgtgtaccagctgcgggatagcaagagcagcgacaagagcgtgtgtctgttcaccgacttcgacagccagaccaacgtgtcccagagcaaggactccgacgtgtacatcaccgataagtgcgtgctggacatgcggagcatggacttcaagagcaactccgccgtggcctggtccaacaagtccgatttcgcctgcgccaacgccttcaacaacagcattatccccgaggacacattcttcccaagcagcgacgtgccctgcgacgtgaagctggtggaaaagagcttcgagacagacaccaacctgaacttccagaacctgagcgtgatcggcttcagaatcctgctgctgaaagtggccggctttaacctgctgatgaccctgcggctgtggtccagc

SEQ ID NO: 37947 - DNA, 1866 bp, synthetic construct
  source 1..1866: mol_type = other DNA
atggccttaccagtgaccgccttgctcctgccgctggccttgctgctccacgccgccaggccggacatccagttgacccagtcccccagctcactcagcgccagtgtgggggaccgggtgaccattacctgtaaagccagtcagagtgtggactatgagggggatagcttcctgaattggtatcagcagaagcctggcaaagccccaaagctgctgatctacgctgcatctaatctggagtcaggcgtgccttctaggttctccggtagtgggtctgggaccgatttcacattgaccatttcatccctccaacccgaggatttcgctacatattactgtcagcagtccaatgaggaccctctcacctttggccagggcaccaaagttgaaattaagagactcgaggacctgaagaacgtgttcccacctgaggtggccgtgttcgagcctagcgaggccgagatcagccacacccagaaagccaccctcgtgtgcctggctaccggcttctaccccgaccatgtggaactgtcttggtgggtcaacggcaaagaggtgcacagcggcgtgtgtaccgacccccagccactgaaagaacagcccgccctgaacgacagccggtactgcctgagcagcagactgagagtgtccgccaccttctggcagaacccccggaaccacttcagatgccaggtgcagttctacggcctgagcgagaacgacgagtggacccaggacagagccaagcccgtgacccagatcgtgtctgccgaagcctggggcagagccgattgcggctttaccagcgagagctaccagcagggcgtgctgagcgccaccatcctgtacgagatcctgctgggcaaggccaccctgtacgccgtgctggtgtctgccctggtgctgatggctatggtcaagcggaaggacagccggggaagggccaagcgatctggatctggagcaacaaacttctcactactcaaacaagcaggtgacgtggaggagaatcccgggcctactagtatggactggatttggcgcatccttttccttgtcggcgctgctaccggcgcgcattccttcgaagaagtccaacttgtggagtctggagggggcctggtgcagcccggcggctctctcagactgtcttgtgcggcaagcggctacaccttcacctcttactggatagaatgggtgaggcaggcacctggaaagggactggagtggattggagagattctgccaggagggggagatacaaattacaatgaaatcttcaaggggcgggccaccttttcagcggataccagcaagaatacagcttacctgcagatgaatagcctccgggcagaagataccgctgtttattattgcacgagacgggtgccaataagactggactattgggggcaagggactcttgtcaccgtcagttcaacgcgtatccagaaccctgatcctgccgtgtaccagctgcgggatagcaagagcagcgacaagagcgtgtgtctgttcaccgacttcgacagccagaccaacgtgtcccagagcaaggactccgacgtgtacatcaccgataagtgcgtgctggacatgcggagcatggacttcaagagcaactccgccgtggcctggtccaacaagtccgatttcgcctgcgccaacgccttcaacaacagcattatccccgaggacacattcttcccaagccccgagagcagctgcgacgtgaagctggtggaaaagagcttcgagacagacaccaacctgaacttccagaacctgagcgtgatcggcttcagaatcctgctgctgaaagtggccggctttaacctgctgatgaccctgcggctgtggtccagc

SEQ ID NO: 37948 - DNA, 1878 bp, synthetic construct
  source 1..1878: mol_type = other DNA
atggccttaccagtgaccgccttgctcctgccgctggccttgctgctccacgccgccaggccggacatccagttgacccagtcccccagctcactcagcgccagtgtgggggaccgggtgaccattacctgtaaagccagtcagagtgtggactatgagggggatagcttcctgaattggtatcagcagaagcctggcaaagccccaaagctgctgatctacgctgcatctaatctggagtcaggcgtgccttctaggttctccggtagtgggtctgggaccgatttcacattgaccatttcatccctccaacccgaggatttcgctacatattactgtcagcagtccaatgaggaccctctcacctttggccagggcaccaaagttgaaattaagagactcgagatccagaaccctgatcctgccgtgtaccagctgcgggatagcaagagcagcgacaagagcgtgtgtctgttcaccgacttcgacagccagaccaacgtgtcccagagcaaggactccgacgtgtacatcaccgataagtgcgtgctggacatgcggagcatggacttcaagagcaactccgccgtggcctggtccaacaagtccgatttcgcctgcgccaacgccttcaacaacagcattatccccgaggacacattcttcccaagccccgagagcagctgcgacgtgaagctggtggaaaagagcttcgagacagacaccaacctgaacttccagaacctgagcgtgatcggcttcagaatcctgctgctgaaagtggccggctttaacctgctgatgaccctgcggctgtggtccagccgcgccaagagaagcggatctggcgtgaagcagaccctgaatttcgacctgctgaagctggctggcgacgtggaatccaacccaggccctactagtatggactggatttggcgcatccttttccttgtcggcgctgctaccggcgcgcattccttcgaagaagtccaacttgtggagtctggagggggcctggtgcagcccggcggctctctcagactgtcttgtgcggcaagcggctacaccttcacctcttactggatagaatgggtgaggcaggcacctggaaagggactggagtggattggagagattctgccaggagggggagatacaaattacaatgaaatcttcaaggggcgggccaccttttcagcggataccagcaagaatacagcttacctgcagatgaatagcctccgggcagaagataccgctgtttattattgcacgagacgggtgccaataagactggactattgggggcaagggactcttgtcaccgtcagttcaacgcgtgaggacctgaagaacgtgttcccacctgaggtggccgtgttcgagcctagcgaggccgagatcagccacacccagaaagccaccctcgtgtgcctggctaccggcttctaccccgaccatgtggaactgtcttggtgggtcaacggcaaagaggtgcacagcggcgtgtgtaccgacccccagccactgaaagaacagcccgccctgaacgacagccggtactgcctgagcagcagactgagagtgtccgccaccttctggcagaacccccggaaccacttcagatgccaggtgcagttctacggcctgagcgagaacgacgagtggacccaggacagagccaagcccgtgacccagatcgtgtctgccgaagcctggggcagagccgattgcggctttaccagcgagagctaccagcagggcgtgctgagcgccaccatcctgtacgagatcctgctgggcaaggccaccctgtacgccgtgctggtgtctgccctggtgctgatggctatggtcaagcggaaggacagccgggga

SEQ ID NO: 37949 - DNA, 1914 bp, synthetic construct
  source 1..1914: mol_type = other DNA
atggccttaccagtgaccgccttgctcctgccgctggccttgctgctccacgccgccaggccgctcgaggaggacctgaagaacgtgttcccacctgaggtggccgtgttcgagcctagcaaggccgagatcgcccacacccagaaagccaccctcgtgtgcctggctaccggcttctaccccgaccatgtggaactgtcttggtgggtcaacggcaaagaggtgcacagcggcgtgtgtaccgacccccagccactgaaagaacagcccgccctgaacgacagccggtactgcctgagcagcagactgagagtgtccgccaccttctggcagaacccccggaaccacttcagatgccaggtgcagttctacggcctgagcgagaacgacgagtggacccaggacagagccaagcccgtgacccagatcgtgtctgccgaagcctggggcagagccgattgcggcatcaccagcgccagctaccaccagggcgtgctgagcgccaccatcctgtacgagatcctgctgggcaaggccaccctgtacgccgtgctggtgtctgccctggtgctgatggctatggtcaagcggaaggacagccggggaagggccaagcgatctggatctggagcaacaaacttctcactactcaaacaagcaggtgacgtggaggagaatcccgggcctactagcatggccttaccagtgaccgccttgctcctgccgctggccttgctgctccacgccgccaggccggacatccagttgacccagtcccccagctcactcagcgccagtgtgggggaccgggtgaccattacctgtaaagccagtcagagtgtggactatgagggggatagcttcctgaattggtatcagcagaagcctggcaaagccccaaagctgctgatctacgctgcatctaatctggagtcaggcgtgccttctaggttctccggtagtgggtctgggaccgatttcacattgaccatttcatccctccaacccgaggatttcgctacatattactgtcagcagtccaatgaggaccctctcacctttggccagggcaccaaagttgaaattaagagaggcggaggcggaagtggaggcggaggatctggcggcggaggctctgaagtccaacttgtggagtctggagggggcctggtgcagcccggcggctctctcagactgtcttgtgcggcaagcggctacaccttcacctcttactggatagaatgggtgaggcaggcacctggaaagggactggagtggattggagagattctgccaggagggggagatacaaattacaatgaaatcttcaaggggcgggccaccttttcagcggataccagcaagaatacagcttacctgcagatgaatagcctccgggcagaagataccgctgtttattattgcacgagacgggtgccaataagactggactattgggggcaagggactcttgtcaccgtcagttcaacgcgtatccagaaccctgatcctgccgtgtaccagctgcgggatagcaagagcagcgacaagagcgtgtgtctgttcaccgacttcgacagccagaccaacgtgtcccagagcaaggactccgacgtgtacatcaccgataagtgcgtgctggacatgcggagcatggacttcaagagcaactccgccgtggcctggtccaacaagtccgatttcgcctgcgccaacgccttcaacaacagcattatccccgaggacacattcttcccaagcagcgacgtgccctgcgacgtgaagctggtggaaaagagcttcgagacagacaccaacctgaacttccagaacctgagcgtgatcggcttcagaatcctgctgctgaaagtggccggctttaacctgctgatgaccctgcggctgtggtccagc

SEQ ID NO: 37950 - DNA, 1935 bp, synthetic construct
  source 1..1935: mol_type = other DNA
atggccttaccagtgaccgccttgctcctgccgctggccttgctgctccacgccgccaggccgctcgagggctccggcgatcgccctgatcctgccgtgtaccagctgcgggatagcaagagcagcgacaagagcgtgtgtctgttcaccgacttcgacagccagaccaacgtgtcccagagcaaggactccgacgtgtacatcaccgataagtgcgtgctggacatgcggagcatggacttcaagagcaactccgccgtggcctggtccaacaagtccgatttcgcctgcgccaacgccttcaacaacagcattatccccgaggacacattcttcccaagccccgagagcagctgcgacgtgaagctggtggaaaagagcttcgagacagacaccaacctgaacttccagaacctgagcgtgatcggcttcagaatcctgctgctgaaagtggccggctttaacctgctgatgaccctgcggctgtggtccagctctagtcgcgccaagagaagcggatctggcgtgaagcagaccctgaatttcgacctgctgaagctggctggcgacgtggaatccaacccaggccccactagcatggccttaccagtgaccgccttgctcctgccgctggccttgctgctccacgccgccaggccggacatccagttgacccagtcccccagctcactcagcgccagtgtgggggaccgggtgaccattacctgtaaagccagtcagagtgtggactatgagggggatagcttcctgaattggtatcagcagaagcctggcaaagccccaaagctgctgatctacgctgcatctaatctggagtcaggcgtgccttctaggttctccggtagtgggtctgggaccgatttcacattgaccatttcatccctccaacccgaggatttcgctacatattactgtcagcagtccaatgaggaccctctcacctttggccagggcaccaaagttgaaattaagagaggcggaggcggaagtggaggcggaggatctggcggcggaggctctgaagtccaacttgtggagtctggagggggcctggtgcagcccggcggctctctcagactgtcttgtgcggcaagcggctacaccttcacctcttactggatagaatgggtgaggcaggcacctggaaagggactggagtggattggagagattctgccaggagggggagatacaaattacaatgaaatcttcaaggggcgggccaccttttcagcggataccagcaagaatacagcttacctgcagatgaatagcctccgggcagaagataccgctgtttattattgcacgagacgggtgccaataagactggactattgggggcaagggactcttgtcaccgtcagttcaacgcgtgaggacctgaagaacgtgttcccacctgaggtggccgtgttcgagcctagcgaggccgagatcagccacacccagaaagccaccctcgtgtgcctggctaccggcttctaccccgaccatgtggaactgtcttggtgggtcaacggcaaagaggtgcacagcggcgtgtgtaccgacccccagccactgaaagaacagcccgccctgaacgacagccggtactgcctgagcagcagactgagagtgtccgccaccttctggcagaacccccggaaccacttcagatgccaggtgcagttctacggcctgagcgagaacgacgagtggacccaggacagagccaagcccgtgacccagatcgtgtctgccgaagcctggggcagagccgattgcggctttaccagcgagagctaccagcagggcgtgctgagcgccaccatcctgtacgagatcctgctgggcaaggccaccctgtacgccgtgctggtgtctgccctggtgctgatggctatggtcaagcggaaggacagccgggga

SEQ ID NO: 37951 - DNA, 1866 bp, synthetic construct
  source 1..1866: mol_type = other DNA
atggccttaccagtgaccgccttgctcctgccgctggccttgctgctccacgccgccaggccggacatccagttgacccagtcccccagctcactcagcgccagtgtgggggaccgggtgaccattacctgtaaagccagtcagagtgtggactatgagggggatagcttcctgaattggtatcagcagaagcctggcaaagccccaaagctgctgatctacgctgcatctaatctggagtcaggcgtgccttctaggttctccggtagtgggtctgggaccgatttcacattgaccatttcatccctccaacccgaggatttcgctacatattactgtcagcagtccaatgaggaccctctcacctttggccagggcaccaaagttgaaattaagagactcgaggacctgaagaacgtgttcccacctgaggtggccgtgttcgagcctagcgaggccgagatcagccacacccagaaagccaccctcgtgtgcctggctaccggcttctaccccgaccatgtggaactgtcttggtgggtcaacggcaaagaggtgcacagcggcgtgtctaccgacccccagccactgaaagaacagcccgccctgaacgacagccggtactgcctgagcagcagactgagagtgtccgccaccttctggcagaacccccggaaccacttcagatgccaggtgcagttctacggcctgagcgagaacgacgagtggacccaggacagagccaagcccgtgacccagatcgtgtctgccgaagcctggggcagagccgattgcggctttaccagcgagagctaccagcagggcgtgctgagcgccaccatcctgtacgagatcctgctgggcaaggccaccctgtacgccgtgctggtgtctgccctggtgctgatggctatggtcaagcggaaggacagccggggaagggccaagcgatctggatctggagcaacaaacttctcactactcaaacaagcaggtgacgtggaggagaatcccgggcctactagtatggactggatttggcgcatccttttccttgtcggcgctgctaccggcgcgcattccttcgaagaagtccaacttgtggagtctggagggggcctggtgcagcccggcggctctctcagactgtcttgtgcggcaagcggctacaccttcacctcttactggatagaatgggtgaggcaggcacctggaaagggactggagtggattggagagattctgccaggagggggagatacaaattacaatgaaatcttcaaggggcgggccaccttttcagcggataccagcaagaatacagcttacctgcagatgaatagcctccgggcagaagataccgctgtttattattgcacgagacgggtgccaataagactggactattgggggcaagggactcttgtcaccgtcagttcaacgcgtatccagaaccctgatcctgccgtgtaccagctgcgggatagcaagagcagcgacaagagcgtgtgtctgttcaccgacttcgacagccagaccaacgtgtcccagagcaaggactccgacgtgtacatcaccgataagaccgtgctggacatgcggagcatggacttcaagagcaactccgccgtggcctggtccaacaagtccgatttcgcctgcgccaacgccttcaacaacagcattatccccgaggacacattcttcccaagccccgagagcagctgcgacgtgaagctggtggaaaagagcttcgagacagacaccaacctgaacttccagaacctgagcgtgatcggcttcagaatcctgctgctgaaagtggccggctttaacctgctgatgaccctgcggctgtggtccagc

SEQ ID NO: 37952 - DNA, 1890 bp, synthetic construct
  source 1..1890: mol_type = other DNA
atggccttaccagtgaccgccttgctcctgccgctggccttgctgctccacgccgccaggccggacatccagttgacccagtcccccagctcactcagcgccagtgtgggggaccgggtgaccattacctgtaaagccagtcagagtgtggactatgagggggatagcttcctgaattggtatcagcagaagcctggcaaagccccaaagctgctgatctacgctgcatctaatctggagtcaggcgtgccttctaggttctccggtagtgggtctgggaccgatttcacattgaccatttcatccctccaacccgaggatttcgctacatattactgtcagcagtccaatgaggaccctctcacctttggccagggcaccaaagttgaaattaagagactcgaggacaagcagctggacgccgacgtgtcccccaagcctaccatcttcctgccctctatcgccgagacaaagctccagaaggccggcacctacctgtgcctgctggaaaagttcttcccagatgtgattaagatccactggcaggaaaagaagtccaacaccatcctgggcagccaggaaggcaacaccatgaagaccaacgacacctacatgaagttcagctggctgaccgtgcccgagaagtccctggacaaagaacacagatgcatcgtgcggcacgaaaacaacaagaacggcgtggaccaggaaatcatcttcccacccatcaagaccgatgtgattacaatggaccccaaggacaactgctccaaggacgccaacgataccctgctgctccagctgaccaacaccagcgcctactacatgtacttgttgctgctgctgaagtccgtggtgtacttcgccatcatcacatgctgcctgctgcggagaaccgccttctgctgcaacggcgagaagtctagggccaagcgatctggatctggagcaacaaacttctcactactcaaacaagcaggtgacgtggaggagaatcccgggcctactagtatggactggatttggcgcatccttttccttgtcggcgctgctaccggcgcgcattccttcgaagaagtccaacttgtggagtctggagggggcctggtgcagcccggcggctctctcagactgtcttgtgcggcaagcggctacaccttcacctcttactggatagaatgggtgaggcaggcacctggaaagggactggagtggattggagagattctgccaggagggggagatacaaattacaatgaaatcttcaaggggcgggccaccttttcagcggataccagcaagaatacagcttacctgcagatgaatagcctccgggcagaagataccgctgtttattattgcacgagacgggtgccaataagactggactattgggggcaagggactcttgtcaccgtcagttcaacgcgtagccagcctcacaccaagcccagcgtgttcgtgatgaagaacggcaccaacgtggcctgcctcgtgaaagagttctaccccaaggacatcaggatcaacctggtgtccagcaagaagatcaccgagttcgaccccgccatcgtgatctcccccagcggcaagtacaacgccgtgaagctggggaagtacgaggacagcaacagcgtgacctgctccgtgcagcacgacaacaagaccgtgcacagcaccgactttgaagtgaaaaccgactccaccgaccacgtgaagcccaaagagacagagaacaccaagcagcccagcaagagctgccacaagcccaaggccatcgtgcacaccgagaaagtgaacatgatgagcctgaccgtgctgggcctgcggatgctgttcgccaaaaccgtggccgtgaacttcctgctgaccgccaagctgttcttcctc

SEQ ID NO: 37953 - DNA, 1890 bp, synthetic construct
  source 1..1890: mol_type = other DNA
atggccttaccagtgaccgccttgctcctgccgctggccttgctgctccacgccgccaggccggacatccagttgacccagtcccccagctcactcagcgccagtgtgggggaccgggtgaccattacctgtaaagccagtcagagtgtggactatgagggggatagcttcctgaattggtatcagcagaagcctggcaaagccccaaagctgctgatctacgctgcatctaatctggagtcaggcgtgccttctaggttctccggtagtgggtctgggaccgatttcacattgaccatttcatccctccaacccgaggatttcgctacatattactgtcagcagtccaatgaggaccctctcacctttggccagggcaccaaagttgaaattaagagactcgagagccagcctcacaccaagcccagcgtgttcgtgatgaagaacggcaccaacgtggcctgcctcgtgaaagagttctaccccaaggacatcaggatcaacctggtgtccagcaagaagatcaccgagttcgaccccgccatcgtgatctcccccagcggcaagtacaacgccgtgaagctggggaagtacgaggacagcaacagcgtgacctgctccgtgcagcacgacaacaagaccgtgcacagcaccgactttgaagtgaaaaccgactccaccgaccacgtgaagcccaaagagacagagaacaccaagcagcccagcaagagctgccacaagcccaaggccatcgtgcacaccgagaaagtgaacatgatgagcctgaccgtgctgggcctgcggatgctgttcgccaaaaccgtggccgtgaacttcctgctgaccgccaagctgttcttcctcagggccaagcgatctggatctggagcaacaaacttctcactactcaaacaagcaggtgacgtggaggagaatcccgggcctactagtatggactggatttggcgcatccttttccttgtcggcgctgctaccggcgcgcattccttcgaagaagtccaacttgtggagtctggagggggcctggtgcagcccggcggctctctcagactgtcttgtgcggcaagcggctacaccttcacctcttactggatagaatgggtgaggcaggcacctggaaagggactggagtggattggagagattctgccaggagggggagatacaaattacaatgaaatcttcaaggggcgggccaccttttcagcggataccagcaagaatacagcttacctgcagatgaatagcctccgggcagaagataccgctgtttattattgcacgagacgggtgccaataagactggactattgggggcaagggactcttgtcaccgtcagttcaacgcgtgacaagcagctggacgccgacgtgtcccccaagcctaccatcttcctgccctctatcgccgagacaaagctccagaaggccggcacctacctgtgcctgctggaaaagttcttcccagatgtgattaagatccactggcaggaaaagaagtccaacaccatcctgggcagccaggaaggcaacaccatgaagaccaacgacacctacatgaagttcagctggctgaccgtgcccgagaagtccctggacaaagaacacagatgcatcgtgcggcacgaaaacaacaagaacggcgtggaccaggaaatcatcttcccacccatcaagaccgatgtgattacaatggaccccaaggacaactgctccaaggacgccaacgataccctgctgctccagctgaccaacaccagcgcctactacatgtacttgttgctgctgctgaagtccgtggtgtacttcgccatcatcacatgctgcctgctgcggagaaccgccttctgctgcaacggcgagaagtct

SEQ ID NO: 37954 - DNA, 1935 bp, synthetic construct
  source 1..1935: mol_type = other DNA
atggccttaccagtgaccgccttgctcctgccgctggccttgctgctccacgccgccaggccgctcgaggacaagcagctggacgccgacgtgtcccccaagcctaccatcttcctgccctctatcgccgagacaaagctccagaaggccggcacctacctgtgcctgctggaaaagttcttcccagatgtgattaagatccactggcaggaaaagaagtccaacaccatcctgggcagccaggaaggcaacaccatgaagaccaacgacacctacatgaagttcagctggctgaccgtgcccgagaagtccctggacaaagaacacagatgcatcgtgcggcacgaaaacaacaagaacggcgtggaccaggaaatcatcttcccacccatcaagaccgatgtgattacaatggaccccaaggacaactgctccaaggacgccaacgataccctgctgctccagctgaccaacaccagcgcctactacatgtacttgttgctgctgctgaagtccgtggtgtacttcgccatcatcacatgctgcctgctgcggagaaccgccttctgctgcaacggcgagaagtctagggccaagcgatctggatctggagcaacaaacttctcactactcaaacaagcaggtgacgtggaggagaatcccgggcctactagcatggccttaccagtgaccgccttgctcctgccgctggccttgctgctccacgccgccaggccggacatccagttgacccagtcccccagctcactcagcgccagtgtgggggaccgggtgaccattacctgtaaagccagtcagagtgtggactatgagggggatagcttcctgaattggtatcagcagaagcctggcaaagccccaaagctgctgatctacgctgcatctaatctggagtcaggcgtgccttctaggttctccggtagtgggtctgggaccgatttcacattgaccatttcatccctccaacccgaggatttcgctacatattactgtcagcagtccaatgaggaccctctcacctttggccagggcaccaaagttgaaattaagagaggcggaggcggaagtggaggcggaggatctggcggcggaggctctgaagtccaacttgtggagtctggagggggcctggtgcagcccggcggctctctcagactgtcttgtgcggcaagcggctacaccttcacctcttactggatagaatgggtgaggcaggcacctggaaagggactggagtggattggagagattctgccaggagggggagatacaaattacaatgaaatcttcaaggggcgggccaccttttcagcggataccagcaagaatacagcttacctgcagatgaatagcctccgggcagaagataccgctgtttattattgcacgagacgggtgccaataagactggactattgggggcaagggactcttgtcaccgtcagttcaacgcgtagccagcctcacaccaagcccagcgtgttcgtgatgaagaacggcaccaacgtggcctgcctcgtgaaagagttctaccccaaggacatcaggatcaacctggtgtccagcaagaagatcaccgagttcgaccccgccatcgtgatctcccccagcggcaagtacaacgccgtgaagctggggaagtacgaggacagcaacagcgtgacctgctccgtgcagcacgacaacaagaccgtgcacagcaccgactttgaagtgaaaaccgactccaccgaccacgtgaagcccaaagagacagagaacaccaagcagcccagcaagagctgccacaagcccaaggccatcgtgcacaccgagaaagtgaacatgatgagcctgaccgtgctgggcctgcggatgctgttcgccaaaaccgtggccgtgaacttcctgctgaccgccaagctgttcttcctc

SEQ ID NO: 37955 - DNA, 2397 bp, synthetic construct
  source 1..2397: mol_type = other DNA
atggccttaccagtgaccgccttgctcctgccgctggccttgctgctccacgccgccaggccggacatccagttgacccagtcccccagctcactcagcgccagtgtgggggaccgggtgaccattacctgtaaagccagtcagagtgtggactatgagggggatagcttcctgaattggtatcagcagaagcctggcaaagccccaaagctgctgatctacgctgcatctaatctggagtcaggcgtgccttctaggttctccggtagtgggtctgggaccgatttcacattgaccatttcatccctccaacccgaggatttcgctacatattactgtcagcagtccaatgaggaccctctcacctttggccagggcaccaaagttgaaattaagagaggacagcctaaggccaatcctaccgtgacactgttccctccaagcagcgaagaactccaggccaacaaggccacacttgtgtgcctgatctccgacttctaccctggggctgtgacagtggcttggaaggccgatggatctcctgtgaaagccggcgtggaaaccaccaagccatccaagcagagcaacaacaaatacgccgccagctcctacctgagcctgacacctgagcagtggaagtcccacagatcctacagctgccaagtgacccacgaaggcagcaccgtggaaaagacagtggcccctacagagtgcagcggatcccagagcttcggcctgctggaccccaagctgtgctacctgctggatggcatcctgttcatctacggcgtgatcctgaccgccctgttcctgagagtgaagttcagcagaagcgccgacgcccctgcctaccagcagggacagaaccaactgtacaacgagctgaacctgggcagacgggaagagtacgacgtgctggacaagcggagaggcagggaccctgagatgggcggaaagccccagcggagaaagaacccccaggaaggactgtataacgaactccagaaagacaagatggccgaagcctacagcgagatcggcatgaagggcgagcggagaagaggcaagggccacgatggcctgtaccagggcctgagcaccgccaccaaggacacctatgacgccctgcacatgcaggccctgcctccaagaagggccaagcgatctggatctggagcaacaaacttctcactactcaaacaagcaggtgacgtggaggagaatcccgggcctactagtatggactggatttggcgcatccttttccttgtcggcgctgctaccggcgcgcattccttcgaagaagtccaacttgtggagtctggagggggcctggtgcagcccggcggctctctcagactgtcttgtgcggcaagcggctacaccttcacctcttactggatagaatgggtgaggcaggcacctggaaagggactggagtggattggagagattctgccaggagggggagatacaaattacaatgaaatcttcaaggggcgggccaccttttcagcggataccagcaagaatacagcttacctgcagatgaatagcctccgggcagaagataccgctgtttattattgcacgagacgggtgccaataagactggactattgggggcaagggactcttgtcaccgtcagttcagcctctacaaagggaccctccgtgtttcctctggctcccagcagcaagtctacaagcggaggaacagccgctctgggctgcctggtcaaggattactttcccgagcctgtgaccgtgtcctggaatagcggagcactgacaagcggcgtgcacacctttccagccgtgctgcaaagcagcggcctgtactctctgagcagcgtggtcacagtgcctagctctagcctgggcacccagacctacatctgcaatgtgaaccacaagcctagcaacaccaaggtggacaagagagtggaacccaagagctgtggtacccagagttttgggttgttggaccctaaattgtgctatctgttggacggaatcctgttcatttacggagtgatcctgaccgcattgttcctgcgggttaagttttccagatccgcagacgcacccgcttaccaacaagggcagaaccaactctacaatgaacttaatttggggcggagggaagagtacgacgttctggacaaaaggaggggacgagatcccgagatgggcggaaagcctcagcgaaggaagaatccgcaagaggggctttataacgaactccagaaagataaaatggcagaagcctatagtgagattgggatgaagggagaaaggaggaggggtaaaggtcacgatgggttgtaccaaggattgagcacagccactaaagatacctatgatgcgctccacatgcaggccctgccgccaaga

SEQ ID NO: 37956 - DNA, 2454 bp, synthetic construct
  source 1..2454: mol_type = other DNA
atggccttaccagtgaccgccttgctcctgccgctggccttgctgctccacgccgccaggccggacatccagttgacccagtcccccagctcactcagcgccagtgtgggggaccgggtgaccattacctgtaaagccagtcagagtgtggactatgagggggatagcttcctgaattggtatcagcagaagcctggcaaagccccaaagctgctgatctacgctgcatctaatctggagtcaggcgtgccttctaggttctccggtagtgggtctgggaccgatttcacattgaccatttcatccctccaacccgaggatttcgctacatattactgtcagcagtccaatgaggaccctctcacctttggccagggcaccaaagttgaaattaagagactcgaggacctgaagaacgtgttcccacctgaggtggccgtgttcgagcctagcgaggccgagatcagccacacccagaaagccaccctcgtgtgcctggctaccggcttctaccccgaccatgtggaactgtcttggtgggtcaacggcaaagaggtgcacagcggcgtgtctaccgacccccagccactgaaagaacagcccgccctgaacgacagccggtactgcctgagcagcagactgagagtgtccgccaccttctggcagaacccccggaaccacttcagatgccaggtgcagttctacggcctgagcgagaacgacgagtggacccaggacagagccaagcccgtgacccagatcgtgtctgccgaagcctggggcagagccgattgcggatcccagagcttcggcctgctggaccccaagctgtgctacctgctggatggcatcctgttcatctacggcgtgatcctgaccgccctgttcctgagagtgaagttcagcagaagcgccgacgcccctgcctaccagcagggacagaaccaactgtacaacgagctgaacctgggcagacgggaagagtacgacgtgctggacaagcggagaggcagggaccctgagatgggcggaaagccccagcggagaaagaacccccaggaaggactgtataacgaactccagaaagacaagatggccgaagcctacagcgagatcggcatgaagggcgagcggagaagaggcaagggccacgatggcctgtaccagggcctgagcaccgccaccaaggacacctatgacgccctgcacatgcaggccctgcctccaagaagggccaagcgatctggatctggagcaacaaacttctcactactcaaacaagcaggtgacgtggaggagaatcccgggcctactagtatggactggatttggcgcatccttttccttgtcggcgctgctaccggcgcgcattccttcgaagaagtccaacttgtggagtctggagggggcctggtgcagcccggcggctctctcagactgtcttgtgcggcaagcggctacaccttcacctcttactggatagaatgggtgaggcaggcacctggaaagggactggagtggattggagagattctgccaggagggggagatacaaattacaatgaaatcttcaaggggcgggccaccttttcagcggataccagcaagaatacagcttacctgcagatgaatagcctccgggcagaagataccgctgtttattattgcacgagacgggtgccaataagactggactattgggggcaagggactcttgtcaccgtcagttcaacgcgtatccagaaccctgatcctgccgtgtaccagctgcgggatagcaagagcagcgacaagagcgtgtgtctgttcaccgacttcgacagccagaccaacgtgtcccagagcaaggactccgacgtgtacatcaccgataagaccgtgctggacatgcggagcatggacttcaagagcaactccgccgtggcctggtccaacaagtccgatttcgcctgcgccaacgccttcaacaacagcattatccccgaggacacattcttcccaagccccgagagcagctgcggtacccagagttttgggttgttggaccctaaattgtgctatctgttggacggaatcctgttcatttacggagtgatcctgaccgcattgttcctgcgggttaagttttccagatccgcagacgcacccgcttaccaacaagggcagaaccaactctacaatgaacttaatttggggcggagggaagagtacgacgttctggacaaaaggaggggacgagatcccgagatgggcggaaagcctcagcgaaggaagaatccgcaagaggggctttataacgaactccagaaagataaaatggcagaagcctatagtgagattgggatgaagggagaaaggaggaggggtaaaggtcacgatgggttgtaccaaggattgagcacagccactaaagatacctatgatgcgctccacatgcaggccctgccgccaaga

SEQ ID NO: 37957 - DNA, 2580 bp, synthetic construct
  source 1..2580: mol_type = other DNA
atggccttaccagtgaccgccttgctcctgccgctggccttgctgctccacgccgccaggccggacatccagttgacccagtcccccagctcactcagcgccagtgtgggggaccgggtgaccattacctgtaaagccagtcagagtgtggactatgagggggatagcttcctgaattggtatcagcagaagcctggcaaagccccaaagctgctgatctacgctgcatctaatctggagtcaggcgtgccttctaggttctccggtagtgggtctgggaccgatttcacattgaccatttcatccctccaacccgaggatttcgctacatattactgtcagcagtccaatgaggaccctctcacctttggccagggcaccaaagttgaaattaagagactcgaggaggacctgaagaacgtgttcccacctgaggtggccgtgttcgagcctagcgaggccgagatcagccacacccagaaagccaccctcgtgtgcctggctaccggcttctaccccgaccatgtggaactgtcttggtgggtcaacggcaaagaggtgcacagcggcgtgtctaccgacccccagccactgaaagaacagcccgccctgaacgacagccggtactgcctgagcagcagactgagagtgtccgccaccttctggcagaacccccggaaccacttcagatgccaggtgcagttctacggcctgagcgagaacgacgagtggacccaggacagagccaagcccgtgacccagatcgtgtctgccgaagcctggggcagagccgattgcggatcccagagcttcggcctgctggaccccaagctgtgctacctgctggatggcatcctgttcatctacggcgtgatcctgaccgccctgttcctgagagtgaagttcagcagaagcgccgacgcccctgcctaccagcagggacagaaccaactgtacaacgagctgaacctgggcagacgggaagagtacgacgtgctggacaagcggagaggcagggaccctgagatgggcggaaagccccagcggagaaagaacccccaggaaggactgtataacgaactccagaaagacaagatggccgaagcctacagcgagatcggcatgaagggcgagcggagaagaggcaagggccacgatggcctgtaccagggcctgagcaccgccaccaaggacacctatgacgccctgcacatgcaggccctgcctccaagaagggccaagcgatctggatctggagcaacaaacttctcactactcaaacaagcaggtgacgtggaggagaatcccgggcctactagtatggactggatttggcgcatccttttccttgtcggcgctgctaccggcgcgcattccttcgaagaagtccaacttgtggagtctggagggggcctggtgcagcccggcggctctctcagactgtcttgtgcggcaagcggctacaccttcacctcttactggatagaatgggtgaggcaggcacctggaaagggactggagtggattggagagattctgccaggagggggagatacaaattacaatgaaatcttcaaggggcgggccaccttttcagcggataccagcaagaatacagcttacctgcagatgaatagcctccgggcagaagataccgctgtttattattgcacgagacgggtgccaataagactggactattgggggcaagggactcttgtcaccgtcagttcaacgcgtatccagaaccctgatcctgccgtgtaccagctgcgggatagcaagagcagcgacaagagcgtgtgtctgttcaccgacttcgacagccagaccaacgtgtcccagagcaaggactccgacgtgtacatcaccgataagaccgtgctggacatgcggagcatggacttcaagagcaactccgccgtggcctggtccaacaagtccgatttcgcctgcgccaacgccttcaacaacagcattatccccgaggacacattcttcccaagccccgagagcagctgcggtacccagagttttgggttgttggaccctaaattgtgctatctgttggacggaatcctgttcatttacggagtgatcctgaccgcattgttcctgaggagcaagcggtcacggctgctccacagcgattacatgaatatgacaccacgaagaccgggtcctactcgcaaacactaccaaccctacgcacctccccgcgactttgcagcgtaccgatctcgggttaagttttccagatccgcagacgcacccgcttaccaacaagggcagaaccaactctacaatgaacttaatttggggcggagggaagagtacgacgttctggacaaaaggaggggacgagatcccgagatgggcggaaagcctcagcgaaggaagaatccgcaagaggggctttataacgaactccagaaagataaaatggcagaagcctatagtgagattgggatgaagggagaaaggaggaggggtaaaggtcacgatgggttgtaccaaggattgagcacagccactaaagatacctatgatgcgctccacatgcaggccctgccgccaaga

SEQ ID NO: 37958 - DNA, 2709 bp, synthetic construct
  source 1..2709: mol_type = other DNA
atggccttaccagtgaccgccttgctcctgccgctggccttgctgctccacgccgccaggccggacatccagttgacccagtcccccagctcactcagcgccagtgtgggggaccgggtgaccattacctgtaaagccagtcagagtgtggactatgagggggatagcttcctgaattggtatcagcagaagcctggcaaagccccaaagctgctgatctacgctgcatctaatctggagtcaggcgtgccttctaggttctccggtagtgggtctgggaccgatttcacattgaccatttcatccctccaacccgaggatttcgctacatattactgtcagcagtccaatgaggaccctctcacctttggccagggcaccaaagttgaaattaagagactcgaggaggacctgaagaacgtgttcccacctgaggtggccgtgttcgagcctagcgaggccgagatcagccacacccagaaagccaccctcgtgtgcctggctaccggcttctaccccgaccatgtggaactgtcttggtgggtcaacggcaaagaggtgcacagcggcgtgtctaccgacccccagccactgaaagaacagcccgccctgaacgacagccggtactgcctgagcagcagactgagagtgtccgccaccttctggcagaacccccggaaccacttcagatgccaggtgcagttctacggcctgagcgagaacgacgagtggacccaggacagagccaagcccgtgacccagatcgtgtctgccgaagcctggggcagagccgattgcggatcccagagcttcggcctgctggaccccaagctgtgctacctgctggatggcatcctgttcatctacggcgtgatcctgaccgccctgttcctgaaacggggcagaaagaaactcctgtatatattcaaacaaccatttatgagaccagtacaaactactcaagaggaagatggctgtagctgccgatttccagaagaagaagaaggaggatgtgaactgagagtgaagttcagcagaagcgccgacgcccctgcctaccagcagggacagaaccaactgtacaacgagctgaacctgggcagacgggaagagtacgacgtgctggacaagcggagaggcagggaccctgagatgggcggaaagccccagcggagaaagaacccccaggaaggactgtataacgaactccagaaagacaagatggccgaagcctacagcgagatcggcatgaagggcgagcggagaagaggcaagggccacgatggcctgtaccagggcctgagcaccgccaccaaggacacctatgacgccctgcacatgcaggccctgcctccaagaagggccaagcgatctggatctggagcaacaaacttctcactactcaaacaagcaggtgacgtggaggagaatcccgggcctactagtatggactggatttggcgcatccttttccttgtcggcgctgctaccggcgcgcattccttcgaagaagtccaacttgtggagtctggagggggcctggtgcagcccggcggctctctcagactgtcttgtgcggcaagcggctacaccttcacctcttactggatagaatgggtgaggcaggcacctggaaagggactggagtggattggagagattctgccaggagggggagatacaaattacaatgaaatcttcaaggggcgggccaccttttcagcggataccagcaagaatacagcttacctgcagatgaatagcctccgggcagaagataccgctgtttattattgcacgagacgggtgccaataagactggactattgggggcaagggactcttgtcaccgtcagttcaacgcgtatccagaaccctgatcctgccgtgtaccagctgcgggatagcaagagcagcgacaagagcgtgtgtctgttcaccgacttcgacagccagaccaacgtgtcccagagcaaggactccgacgtgtacatcaccgataagaccgtgctggacatgcggagcatggacttcaagagcaactccgccgtggcctggtccaacaagtccgatttcgcctgcgccaacgccttcaacaacagcattatccccgaggacacattcttcccaagccccgagagcagctgcggtacccagagttttgggttgttggaccctaaattgtgctatctgttggacggaatcctgttcatttacggagtgatcctgaccgcattgttcctgaagagaggccggaagaagctgctgtacatcttcaagcagcctttcatgcggcccgtgcagaccacccaggaagaggacggctgctcctgccggttccccgaggaagaagaaggcggctgcgagctgcgggttaagttttccagatccgcagacgcacccgcttaccaacaagggcagaaccaactctacaatgaacttaatttggggcggagggaagagtacgacgttctggacaaaaggaggggacgagatcccgagatgggcggaaagcctcagcgaaggaagaatccgcaagaggggctttataacgaactccagaaagataaaatggcagaagcctatagtgagattgggatgaagggagaaaggaggaggggtaaaggtcacgatgggttgtaccaaggattgagcacagccactaaagatacctatgatgcgctccacatgcaggccctgccgccaaga

SEQ ID NO: 37959 - DNA, 1770 bp, synthetic construct
  source 1..1770: mol_type = other DNA
atggccttaccagtgaccgccttgctcctgccgctggccttgctgctccacgccgccaggccggacatccagttgacccagtcccccagctcactcagcgccagtgtgggggaccgggtgaccattacctgtaaagccagtcagagtgtggactatgagggggatagcttcctgaattggtatcagcagaagcctggcaaagccccaaagctgctgatctacgctgcatctaatctggagtcaggcgtgccttctaggttctccggtagtgggtctgggaccgatttcacattgaccatttcatccctccaacccgaggatttcgctacatattactgtcagcagtccaatgaggaccctctcacctttggccagggcaccaaagttgaaattaagagactcgagcagagcttcggcctgctggaccccaagctgtgctacctgctggatggcatcctgttcatctacggcgtgatcctgaccgccctgttcctgagagtgaagttcagcagaagcgccgacgcccctgcctaccagcagggacagaaccaactgtacaacgagctgaacctgggcagacgggaagagtacgacgtgctggacaagcggagaggcagggaccctgagatgggcggaaagccccagcggagaaagaacccccaggaaggactgtataacgaactccagaaagacaagatggccgaagcctacagcgagatcggcatgaagggcgagcggagaagaggcaagggccacgatggcctgtaccagggcctgagcaccgccaccaaggacacctatgacgccctgcacatgcaggccctgcctccaagaagggccaagcgatctggatctggagcaacaaacttctcactactcaaacaagcaggtgacgtggaggagaatcccgggcctactagtatggactggatttggcgcatccttttccttgtcggcgctgctaccggcgcgcattccttcgaagaagtccaacttgtggagtctggagggggcctggtgcagcccggcggctctctcagactgtcttgtgcggcaagcggctacaccttcacctcttactggatagaatgggtgaggcaggcacctggaaagggactggagtggattggagagattctgccaggagggggagatacaaattacaatgaaatcttcaaggggcgggccaccttttcagcggataccagcaagaatacagcttacctgcagatgaatagcctccgggcagaagataccgctgtttattattgcacgagacgggtgccaataagactggactattgggggcaagggactcttgtcaccgtcagttcaacgcgtcagagttttgggttgttggaccctaaattgtgctatctgttggacggaatcctgttcatttacggagtgatcctgaccgcattgttcctgcgggttaagttttccagatccgcagacgcacccgcttaccaacaagggcagaaccaactctacaatgaacttaatttggggcggagggaagagtacgacgttctggacaaaaggaggggacgagatcccgagatgggcggaaagcctcagcgaaggaagaatccgcaagaggggctttataacgaactccagaaagataaaatggcagaagcctatagtgagattgggatgaagggagaaaggaggaggggtaaaggtcacgatgggttgtaccaaggattgagcacagccactaaagatacctatgatgcgctccacatgcaggccctgccgccaaga

SEQ ID NO: 37960 - DNA, 1944 bp, synthetic construct
  source 1..1944: mol_type = other DNA
atggccttaccagtgaccgccttgctcctgccgctggccttgctgctccacgccgccaggccggacatccagttgacccagtcccccagctcactcagcgccagtgtgggggaccgggtgaccattacctgtaaagccagtcagagtgtggactatgagggggatagcttcctgaattggtatcagcagaagcctggcaaagccccaaagctgctgatctacgctgcatctaatctggagtcaggcgtgccttctaggttctccggtagtgggtctgggaccgatttcacattgaccatttcatccctccaacccgaggatttcgctacatattactgtcagcagtccaatgaggaccctctcacctttggccagggcaccaaagttgaaattaagagactcgagggacagcctaaggccaatcctaccgtgacactgttccctccaagcagcgaagaactccaggccaacaaggccacacttgtgtgcctgatctccgacttctaccctggggctgtgacagtggcttggaaggccgatggatctcctgtgaaagccggcgtggaaaccaccaagccatccaagcagagcaacaacaaatacgccgccagctcctacctgagcctgacacctgagcagtggaagtcccacagatcctacagctgccaagtgacccacgaaggcagcaccgtggaaaagacagtggcccctacagagtgcagccccatcaagaccgatgtgattacaatggaccccaaggacaactgctccaaggacgccaacgataccctgctgctccagctgaccaacaccagcgcctactacatgtacttgttgctgctgctgaagtccgtggtgtacttcgccatcatcacatgctgcctgctgcggagaaccgccttctgctgcaacggcgagaagtctagggccaagcgatctggatctggagcaacaaacttctcactactcaaacaagcaggtgacgtggaggagaatcccgggcctactagtatggactggatttggcgcatccttttccttgtcggcgctgctaccggcgcgcattccttcgaagaagtccaacttgtggagtctggagggggcctggtgcagcccggcggctctctcagactgtcttgtgcggcaagcggctacaccttcacctcttactggatagaatgggtgaggcaggcacctggaaagggactggagtggattggagagattctgccaggagggggagatacaaattacaatgaaatcttcaaggggcgggccaccttttcagcggataccagcaagaatacagcttacctgcagatgaatagcctccgggcagaagataccgctgtttattattgcacgagacgggtgccaataagactggactattgggggcaagggactcttgtcaccgtcagttcaacgcgtgcctctacaaagggaccctccgtgtttcctctggctcccagcagcaagtctacaagcggaggaacagccgctctgggctgcctggtcaaggattactttcccgagcctgtgaccgtgtcctggaatagcggagcactgacaagcggcgtgcacacctttccagccgtgctgcaaagcagcggcctgtactctctgagcagcgtggtcacagtgcctagctctagcctgggcacccagacctacatctgcaatgtgaaccacaagcctagcaacaccaaggtggacaagagagtggaacccaagagctgtgaagtgaaaaccgactccaccgaccacgtgaagcccaaagagacagagaacaccaagcagcccagcaagagctgccacaagcccaaggccatcgtgcacaccgagaaagtgaacatgatgagcctgaccgtgctgggcctgcggatgctgttcgccaaaaccgtggccgtgaacttcctgctgaccgccaagctgttcttcctc

SEQ ID NO: 37961 - DNA, 1878 bp, synthetic construct
  source 1..1878: mol_type = other DNA
atggccttaccagtgaccgccttgctcctgccgctggccttgctgctccacgccgccaggccggacatccagttgacccagtcccccagctcactcagcgccagtgtgggggaccgggtgaccattacctgtaaagccagtcagagtgtggactatgagggggatagcttcctgaattggtatcagcagaagcctggcaaagccccaaagctgctgatctacgctgcatctaatctggagtcaggcgtgccttctaggttctccggtagtgggtctgggaccgatttcacattgaccatttcatccctccaacccgaggatttcgctacatattactgtcagcagtccaatgaggaccctctcacctttggccagggcaccaaagttgaaattaagagactcgagggacagcctaaggccaatcctaccgtgacactgttccctccaagcagcgaagaactccaggccaacaaggccacacttgtgtgcctgatctccgacttctaccctggggctgtgacagtggcttggaaggccgatggatctcctgtgaaagccggcgtggaaaccaccaagccatccaagcagagcaacaacaaatacgccgccagctcctacctgagcctgacacctgagcagtggaagtcccacagatcctacagctgccaagtgacccacgaaggcagcaccgtggaaaagacagtggcccctacagagtgcagcggcagagccgattgcggcatcaccagcgccagctaccaccagggcgtgctgagcgccaccatcctgtacgagatcctgctgggcaaggccaccctgtacgccgtgctggtgtctgccctggtgctgatggctatggtcaagcggaaggacagccggggaagggccaagcgatctggatctggagcaacaaacttctcactactcaaacaagcaggtgacgtggaggagaatcccgggcctactagtatggactggatttggcgcatccttttccttgtcggcgctgctaccggcgcgcattccttcgaagaagtccaacttgtggagtctggagggggcctggtgcagcccggcggctctctcagactgtcttgtgcggcaagcggctacaccttcacctcttactggatagaatgggtgaggcaggcacctggaaagggactggagtggattggagagattctgccaggagggggagatacaaattacaatgaaatcttcaaggggcgggccaccttttcagcggataccagcaagaatacagcttacctgcagatgaatagcctccgggcagaagataccgctgtttattattgcacgagacgggtgccaataagactggactattgggggcaagggactcttgtcaccgtcagttcaacgcgtgcctctacaaagggaccctccgtgtttcctctggctcccagcagcaagtctacaagcggaggaacagccgctctgggctgcctggtcaaggattactttcccgagcctgtgaccgtgtcctggaatagcggagcactgacaagcggcgtgcacacctttccagccgtgctgcaaagcagcggcctgtactctctgagcagcgtggtcacagtgcctagctctagcctgggcacccagacctacatctgcaatgtgaaccacaagcctagcaacaccaaggtggacaagagagtggaacccaagagctgtatccccgaggacacattcttcccaagcagcgacgtgccctgcgacgtgaagctggtggaaaagagcttcgagacagacaccaacctgaacttccagaacctgagcgtgatcggcttcagaatcctgctgctgaaagtggccggctttaacctgctgatgaccctgcggctgtggtccagc

SEQ ID NO: 37962 - DNA, 1878 bp, synthetic construct
  source 1..1878: mol_type = other DNA
atggccttaccagtgaccgccttgctcctgccgctggccttgctgctccacgccgccaggccggacatccagttgacccagtcccccagctcactcagcgccagtgtgggggaccgggtgaccattacctgtaaagccagtcagagtgtggactatgagggggatagcttcctgaattggtatcagcagaagcctggcaaagccccaaagctgctgatctacgctgcatctaatctggagtcaggcgtgccttctaggttctccggtagtgggtctgggaccgatttcacattgaccatttcatccctccaacccgaggatttcgctacatattactgtcagcagtccaatgaggaccctctcacctttggccagggcaccaaagttgaaattaagagactcgagggacagcctaaggccaatcctaccgtgacactgttccctccaagcagcgaagaactccaggccaacaaggccacacttgtgtgcctgatctccgacttctaccctggggctgtgacagtggcttggaaggccgatggatctcctgtgaaagccggcgtggaaaccaccaagccatccaagcagagcaacaacaaatacgccgccagctcctacctgagcctgacacctgagcagtggaagtcccacagatcctacagctgccaagtgacccacgaaggcagcaccgtggaaaagacagtggcccctacagagtgcagcggcagagccgattgcggctttaccagcgagagctaccagcagggcgtgctgagcgccaccatcctgtacgagatcctgctgggcaaggccaccctgtacgccgtgctggtgtctgccctggtgctgatggctatggtcaagcggaaggacagccggggaagggccaagcgatctggatctggagcaacaaacttctcactactcaaacaagcaggtgacgtggaggagaatcccgggcctactagtatggactggatttggcgcatccttttccttgtcggcgctgctaccggcgcgcattccttcgaagaagtccaacttgtggagtctggagggggcctggtgcagcccggcggctctctcagactgtcttgtgcggcaagcggctacaccttcacctcttactggatagaatgggtgaggcaggcacctggaaagggactggagtggattggagagattctgccaggagggggagatacaaattacaatgaaatcttcaaggggcgggccaccttttcagcggataccagcaagaatacagcttacctgcagatgaatagcctccgggcagaagataccgctgtttattattgcacgagacgggtgccaataagactggactattgggggcaagggactcttgtcaccgtcagttcaacgcgtgcctctacaaagggaccctccgtgtttcctctggctcccagcagcaagtctacaagcggaggaacagccgctctgggctgcctggtcaaggattactttcccgagcctgtgaccgtgtcctggaatagcggagcactgacaagcggcgtgcacacctttccagccgtgctgcaaagcagcggcctgtactctctgagcagcgtggtcacagtgcctagctctagcctgggcacccagacctacatctgcaatgtgaaccacaagcctagcaacaccaaggtggacaagagagtggaacccaagagctgtatccccgaggacacattcttcccaagccccgagagcagctgcgacgtgaagctggtggaaaagagcttcgagacagacaccaacctgaacttccagaacctgagcgtgatcggcttcagaatcctgctgctgaaagtggccggctttaacctgctgatgaccctgcggctgtggtccagc

SEQ ID NO: 37963 - DNA, 1356 bp, synthetic construct
  source 1..1356: mol_type = other DNA
atggccttaccagtgaccgccttgctcctgccgctggccttgctgctccacgccgccaggccggacatccagttgacccagtcccccagctcactcagcgccagtgtgggggaccgggtgaccattacctgtaaagccagtcagagtgtggactatgagggggatagcttcctgaattggtatcagcagaagcctggcaaagccccaaagctgctgatctacgctgcatctaatctggagtcaggcgtgccttctaggttctccggtagtgggtctgggaccgatttcacattgaccatttcatccctccaacccgaggatttcgctacatattactgtcagcagtccaatgaggaccctctcacctttggccagggcaccaaagttgaaattaagagaggcggaggcggaagtggaggcggaggatctggcggcggaggctctgaagtccaacttgtggagtctggagggggcctggtgcagcccggcggctctctcagactgtcttgtgcggcaagcggctacaccttcacctcttactggatagaatgggtgaggcaggcacctggaaagggactggagtggattggagagattctgccaggagggggagatacaaattacaatgaaatcttcaaggggcgggccaccttttcagcggataccagcaagaatacagcttacctgcagatgaatagcctccgggcagaagataccgctgtttattattgcacgagacgggtgccaataagactggactattgggggcaagggactcttgtcaccgtcagttcaacgcgtgacggtaacgaggagatgggaggaatcactcaaaccccttacaaagtctcaatttcaggaacaactgttatccttacatgtccccagtatcctggcagcgagatcctttggcagcataacgacaagaatatagggggagatgaagacgataagaatatcggatctgacgaggatcacttgagcctgaaagagttctccgagcttgaacaaagcggatattatgtgtgctatccgcgcgggtcaaagccggaagacgctaacttttacctttatctccgagccagagtgtgcgaaaattgcatggaaatggacgttatgtccgttgctacaatagttatcgtagatatatgcatcacgggtggactgcttctgctggtttattattggtccaagaatagaaaggccaaagctaaacccgtgaccagaggcgctggcgcaggcggaaggcaaaggggacaaaacaaagaacggccaccaccagtgccaaatccagattatgagcctattcggaaaggacagagggacctgtactctggcctgaatcagagaagaatc

SEQ ID NO: 37964 - DNA, 1251 bp, synthetic construct
  source 1..1251: mol_type = other DNA
atggccttaccagtgaccgccttgctcctgccgctggccttgctgctccacgccgccaggccggacatccagttgacccagtcccccagctcactcagcgccagtgtgggggaccgggtgaccattacctgtaaagccagtcagagtgtggactatgagggggatagcttcctgaattggtatcagcagaagcctggcaaagccccaaagctgctgatctacgctgcatctaatctggagtcaggcgtgccttctaggttctccggtagtgggtctgggaccgatttcacattgaccatttcatccctccaacccgaggatttcgctacatattactgtcagcagtccaatgaggaccctctcacctttggccagggcaccaaagttgaaattaagagaggcggaggcggaagtggaggcggaggatctggcggcggaggctctgaagtccaacttgtggagtctggagggggcctggtgcagcccggcggctctctcagactgtcttgtgcggcaagcggctacaccttcacctcttactggatagaatgggtgaggcaggcacctggaaagggactggagtggattggagagattctgccaggagggggagatacaaattacaatgaaatcttcaaggggcgggccaccttttcagcggataccagcaagaatacagcttacctgcagatgaatagcctccgggcagaagataccgctgtttattattgcacgagacgggtgccaataagactggactattgggggcaagggactcttgtcaccgtcagttcaacgcgtttcaagatccccatcgaggaactggaagatcgggtgttcgtgaactgcaacacctctatcacctgggtggaaggcaccgtgggaacactgctgagcgacatcaccagactggacctcggcaagcggattctggaccctcggggcatctacagatgcaacggcaccgacatctacaaggacaaagaaagcaccgtgcaggtccactacagaatgtgccagtcctgcgtggaactggaccctgctacagtggccggcatcatcgtgaccgatgtgatcgctactctgctgctggctctgggagtgttctgcttcgccggacacgaaacaggcagactgtctggcgctgccgatacacaggccctgctgagaaacgaccaagtgtatcagcccctgcgcgacagagatgatgcccagtattctcacctcggcggcaactgggctagaaacaag

SEQ ID NO: 37965 - DNA, 1281 bp, synthetic construct
  source 1..1281: mol_type = other DNA
atggccttaccagtgaccgccttgctcctgccgctggccttgctgctccacgccgccaggccggacatccagttgacccagtcccccagctcactcagcgccagtgtgggggaccgggtgaccattacctgtaaagccagtcagagtgtggactatgagggggatagcttcctgaattggtatcagcagaagcctggcaaagccccaaagctgctgatctacgctgcatctaatctggagtcaggcgtgccttctaggttctccggtagtgggtctgggaccgatttcacattgaccatttcatccctccaacccgaggatttcgctacatattactgtcagcagtccaatgaggaccctctcacctttggccagggcaccaaagttgaaattaagagaggcggaggcggaagtggaggcggaggatctggcggcggaggctctgaagtccaacttgtggagtctggagggggcctggtgcagcccggcggctctctcagactgtcttgtgcggcaagcggctacaccttcacctcttactggatagaatgggtgaggcaggcacctggaaagggactggagtggattggagagattctgccaggagggggagatacaaattacaatgaaatcttcaaggggcgggccaccttttcagcggataccagcaagaatacagcttacctgcagatgaatagcctccgggcagaagataccgctgtttattattgcacgagacgggtgccaataagactggactattgggggcaagggactcttgtcaccgtcagttcaacgcgtcagagcatcaagggcaaccacctggtcaaggtgtacgactaccaagaggacggcagcgtgctgctgacatgtgatgccgaggccaagaacatcacctggtttaaggacggcaagatgatcggcttcctgaccgaggacaagaagaagtggaacctgggcagcaacgctaaggaccccagaggcatgtatcagtgcaagggcagccagaacaagagcaagcccctccaggtgtactaccggatgtgccagaactgcatcgagctgaacgccgctaccatcagcggctttctgttcgccgagatcgtgtccatcttcgtgctggccgtgggcgtgtactttatcgctggacaggatggcgtgcggcagagcagagcttccgataagcaaaccctgctgcctaacgaccagctgtaccagcctctgaaggacagagaggacgaccagtacagccacctccagggcaatcagctgagaagaaac

SEQ ID NO: 37966 - DNA, 1230 bp, synthetic construct
  source 1..1230: mol_type = other DNA
atggccttaccagtgaccgccttgctcctgccgctggccttgctgctccacgccgccaggccggacatccagttgacccagtcccccagctcactcagcgccagtgtgggggaccgggtgaccattacctgtaaagccagtcagagtgtggactatgagggggatagcttcctgaattggtatcagcagaagcctggcaaagccccaaagctgctgatctacgctgcatctaatctggagtcaggcgtgccttctaggttctccggtagtgggtctgggaccgatttcacattgaccatttcatccctccaacccgaggatttcgctacatattactgtcagcagtccaatgaggaccctctcacctttggccagggcaccaaagttgaaattaagagaggcggaggcggaagtggaggcggaggatctggcggcggaggctctgaagtccaacttgtggagtctggagggggcctggtgcagcccggcggctctctcagactgtcttgtgcggcaagcggctacaccttcacctcttactggatagaatgggtgaggcaggcacctggaaagggactggagtggattggagagattctgccaggagggggagatacaaattacaatgaaatcttcaaggggcgggccaccttttcagcggataccagcaagaatacagcttacctgcagatgaatagcctccgggcagaagataccgctgtttattattgcacgagacgggtgccaataagactggactattgggggcaagggactcttgtcaccgtcagttcaacgcgtcagagttttgggttgttggaccctaaattgtgctatctgttggacggaatcctgttcatttacggagtgatcctgaccgcattgttcctgcgggttaagttttccagatccgcagacgcacccgcttaccaacaagggcagaaccaactctacaatgaacttaatttggggcggagggaagagtacgacgttctggacaaaaggaggggacgagatcccgagatgggcggaaagcctcagcgaaggaagaatccgcaagaggggctttataacgaactccagaaagataaaatggcagaagcctatagtgagattgggatgaagggagaaaggaggaggggtaaaggtcacgatgggttgtaccaaggattgagcacagccactaaagatacctatgatgcgctccacatgcaggccctgccgccaaga

SEQ ID NO: 37967 - DNA, 1515 bp, synthetic construct
  source 1..1515: mol_type = other DNA
atggccttaccagtgaccgccttgctcctgccgctggccttgctgctccacgccgccaggccggacatccagttgacccagtcccccagctcactcagcgccagtgtgggggaccgggtgaccattacctgtaaagccagtcagagtgtggactatgagggggatagcttcctgaattggtatcagcagaagcctggcaaagccccaaagctgctgatctacgctgcatctaatctggagtcaggcgtgccttctaggttctccggtagtgggtctgggaccgatttcacattgaccatttcatccctccaacccgaggatttcgctacatattactgtcagcagtccaatgaggaccctctcacctttggccagggcaccaaagttgaaattaagagaggcggaggcggaagtggaggcggaggatctggcggcggaggctctgaagtccaacttgtggagtctggagggggcctggtgcagcccggcggctctctcagactgtcttgtgcggcaagcggctacaccttcacctcttactggatagaatgggtgaggcaggcacctggaaagggactggagtggattggagagattctgccaggagggggagatacaaattacaatgaaatcttcaaggggcgggccaccttttcagcggataccagcaagaatacagcttacctgcagatgaatagcctccgggcagaagataccgctgtttattattgcacgagacgggtgccaataagactggactattgggggcaagggactcttgtcaccgtcagttcaacgcgtggaatgaggactgaggatcttcccaaagctgtcgtctttctcgaaccccaatggtatcgggtgctcgaaaaagactctgtgacactgaaatgccaaggggcctactctcccgaggacaactccacacagtggtttcataatgagtccctcatcagctctcaggccagctcttatttcattgatgccgctacagtggacgactccggcgagtatcggtgtcagaccaatctgtctacactgtctgaccccgtgcagcttgaggtccacattggatggttgctcttgcaagccccacgctgggttttcaaagaggaagatccaatccatctgcggtgccacagctggaaaaacaccgctctccacaaagtcacatacctgcaaaatggcaaaggacgcaaatacttccatcacaattccgatttttacattccgaaggctaccctgaaagacagcggcagctatttctgccggggactcgtcggctccaagaatgtgtcctccgaaaccgtgaatatcacgattacccaaggactggctgtgcctacaatctctagcttctttccgcctggataccaagtctccttctgtcttgtgatggtcctcctgtttgctgtggacacaggactgtacttttccgtgaaaacgaacatccgcagctccacacgcgattggaaagatcacaagtttaaatggcgcaaagatccccaggacaag

SEQ ID NO: 37968 - DNA, 1440 bp, synthetic construct
  source 1..1440: mol_type = other DNA
atggccttaccagtgaccgccttgctcctgccgctggccttgctgctccacgccgccaggccggacatccagttgacccagtcccccagctcactcagcgccagtgtgggggaccgggtgaccattacctgtaaagccagtcagagtgtggactatgagggggatagcttcctgaattggtatcagcagaagcctggcaaagccccaaagctgctgatctacgctgcatctaatctggagtcaggcgtgccttctaggttctccggtagtgggtctgggaccgatttcacattgaccatttcatccctccaacccgaggatttcgctacatattactgtcagcagtccaatgaggaccctctcacctttggccagggcaccaaagttgaaattaagagaggcggaggcggaagtggaggcggaggatctggcggcggaggctctgaagtccaacttgtggagtctggagggggcctggtgcagcccggcggctctctcagactgtcttgtgcggcaagcggctacaccttcacctcttactggatagaatgggtgaggcaggcacctggaaagggactggagtggattggagagattctgccaggagggggagatacaaattacaatgaaatcttcaaggggcgggccaccttttcagcggataccagcaagaatacagcttacctgcagatgaatagcctccgggcagaagataccgctgtttattattgcacgagacgggtgccaataagactggactattgggggcaagggactcttgtcaccgtcagttcaacgcgtggaatgaggactgaggatcttcccaaagctgtcgtctttctcgaaccccaatggtatcgggtgctcgaaaaagactctgtgacactgaaatgccaaggggcctactctcccgaggacaactccacacagtggtttcataatgagtccctcatcagctctcaggccagctcttatttcattgatgccgctacagtggacgactccggcgagtatcggtgtcagaccaatctgtctacactgtctgaccccgtgcagcttgaggtccacattggatggttgctcttgcaagccccacgctgggttttcaaagaggaagatccaatccatctgcggtgccacagctggaaaaacaccgctctccacaaagtcacatacctgcaaaatggcaaaggacgcaaatacttccatcacaattccgatttttacattccgaaggctaccctgaaagacagcggcagctatttctgccggggactcgtcggctccaagaatgtgtcctccgaaaccgtgaatatcacgattacccaaggactggctgtgcctacaatctctagcttctttccgcctggataccaagtctccttctgtcttgtgatggtcctcctgtttgctgtggacacaggactgtacttttccgtg

SEQ ID NO: 37969 - DNA, 1443 bp, synthetic construct
  source 1..1443: mol_type = other DNA
atggccttaccagtgaccgccttgctcctgccgctggccttgctgctccacgccgccaggccggacatccagttgacccagtcccccagctcactcagcgccagtgtgggggaccgggtgaccattacctgtaaagccagtcagagtgtggactatgagggggatagcttcctgaattggtatcagcagaagcctggcaaagccccaaagctgctgatctacgctgcatctaatctggagtcaggcgtgccttctaggttctccggtagtgggtctgggaccgatttcacattgaccatttcatccctccaacccgaggatttcgctacatattactgtcagcagtccaatgaggaccctctcacctttggccagggcaccaaagttgaaattaagagaggcggaggcggaagtggaggcggaggatctggcggcggaggctctgaagtccaacttgtggagtctggagggggcctggtgcagcccggcggctctctcagactgtcttgtgcggcaagcggctacaccttcacctcttactggatagaatgggtgaggcaggcacctggaaagggactggagtggattggagagattctgccaggagggggagatacaaattacaatgaaatcttcaaggggcgggccaccttttcagcggataccagcaagaatacagcttacctgcagatgaatagcctccgggcagaagataccgctgtttattattgcacgagacgggtgccaataagactggactattgggggcaagggactcttgtcaccgtcagttcaacgcgtggaatgaggactgaggatcttcccaaagctgtcgtctttctcgaaccccaatggtatcgggtgctcgaaaaagactctgtgacactgaaatgccaaggggcctactctcccgaggacaactccacacagtggtttcataatgagtccctcatcagctctcaggccagctcttatttcattgatgccgctacagtggacgactccggcgagtatcggtgtcagaccaatctgtctacactgtctgaccccgtgcagcttgaggtccacattggatggttgctcttgcaagccccacgctgggttttcaaagaggaagatccaatccatctgcggtgccacagctggaaaaacaccgctctccacaaagtcacatacctgcaaaatggcaaaggacgcaaatacttccatcacaattccgatttttacattccgaaggctaccctgaaagacagcggcagctatttctgccggggactcgtcggctccaagaatgtgtcctccgaaaccgtgaatatcacgattacccaaggactggctgtgcctacaatctctagcttctttccgcctggataccaagtctccttctgtcttgtgatggtcctcctgtttgctgtggacacaggactgtacttttccgtgaaa

SEQ ID NO: 37970 - DNA, 2175 bp, synthetic construct
  source 1..2175: mol_type = other DNA
atggccttaccagtgaccgccttgctcctgccgctggccttgctgctccacgccgccaggccggacatccagttgacccagtcccccagctcactcagcgccagtgtgggggaccgggtgaccattacctgtaaagccagtcagagtgtggactatgagggggatagcttcctgaattggtatcagcagaagcctggcaaagccccaaagctgctgatctacgctgcatctaatctggagtcaggcgtgccttctaggttctccggtagtgggtctgggaccgatttcacattgaccatttcatccctccaacccgaggatttcgctacatattactgtcagcagtccaatgaggaccctctcacctttggccagggcaccaaagttgaaattaagagactcgagggacagcctaaggccaatcctaccgtgacactgttccctccaagcagcgaagaactccaggccaacaaggccacacttgtgtgcctgatctccgacttctaccctggggctgtgacagtggcttggaaggccgatggatctcctgtgaaagccggcgtggaaaccaccaagccatccaagcagagcaacaacaaatacgccgccagctcctacctgagcctgacacctgagcagtggaagtcccacagatcctacagctgccaagtgacccacgaaggcagcaccgtggaaaagacagtggcccctacagagtgcagcggatcccagagcttcggcctgctggaccccaagctgtgctacctgctggatggcatcctgttcatctacggcgtgatcctgaccgccctgttcctgagagtgaagttcagcagaagcgccgacgcccctgcctaccagcagggacagaaccaactgtacaacgagctgaacctgggcagacgggaagagtacgacgtgctggacaagcggagaggcagggaccctgagatgggcggaaagccccagcggagaaagaacccccaggaaggactgtataacgaactccagaaagacaagatggccgaagcctacagcgagatcggcatgaagggcgagcggagaagaggcaagggccacgatggcctgtaccagggcctgagcaccgccaccaaggacacctatgacgccctgcacatgcaggccctgcctccaagaagggccaagcgatctggatctggagcaacaaacttctcactactcaaacaagcaggtgacgtggaggagaatcccgggcctactagtatggactggatttggcgcatccttttccttgtcggcgctgctaccggcgcgcattccttcgaagaagtccaacttgtggagtctggagggggcctggtgcagcccggcggctctctcagactgtcttgtgcggcaagcggctacaccttcacctcttactggatagaatgggtgaggcaggcacctggaaagggactggagtggattggagagattctgccaggagggggagatacaaattacaatgaaatcttcaaggggcgggccaccttttcagcggataccagcaagaatacagcttacctgcagatgaatagcctccgggcagaagataccgctgtttattattgcacgagacgggtgccaataagactggactattgggggcaagggactcttgtcaccgtcagttcaacgcgtgcctctacaaagggaccctccgtgtttcctctggctcccagcagcaagtctacaagcggaggaacagccgctctgggctgcctggtcaaggattactttcccgagcctgtgaccgtgtcctggaatagcggagcactgacaagcggcgtgcacacctttccagccgtgctgcaaagcagcggcctgtactctctgagcagcgtggtcacagtgcctagctctagcctgggcacccagacctacatctgcaatgtgaaccacaagcctagcaacaccaaggtggacaagagagtggaacccaagagctgtggtaccatcactcaaggtttggcagtgtcaaccatctcatcattctttccacctggctaccaagtgtccttctgcctggtcatggtgctgctgttcgccgtggataccggcctgtacttcagcgtcaagaccaacatccggtccagcaccagagactggaaggaccacaagttcaagtggcggaaggaccctcaggacaag

SEQ ID NO: 37971 - DNA, 2220 bp, synthetic construct
  source 1..2220: mol_type = other DNA
atggccttaccagtgaccgccttgctcctgccgctggccttgctgctccacgccgccaggccggacatccagttgacccagtcccccagctcactcagcgccagtgtgggggaccgggtgaccattacctgtaaagccagtcagagtgtggactatgagggggatagcttcctgaattggtatcagcagaagcctggcaaagccccaaagctgctgatctacgctgcatctaatctggagtcaggcgtgccttctaggttctccggtagtgggtctgggaccgatttcacattgaccatttcatccctccaacccgaggatttcgctacatattactgtcagcagtccaatgaggaccctctcacctttggccagggcaccaaagttgaaattaagagactcgaggacctgaagaacgtgttcccacctgaggtggccgtgttcgagcctagcgaggccgagatcagccacacccagaaagccaccctcgtgtgcctggctaccggcttctaccccgaccatgtggaactgtcttggtgggtcaacggcaaagaggtgcacagcggcgtgtctaccgacccccagccactgaaagaacagcccgccctgaacgacagccggtactgcctgagcagcagactgagagtgtccgccaccttctggcagaacccccggaaccacttcagatgccaggtgcagttctacggcctgagcgagaacgacgagtggacccaggacagagccaagcccgtgacccagatcgtgtctgccgaagcctggggcagagccgattgcggatcccagagcttcggcctgctggaccccaagctgtgctacctgctggatggcatcctgttcatctacggcgtgatcctgaccgccctgttcctgagagtgaagttcagcagaagcgccgacgcccctgcctaccagcagggacagaaccaactgtacaacgagctgaacctgggcagacgggaagagtacgacgtgctggacaagcggagaggcagggaccctgagatgggcggaaagccccagcggagaaagaacccccaggaaggactgtataacgaactccagaaagacaagatggccgaagcctacagcgagatcggcatgaagggcgagcggagaagaggcaagggccacgatggcctgtaccagggcctgagcaccgccaccaaggacacctatgacgccctgcacatgcaggccctgcctccaagaagggccaagcgatctggatctggagcaacaaacttctcactactcaaacaagcaggtgacgtggaggagaatcccgggcctactagtatggactggatttggcgcatccttttccttgtcggcgctgctaccggcgcgcattccttcgaagaagtccaacttgtggagtctggagggggcctggtgcagcccggcggctctctcagactgtcttgtgcggcaagcggctacaccttcacctcttactggatagaatgggtgaggcaggcacctggaaagggactggagtggattggagagattctgccaggagggggagatacaaattacaatgaaatcttcaaggggcgggccaccttttcagcggataccagcaagaatacagcttacctgcagatgaatagcctccgggcagaagataccgctgtttattattgcacgagacgggtgccaataagactggactattgggggcaagggactcttgtcaccgtcagttcaacgcgtatccagaaccctgatcctgccgtgtaccagctgcgggatagcaagagcagcgacaagagcgtgtgtctgttcaccgacttcgacagccagaccaacgtgtcccagagcaaggactccgacgtgtacatcaccgataagaccgtgctggacatgcggagcatggacttcaagagcaactccgccgtggcctggtccaacaagtccgatttcgcctgcgccaacgccttcaacaacagcattatccccgaggacacattcttcccaagccccgagagcagctgcggtaccatcactcaaggtttggcagtgtcaaccatctcatcattctttccacctggctaccaagtgtccttctgcctggtcatggtgctgctgttcgccgtggataccggcctgtacttcagcgtcaagaccaacatccggtccagcaccagagactggaaggaccacaagttcaagtggcggaaggaccctcaggacaag

SEQ ID NO: 37972 - DNA, 2145 bp, synthetic construct
  source 1..2145: mol_type = other DNA
atggccttaccagtgaccgccttgctcctgccgctggccttgctgctccacgccgccaggccggacatccagttgacccagtcccccagctcactcagcgccagtgtgggggaccgggtgaccattacctgtaaagccagtcagagtgtggactatgagggggatagcttcctgaattggtatcagcagaagcctggcaaagccccaaagctgctgatctacgctgcatctaatctggagtcaggcgtgccttctaggttctccggtagtgggtctgggaccgatttcacattgaccatttcatccctccaacccgaggatttcgctacatattactgtcagcagtccaatgaggaccctctcacctttggccagggcaccaaagttgaaattaagagactcgaggacctgaagaacgtgttcccacctgaggtggccgtgttcgagcctagcgaggccgagatcagccacacccagaaagccaccctcgtgtgcctggctaccggcttctaccccgaccatgtggaactgtcttggtgggtcaacggcaaagaggtgcacagcggcgtgtctaccgacccccagccactgaaagaacagcccgccctgaacgacagccggtactgcctgagcagcagactgagagtgtccgccaccttctggcagaacccccggaaccacttcagatgccaggtgcagttctacggcctgagcgagaacgacgagtggacccaggacagagccaagcccgtgacccagatcgtgtctgccgaagcctggggcagagccgattgcggatcccagagcttcggcctgctggaccccaagctgtgctacctgctggatggcatcctgttcatctacggcgtgatcctgaccgccctgttcctgagagtgaagttcagcagaagcgccgacgcccctgcctaccagcagggacagaaccaactgtacaacgagctgaacctgggcagacgggaagagtacgacgtgctggacaagcggagaggcagggaccctgagatgggcggaaagccccagcggagaaagaacccccaggaaggactgtataacgaactccagaaagacaagatggccgaagcctacagcgagatcggcatgaagggcgagcggagaagaggcaagggccacgatggcctgtaccagggcctgagcaccgccaccaaggacacctatgacgccctgcacatgcaggccctgcctccaagaagggccaagcgatctggatctggagcaacaaacttctcactactcaaacaagcaggtgacgtggaggagaatcccgggcctactagtatggactggatttggcgcatccttttccttgtcggcgctgctaccggcgcgcattccttcgaagaagtccaacttgtggagtctggagggggcctggtgcagcccggcggctctctcagactgtcttgtgcggcaagcggctacaccttcacctcttactggatagaatgggtgaggcaggcacctggaaagggactggagtggattggagagattctgccaggagggggagatacaaattacaatgaaatcttcaaggggcgggccaccttttcagcggataccagcaagaatacagcttacctgcagatgaatagcctccgggcagaagataccgctgtttattattgcacgagacgggtgccaataagactggactattgggggcaagggactcttgtcaccgtcagttcaacgcgtatccagaaccctgatcctgccgtgtaccagctgcgggatagcaagagcagcgacaagagcgtgtgtctgttcaccgacttcgacagccagaccaacgtgtcccagagcaaggactccgacgtgtacatcaccgataagaccgtgctggacatgcggagcatggacttcaagagcaactccgccgtggcctggtccaacaagtccgatttcgcctgcgccaacgccttcaacaacagcattatccccgaggacacattcttcccaagccccgagagcagctgcggtaccatcactcaaggtttggcagtgtcaaccatctcatcattctttccacctggctaccaagtgtccttctgcctggtcatggtgctgctgttcgccgtggataccggcctgtacttcagcgtc

SEQ ID NO: 37973 - DNA, 2148 bp, synthetic construct
  source 1..2148: mol_type = other DNA
atggccttaccagtgaccgccttgctcctgccgctggccttgctgctccacgccgccaggccggacatccagttgacccagtcccccagctcactcagcgccagtgtgggggaccgggtgaccattacctgtaaagccagtcagagtgtggactatgagggggatagcttcctgaattggtatcagcagaagcctggcaaagccccaaagctgctgatctacgctgcatctaatctggagtcaggcgtgccttctaggttctccggtagtgggtctgggaccgatttcacattgaccatttcatccctccaacccgaggatttcgctacatattactgtcagcagtccaatgaggaccctctcacctttggccagggcaccaaagttgaaattaagagactcgaggacctgaagaacgtgttcccacctgaggtggccgtgttcgagcctagcgaggccgagatcagccacacccagaaagccaccctcgtgtgcctggctaccggcttctaccccgaccatgtggaactgtcttggtgggtcaacggcaaagaggtgcacagcggcgtgtctaccgacccccagccactgaaagaacagcccgccctgaacgacagccggtactgcctgagcagcagactgagagtgtccgccaccttctggcagaacccccggaaccacttcagatgccaggtgcagttctacggcctgagcgagaacgacgagtggacccaggacagagccaagcccgtgacccagatcgtgtctgccgaagcctggggcagagccgattgcggatcccagagcttcggcctgctggaccccaagctgtgctacctgctggatggcatcctgttcatctacggcgtgatcctgaccgccctgttcctgagagtgaagttcagcagaagcgccgacgcccctgcctaccagcagggacagaaccaactgtacaacgagctgaacctgggcagacgggaagagtacgacgtgctggacaagcggagaggcagggaccctgagatgggcggaaagccccagcggagaaagaacccccaggaaggactgtataacgaactccagaaagacaagatggccgaagcctacagcgagatcggcatgaagggcgagcggagaagaggcaagggccacgatggcctgtaccagggcctgagcaccgccaccaaggacacctatgacgccctgcacatgcaggccctgcctccaagaagggccaagcgatctggatctggagcaacaaacttctcactactcaaacaagcaggtgacgtggaggagaatcccgggcctactagtatggactggatttggcgcatccttttccttgtcggcgctgctaccggcgcgcattccttcgaagaagtccaacttgtggagtctggagggggcctggtgcagcccggcggctctctcagactgtcttgtgcggcaagcggctacaccttcacctcttactggatagaatgggtgaggcaggcacctggaaagggactggagtggattggagagattctgccaggagggggagatacaaattacaatgaaatcttcaaggggcgggccaccttttcagcggataccagcaagaatacagcttacctgcagatgaatagcctccgggcagaagataccgctgtttattattgcacgagacgggtgccaataagactggactattgggggcaagggactcttgtcaccgtcagttcaacgcgtatccagaaccctgatcctgccgtgtaccagctgcgggatagcaagagcagcgacaagagcgtgtgtctgttcaccgacttcgacagccagaccaacgtgtcccagagcaaggactccgacgtgtacatcaccgataagaccgtgctggacatgcggagcatggacttcaagagcaactccgccgtggcctggtccaacaagtccgatttcgcctgcgccaacgccttcaacaacagcattatccccgaggacacattcttcccaagccccgagagcagctgcggtaccatcactcaaggtttggcagtgtcaaccatctcatcattctttccacctggctaccaagtgtccttctgcctggtcatggtgctgctgttcgccgtggataccggcctgtacttcagcgtcaag

SEQ ID NO: 37974 - DNA, 2151 bp, synthetic construct
  source 1..2151: mol_type = other DNA
atggccttaccagtgaccgccttgctcctgccgctggccttgctgctccacgccgccaggccggacatccagttgacccagtcccccagctcactcagcgccagtgtgggggaccgggtgaccattacctgtaaagccagtcagagtgtggactatgagggggatagcttcctgaattggtatcagcagaagcctggcaaagccccaaagctgctgatctacgctgcatctaatctggagtcaggcgtgccttctaggttctccggtagtgggtctgggaccgatttcacattgaccatttcatccctccaacccgaggatttcgctacatattactgtcagcagtccaatgaggaccctctcacctttggccagggcaccaaagttgaaattaagagactcgaggacctgaagaacgtgttcccacctgaggtggccgtgttcgagcctagcgaggccgagatcagccacacccagaaagccaccctcgtgtgcctggctaccggcttctaccccgaccatgtggaactgtcttggtgggtcaacggcaaagaggtgcacagcggcgtgtctaccgacccccagccactgaaagaacagcccgccctgaacgacagccggtactgcctgagcagcagactgagagtgtccgccaccttctggcagaacccccggaaccacttcagatgccaggtgcagttctacggcctgagcgagaacgacgagtggacccaggacagagccaagcccgtgacccagatcgtgtctgccgaagcctggggcagagccgattgcggatcccagagcttcggcctgctggaccccaagctgtgctacctgctggatggcatcctgttcatctacggcgtgatcctgaccgccctgttcctgagagtgaagttcagcagaagcgccgacgcccctgcctaccagcagggacagaaccaactgtacaacgagctgaacctgggcagacgggaagagtacgacgtgctggacaagcggagaggcagggaccctgagatgggcggaaagccccagcggagaaagaacccccaggaaggactgtataacgaactccagaaagacaagatggccgaagcctacagcgagatcggcatgaagggcgagcggagaagaggcaagggccacgatggcctgtaccagggcctgagcaccgccaccaaggacacctatgacgccctgcacatgcaggccctgcctccaagaagggccaagcgatctggatctggagcaacaaacttctcactactcaaacaagcaggtgacgtggaggagaatcccgggcctactagtatggactggatttggcgcatccttttccttgtcggcgctgctaccggcgcgcattccttcgaagaagtccaacttgtggagtctggagggggcctggtgcagcccggcggctctctcagactgtcttgtgcggcaagcggctacaccttcacctcttactggatagaatgggtgaggcaggcacctggaaagggactggagtggattggagagattctgccaggagggggagatacaaattacaatgaaatcttcaaggggcgggccaccttttcagcggataccagcaagaatacagcttacctgcagatgaatagcctccgggcagaagataccgctgtttattattgcacgagacgggtgccaataagactggactattgggggcaagggactcttgtcaccgtcagttcaacgcgtatccagaaccctgatcctgccgtgtaccagctgcgggatagcaagagcagcgacaagagcgtgtgtctgttcaccgacttcgacagccagaccaacgtgtcccagagcaaggactccgacgtgtacatcaccgataagaccgtgctggacatgcggagcatggacttcaagagcaactccgccgtggcctggtccaacaagtccgatttcgcctgcgccaacgccttcaacaacagcattatccccgaggacacattcttcccaagccccgagagcagctgcggtaccatcactcaaggtttggcagtgtcaaccatctcatcattctttccacctggctaccaagtgtccttctgcctggtcatggtgctgctgttcgccgtggataccggcctgtacttcagcgtcaagacc

SEQ ID NO: 37975 - DNA, 1962 bp, synthetic construct
  source 1..1962: mol_type = other DNA
atggccttaccagtgaccgccttgctcctgccgctggccttgctgctccacgccgccaggccggacatccagttgacccagtcccccagctcactcagcgccagtgtgggggaccgggtgaccattacctgtaaagccagtcagagtgtggactatgagggggatagcttcctgaattggtatcagcagaagcctggcaaagccccaaagctgctgatctacgctgcatctaatctggagtcaggcgtgccttctaggttctccggtagtgggtctgggaccgatttcacattgaccatttcatccctccaacccgaggatttcgctacatattactgtcagcagtccaatgaggaccctctcacctttggccagggcaccaaagttgaaattaagagactcgagggacagcctaaggccaatcctaccgtgacactgttccctccaagcagcgaagaactccaggccaacaaggccacacttgtgtgcctgatctccgacttctaccctggggctgtgacagtggcttggaaggccgatggatctcctgtgaaagccggcgtggaaaccaccaagccatccaagcagagcaacaacaaatacgccgccagctcctacctgagcctgacacctgagcagtggaagtcccacagatcctacagctgccaagtgacccacgaaggcagcaccgtggaaaagacagtggcccctacagagtgcagcggatccctgggagagcctcagctgtgctatatcctggacgccatcctgtttctgtacggcatcgtgctgaccctgctgtactgccggctgaagatccaagtgcggaaggccgccatcaccagctacgagaaatccgacggcgtgtacaccggcctgagcaccagaaatcaagagacatacgagacactgaagcacgaaaagcctccacaaagggccaagcgatctggatctggagcaacaaacttctcactactcaaacaagcaggtgacgtggaggagaatcccgggcctactagtatggactggatttggcgcatccttttccttgtcggcgctgctaccggcgcgcattccttcgaagaagtccaacttgtggagtctggagggggcctggtgcagcccggcggctctctcagactgtcttgtgcggcaagcggctacaccttcacctcttactggatagaatgggtgaggcaggcacctggaaagggactggagtggattggagagattctgccaggagggggagatacaaattacaatgaaatcttcaaggggcgggccaccttttcagcggataccagcaagaatacagcttacctgcagatgaatagcctccgggcagaagataccgctgtttattattgcacgagacgggtgccaataagactggactattgggggcaagggactcttgtcaccgtcagttcaacgcgtgcctctacaaagggaccctccgtgtttcctctggctcccagcagcaagtctacaagcggaggaacagccgctctgggctgcctggtcaaggattactttcccgagcctgtgaccgtgtcctggaatagcggagcactgacaagcggcgtgcacacctttccagccgtgctgcaaagcagcggcctgtactctctgagcagcgtggtcacagtgcctagctctagcctgggcacccagacctacatctgcaatgtgaaccacaagcctagcaacaccaaggtggacaagagagtggaacccaagagctgtggtaccctcggagaaccacagctctgttacattctggatgctatcctgttcctctatgggatcgtcctgacactcctgtattgcagactcaaaattcaagttcgcaaagccgccattacctcttacgagaagagtgatggggtgtacacaggactgtctacccggaatcaagaaacctacgaaaccctcaaacatgagaagccacctcagtaa

SEQ ID NO: 37976 - DNA, 1869 bp, synthetic construct
  source 1..1869: mol_type = other DNA
atggccttaccagtgaccgccttgctcctgccgctggccttgctgctccacgccgccaggccggacatccagttgacccagtcccccagctcactcagcgccagtgtgggggaccgggtgaccattacctgtaaagccagtcagagtgtggactatgagggggatagcttcctgaattggtatcagcagaagcctggcaaagccccaaagctgctgatctacgctgcatctaatctggagtcaggcgtgccttctaggttctccggtagtgggtctgggaccgatttcacattgaccatttcatccctccaacccgaggatttcgctacatattactgtcagcagtccaatgaggaccctctcacctttggccagggcaccaaagttgaaattaagagactcgaggacctgaagaacgtgttcccacctgaggtggccgtgttcgagcctagcgaggccgagatcagccacacccagaaagccaccctcgtgtgcctggctaccggcttctaccccgaccatgtggaactgtcttggtgggtcaacggcaaagaggtgcacagcggcgtgtgtaccgacccccagccactgaaagaacagcccgccctgaacgacagccggtactgcctgagcagcagactgagagtgtccgccaccttctggcagaacccccggaaccacttcagatgccaggtgcagttctacggcctgagcgagaacgacgagtggacccaggacagagccaagcccgtgacccagatcgtgtctgccgaagcctggggcagagccgattgcggctttaccagcgagagctaccagcagggcgtgctgagcgcctactacatgtacttgttgctgctgctgaagtccgtggtgtacttcgccatcatcacatgctgcctgctgcggagaaccgccttctgctgcaacggcgagaagtctagggccaagcgatctggatctggagcaacaaacttctcactactcaaacaagcaggtgacgtggaggagaatcccgggcctactagtatggactggatttggcgcatccttttccttgtcggcgctgctaccggcgcgcattccttcgaagaagtccaacttgtggagtctggagggggcctggtgcagcccggcggctctctcagactgtcttgtgcggcaagcggctacaccttcacctcttactggatagaatgggtgaggcaggcacctggaaagggactggagtggattggagagattctgccaggagggggagatacaaattacaatgaaatcttcaaggggcgggccaccttttcagcggataccagcaagaatacagcttacctgcagatgaatagcctccgggcagaagataccgctgtttattattgcacgagacgggtgccaataagactggactattgggggcaagggactcttgtcaccgtcagttcaacgcgtatccagaaccctgatcctgccgtgtaccagctgcgggatagcaagagcagcgacaagagcgtgtgtctgttcaccgacttcgacagccagaccaacgtgtcccagagcaaggactccgacgtgtacatcaccgataagtgcgtgctggacatgcggagcatggacttcaagagcaactccgccgtggcctggtccaacaagtccgatttcgcctgcgccaacgccttcaacaacagcattatccccgaggacacattcttcccaagccccgagagcagctgcgacgtgaagctggtggaaaagagcttcgagacagacaccaacctgaacttccagaacctgagcgtgatcggcttcagaatcctgctgctgaaagtggccggctttaacctgctgatgaccctgcggctgtggtccagc

SEQ ID NO: 37977 - DNA, 1890 bp, synthetic construct
  source 1..1890: mol_type = other DNA
atggccttaccagtgaccgccttgctcctgccgctggccttgctgctccacgccgccaggccggacatccagttgacccagtcccccagctcactcagcgccagtgtgggggaccgggtgaccattacctgtaaagccagtcagagtgtggactatgagggggatagcttcctgaattggtatcagcagaagcctggcaaagccccaaagctgctgatctacgctgcatctaatctggagtcaggcgtgccttctaggttctccggtagtgggtctgggaccgatttcacattgaccatttcatccctccaacccgaggatttcgctacatattactgtcagcagtccaatgaggaccctctcacctttggccagggcaccaaagttgaaattaagagactcgaggacaagcagctggacgccgacgtgtcccccaagcctaccatcttcctgccctctatcgccgagacaaagctccagaaggccggcacctacctgtgcctgctggaaaagttcttcccagatgtgattaagatccactggcaggaaaagaagtccaacaccatcctgggcagccaggaaggcaacaccatgaagaccaacgacacctacatgaagttcagctggctgaccgtgcccgagaagtccctggacaaagaacacagatgcatcgtgcggcacgaaaacaacaagaacggcgtggaccaggaaatcatcttcccacccatcaagaccgatgtgattacaatggaccccaaggacaactgctccaaggacgccaacgataccctgctgctccagctgaccaacaccagcgcctactacatgtacgagatcctgctgggcaaggccaccctgtacgccgtgctggtgtctgccctggtgctgatggctatggtcaagcggaaggacagccggggaagggccaagcgatctggatctggagcaacaaacttctcactactcaaacaagcaggtgacgtggaggagaatcccgggcctactagtatggactggatttggcgcatccttttccttgtcggcgctgctaccggcgcgcattccttcgaagaagtccaacttgtggagtctggagggggcctggtgcagcccggcggctctctcagactgtcttgtgcggcaagcggctacaccttcacctcttactggatagaatgggtgaggcaggcacctggaaagggactggagtggattggagagattctgccaggagggggagatacaaattacaatgaaatcttcaaggggcgggccaccttttcagcggataccagcaagaatacagcttacctgcagatgaatagcctccgggcagaagataccgctgtttattattgcacgagacgggtgccaataagactggactattgggggcaagggactcttgtcaccgtcagttcaacgcgtagccagcctcacaccaagcccagcgtgttcgtgatgaagaacggcaccaacgtggcctgcctcgtgaaagagttctaccccaaggacatcaggatcaacctggtgtccagcaagaagatcaccgagttcgaccccgccatcgtgatctcccccagcggcaagtacaacgccgtgaagctggggaagtatgaggacagcaacagcgtgacctgctccgtgcagcacgacaacaagaccgtgcacagcaccgactttgaagtgaaaaccgactccaccgaccacgtgaagcccaaagagacagagaacaccaagcagcccagcaagagctgccacaagcccaaggccatcgtgcacaccgagaaagtgaacatgatgagcctgaccgtgatcggcttcagaatcctgctgctgaaagtggccggctttaacctgctgatgaccctgcggctgtggtccagctaa

SEQ ID NO: 37978 - DNA, 1890 bp, synthetic construct
  source 1..1890: mol_type = other DNA
atggccttaccagtgaccgccttgctcctgccgctggccttgctgctccacgccgccaggccggacatccagttgacccagtcccccagctcactcagcgccagtgtgggggaccgggtgaccattacctgtaaagccagtcagagtgtggactatgagggggatagcttcctgaattggtatcagcagaagcctggcaaagccccaaagctgctgatctacgctgcatctaatctggagtcaggcgtgccttctaggttctccggtagtgggtctgggaccgatttcacattgaccatttcatccctccaacccgaggatttcgctacatattactgtcagcagtccaatgaggaccctctcacctttggccagggcaccaaagttgaaattaagagactcgaggacaagcagctggacgccgacgtgtcccccaagcctaccatcttcctgccctctatcgccgagacaaagctccagaaggccggcacctacctgtgcctgctggaaaagttcttcccagatgtgattaagatccactggcaggaaaagaagtccaacaccatcctgggcagccaggaaggcaacaccatgaagaccaacgacacctacatgaagttcagctggctgaccgtgcccgagaagtccctggacaaagaacacagatgcatcgtgcggcacgaaaacaacaagaacggcgtggaccaggaaatcatcttcccacccatcaagaccgatgtgattacaatggaccccaaggacaactgctccaaggacgccaacgataccctgctgctccagctgaccaacaccagcgccaccatcctgtacgagatcctgctgggcaaggccaccctgtacgccgtgctggtgtctgccctggtgctgatggctatggtcaagcggaaggacagccggggaagggccaagcgatctggatctggagcaacaaacttctcactactcaaacaagcaggtgacgtggaggagaatcccgggcctactagtatggactggatttggcgcatccttttccttgtcggcgctgctaccggcgcgcattccttcgaagaagtccaacttgtggagtctggagggggcctggtgcagcccggcggctctctcagactgtcttgtgcggcaagcggctacaccttcacctcttactggatagaatgggtgaggcaggcacctggaaagggactggagtggattggagagattctgccaggagggggagatacaaattacaatgaaatcttcaaggggcgggccaccttttcagcggataccagcaagaatacagcttacctgcagatgaatagcctccgggcagaagataccgctgtttattattgcacgagacgggtgccaataagactggactattgggggcaagggactcttgtcaccgtcagttcaacgcgtagccagcctcacaccaagcccagcgtgttcgtgatgaagaacggcaccaacgtggcctgcctcgtgaaagagttctaccccaaggacatcaggatcaacctggtgtccagcaagaagatcaccgagttcgaccccgccatcgtgatctcccccagcggcaagtacaacgccgtgaagctggggaagtatgaggacagcaacagcgtgacctgctccgtgcagcacgacaacaagaccgtgcacagcaccgactttgaagtgaaaaccgactccaccgaccacgtgaagcccaaagagacagagaacaccaagcagcccagcaagagctgccacaagcccaaggccatcgtgcacaccgagaaagtgaacatgatgagcctgaccgtgatcggcttcagaatcctgctgctgaaagtggccggctttaacctgctgatgaccctgcggctgtggtccagctaa

SEQ ID NO: 37979 - DNA, 1890 bp, synthetic construct
  source 1..1890: mol_type = other DNA
atggccttaccagtgaccgccttgctcctgccgctggccttgctgctccacgccgccaggccggacatccagttgacccagtcccccagctcactcagcgccagtgtgggggaccgggtgaccattacctgtaaagccagtcagagtgtggactatgagggggatagcttcctgaattggtatcagcagaagcctggcaaagccccaaagctgctgatctacgctgcatctaatctggagtcaggcgtgccttctaggttctccggtagtgggtctgggaccgatttcacattgaccatttcatccctccaacccgaggatttcgctacatattactgtcagcagtccaatgaggaccctctcacctttggccagggcaccaaagttgaaattaagagactcgaggacaagcagctggacgccgacgtgtcccccaagcctaccatcttcctgccctctatcgccgagacaaagctccagaaggccggcacctacctgtgcctgctggaaaagttcttcccagatgtgattaagatccactggcaggaaaagaagtccaacaccatcctgggcagccaggaaggcaacaccatgaagaccaacgacacctacatgaagttcagctggctgaccgtgcccgagaagtccctggacaaagaacacagatgcatcgtgcggcacgaaaacaacaagaacggcgtggaccaggaaatcatcttcccacccatcaagaccgatgtgattacaatggaccccaaggacaactgctccaaggacgccaacgataccctgctgctccagctgaccaacaccagcgcctactacatgtacgagatcctgctgggcaaggccaccctgtacgccgtgctggtgtctgccctggtgctgatggctatggtcaagcggaaggacagccggggaagggccaagcgatctggatctggagcaacaaacttctcactactcaaacaagcaggtgacgtggaggagaatcccgggcctactagtatggactggatttggcgcatccttttccttgtcggcgctgctaccggcgcgcattccttcgaagaagtccaacttgtggagtctggagggggcctggtgcagcccggcggctctctcagactgtcttgtgcggcaagcggctacaccttcacctcttactggatagaatgggtgaggcaggcacctggaaagggactggagtggattggagagattctgccaggagggggagatacaaattacaatgaaatcttcaaggggcgggccaccttttcagcggataccagcaagaatacagcttacctgcagatgaatagcctccgggcagaagataccgctgtttattattgcacgagacgggtgccaataagactggactattgggggcaagggactcttgtcaccgtcagttcaacgcgtagccagcctcacaccaagcccagcgtgttcgtgatgaagaacggcaccaacgtggcctgcctcgtgaaagagttctaccccaaggacatcaggatcaacctggtgtccagcaagaagatcaccgagttcgaccccgccatcgtgatctcccccagcggcaagtacaacgccgtgaagctggggaagtacgaggacagcaacagcgtgacctgctccgtgcagcacgacaacaagaccgtgcacagcaccgactttgaagtgaaaaccgactccaccgaccacgtgaagcccaaagagacagagaacaccaagcagcccagcaagagctgccacaagcccaaggccatcgtgcacaccgagaaagtgaacatgatgagcctgaccgtgctgggcttcagaatcctgctgctgaaagtggccggctttaacctgctgatgaccctgcggctgtggtccagctaa

SEQ ID NO: 37980 - DNA, 1890 bp, synthetic construct
  source 1..1890: mol_type = other DNA
atggccttaccagtgaccgccttgctcctgccgctggccttgctgctccacgccgccaggccggacatccagttgacccagtcccccagctcactcagcgccagtgtgggggaccgggtgaccattacctgtaaagccagtcagagtgtggactatgagggggatagcttcctgaattggtatcagcagaagcctggcaaagccccaaagctgctgatctacgctgcatctaatctggagtcaggcgtgccttctaggttctccggtagtgggtctgggaccgatttcacattgaccatttcatccctccaacccgaggatttcgctacatattactgtcagcagtccaatgaggaccctctcacctttggccagggcaccaaagttgaaattaagagactcgaggacaagcagctggacgccgacgtgtcccccaagcctaccatcttcctgccctctatcgccgagacaaagctccagaaggccggcacctacctgtgcctgctggaaaagttcttcccagatgtgattaagatccactggcaggaaaagaagtccaacaccatcctgggcagccaggaaggcaacaccatgaagaccaacgacacctacatgaagttcagctggctgaccgtgcccgagaagtccctggacaaagaacacagatgcatcgtgcggcacgaaaacaacaagaacggcgtggaccaggaaatcatcttcccacccatcaagaccgatgtgattacaatggaccccaaggacaactgctccaaggacgccaacgataccctgctgctccagctgaccaacaccagcgccaccatcctgtacgagatcctgctgggcaaggccaccctgtacgccgtgctggtgtctgccctggtgctgatggctatggtcaagcggaaggacagccggggaagggccaagcgatctggatctggagcaacaaacttctcactactcaaacaagcaggtgacgtggaggagaatcccgggcctactagtatggactggatttggcgcatccttttccttgtcggcgctgctaccggcgcgcattccttcgaagaagtccaacttgtggagtctggagggggcctggtgcagcccggcggctctctcagactgtcttgtgcggcaagcggctacaccttcacctcttactggatagaatgggtgaggcaggcacctggaaagggactggagtggattggagagattctgccaggagggggagatacaaattacaatgaaatcttcaaggggcgggccaccttttcagcggataccagcaagaatacagcttacctgcagatgaatagcctccgggcagaagataccgctgtttattattgcacgagacgggtgccaataagactggactattgggggcaagggactcttgtcaccgtcagttcaacgcgtagccagcctcacaccaagcccagcgtgttcgtgatgaagaacggcaccaacgtggcctgcctcgtgaaagagttctaccccaaggacatcaggatcaacctggtgtccagcaagaagatcaccgagttcgaccccgccatcgtgatctcccccagcggcaagtacaacgccgtgaagctggggaagtacgaggacagcaacagcgtgacctgctccgtgcagcacgacaacaagaccgtgcacagcaccgactttgaagtgaaaaccgactccaccgaccacgtgaagcccaaagagacagagaacaccaagcagcccagcaagagctgccacaagcccaaggccatcgtgcacaccgagaaagtgaacatgatgagcctgaccgtgctgggcttcagaatcctgctgctgaaagtggccggctttaacctgctgatgaccctgcggctgtggtccagctaa

SEQ ID NO: 37981 - DNA, 1872 bp, synthetic construct
  source 1..1872: mol_type = other DNA
atggccttaccagtgaccgccttgctcctgccgctggccttgctgctccacgccgccaggccggacatccagttgacccagtcccccagctcactcagcgccagtgtgggggaccgggtgaccattacctgtaaagccagtcagagtgtggactatgagggggatagcttcctgaattggtatcagcagaagcctggcaaagccccaaagctgctgatctacgctgcatctaatctggagtcaggcgtgccttctaggttctccggtagtgggtctgggaccgatttcacattgaccatttcatccctccaacccgaggatttcgctacatattactgtcagcagtccaatgaggaccctctcacctttggccagggcaccaaagttgaaattaagagactcgaggacctgaagaacgtgttcccacctgaggtggccgtgttcgagcctagcgaggccgagatcagccacacccagaaagccaccctcgtgtgcctggctaccggcttctaccccgaccatgtggaactgtcttggtgggtcaacggcaaagaggtgcacagcggcgtgtgtaccgacccccagccactgaaagaacagcccgccctgaacgacagccggtactgcctgagcagcagactgagagtgtccgccaccttctggcagaacccccggaaccacttcagatgccaggtgcagttctacggcctgagcgagaacgacgagtggacccaggacagagccaagcccgtgacccagatcgtgtctgccgaagcctggggcagagccgattgcggctttaccagcgagagctaccagcagggcgtgctgagcgccaccatcctgtacttgttgctgctgctgaagtccgtggtgtacttcgccatcatcacatgctgcctgctgcggagaaccgccttctgctgcaacggcgagaagtctagggccaagcgatctggatctggagcaacaaacttctcactactcaaacaagcaggtgacgtggaggagaatcccgggcctactagtatggactggatttggcgcatccttttccttgtcggcgctgctaccggcgcgcattccttcgaagaagtccaacttgtggagtctggagggggcctggtgcagcccggcggctctctcagactgtcttgtgcggcaagcggctacaccttcacctcttactggatagaatgggtgaggcaggcacctggaaagggactggagtggattggagagattctgccaggagggggagatacaaattacaatgaaatcttcaaggggcgggccaccttttcagcggataccagcaagaatacagcttacctgcagatgaatagcctccgggcagaagataccgctgtttattattgcacgagacgggtgccaataagactggactattgggggcaagggactcttgtcaccgtcagttcaacgcgtatccagaaccctgatcctgccgtgtaccagctgcgggatagcaagagcagcgacaagagcgtgtgtctgttcaccgacttcgacagccagaccaacgtgtcccagagcaaggactccgacgtgtacatcaccgataagtgcgtgctggacatgcggagcatggacttcaagagcaactccgccgtggcctggtccaacaagtccgatttcgcctgcgccaacgccttcaacaacagcattatccccgaggacacattcttcccaagccccgagagcagctgcgacgtgaagctggtggaaaagagcttcgagacagacaccaacctgaacttccagaacctgagcgtgatcggcctgcggatgctgttcgccaaaaccgtggccgtgaacttcctgctgaccgccaagctgttcttcctctaa

SEQ ID NO: 37982 - DNA, 1959 bp, synthetic construct
  source 1..1959: mol_type = other DNA
atggccttaccagtgaccgccttgctcctgccgctggccttgctgctccacgccgccaggccggacatccagttgacccagtcccccagctcactcagcgccagtgtgggggaccgggtgaccattacctgtaaagccagtcagagtgtggactatgagggggatagcttcctgaattggtatcagcagaagcctggcaaagccccaaagctgctgatctacgctgcatctaatctggagtcaggcgtgccttctaggttctccggtagtgggtctgggaccgatttcacattgaccatttcatccctccaacccgaggatttcgctacatattactgtcagcagtccaatgaggaccctctcacctttggccagggcaccaaagttgaaattaagagactcgaggacctgaagaacgtgttcccacctgaggtggccgtgttcgagcctagcgaggccgagatcagccacacccagaaagccaccctcgtgtgcctggctaccggcttctaccccgaccatgtggaactgtcttggtgggtcaacggcaaagaggtgcacagcggcgtgtctaccgacccccagccactgaaagaacagcccgccctgaacgacagccggtactgcctgagcagcagactgagagtgtccgccaccttctggcagaacccccggaaccacttcagatgccaggtgcagttctacggcctgagcgagaacgacgagtggacccaggacagagccaagcccgtgacccagatcgtgtctgccgaagcctggggcagagccgattgcggatcctccaaggacgccaacgataccctgctgctccagctgaccaacaccagcgcctactacatgtacttgttgctgctgctgaagtccgtggtgtacttcgccatcatcacatgctgcctgctgcggagaaccgccttctgctgcaacggcgagaagtctagggccaagcgatctggatctggagcaacaaacttctcactactcaaacaagcaggtgacgtggaggagaatcccgggcctactagtatggactggatttggcgcatccttttccttgtcggcgctgctaccggcgcgcattccttcgaagaagtccaacttgtggagtctggagggggcctggtgcagcccggcggctctctcagactgtcttgtgcggcaagcggctacaccttcacctcttactggatagaatgggtgaggcaggcacctggaaagggactggagtggattggagagattctgccaggagggggagatacaaattacaatgaaatcttcaaggggcgggccaccttttcagcggataccagcaagaatacagcttacctgcagatgaatagcctccgggcagaagataccgctgtttattattgcacgagacgggtgccaataagactggactattgggggcaagggactcttgtcaccgtcagttcaacgcgtatccagaaccctgatcctgccgtgtaccagctgcgggatagcaagagcagcgacaagagcgtgtgtctgttcaccgacttcgacagccagaccaacgtgtcccagagcaaggactccgacgtgtacatcaccgataagaccgtgctggacatgcggagcatggacttcaagagcaactccgccgtggcctggtccaacaagtccgatttcgcctgcgccaacgccttcaacaacagcattatccccgaggacacattcttcccaagccccgagagcagctgcggtaccgaagtgaaaaccgactccaccgaccacgtgaagcccaaagagacagagaacaccaagcagcccagcaagagctgccacaagcccaaggccatcgtgcacaccgagaaagtgaacatgatgagcctgaccgtgctgggcctgcggatgctgttcgccaaaaccgtggccgtgaacttcctgctgaccgccaagctgttcttcctctaa

SEQ ID NO: 37983 - DNA, 1869 bp, synthetic construct
  source 1..1869: mol_type = other DNA
atggccttaccagtgaccgccttgctcctgccgctggccttgctgctccacgccgccaggccggacatccagttgacccagtcccccagctcactcagcgccagtgtgggggaccgggtgaccattacctgtaaagccagtcagagtgtggactatgagggggatagcttcctgaattggtatcagcagaagcctggcaaagccccaaagctgctgatctacgctgcatctaatctggagtcaggcgtgccttctaggttctccggtagtgggtctgggaccgatttcacattgaccatttcatccctccaacccgaggatttcgctacatattactgtcagcagtccaatgaggaccctctcacctttggccagggcaccaaagttgaaattaagagactcgaggacctgaagaacgtgttcccacctgaggtggccgtgttcgagcctagcgaggccgagatcagccacacccagaaagccaccctcgtgtgcctggctaccggcttctaccccgaccatgtggaactgtcttggtgggtcaacggcaaagaggtgcacagcggcgtgtgtaccgacccccagccactgaaagaacagcccgccctgaacgacagccggtactgcctgagcagcagactgagagtgtccgccaccttctggcagaacccccggaaccacttcagatgccaggtgcagttctacggcctgagcgagaacgacgagtggacccaggacagagccaagcccgtgacccagatcgtgtctgccgaagcctggggcagagccgattgcgacgtgaagctggtggaaaagagcttcgagacagacaccaacctgaacttccagaacctgagcgtgatcggcttcagaatcctgctgctgaaagtggccggctttaacctgctgatgaccctgcggctgtggtccagcagggccaagcgatctggatctggagcaacaaacttctcactactcaaacaagcaggtgacgtggaggagaatcccgggcctactagtatggactggatttggcgcatccttttccttgtcggcgctgctaccggcgcgcattccttcgaagaagtccaacttgtggagtctggagggggcctggtgcagcccggcggctctctcagactgtcttgtgcggcaagcggctacaccttcacctcttactggatagaatgggtgaggcaggcacctggaaagggactggagtggattggagagattctgccaggagggggagatacaaattacaatgaaatcttcaaggggcgggccaccttttcagcggataccagcaagaatacagcttacctgcagatgaatagcctccgggcagaagataccgctgtttattattgcacgagacgggtgccaataagactggactattgggggcaagggactcttgtcaccgtcagttcaacgcgtatccagaaccctgatcctgccgtgtaccagctgcgggatagcaagagcagcgacaagagcgtgtgtctgttcaccgacttcgacagccagaccaacgtgtcccagagcaaggactccgacgtgtacatcaccgataagtgcgtgctggacatgcggagcatggacttcaagagcaactccgccgtggcctggtccaacaagtccgatttcgcctgcgccaacgccttcaacaacagcattatccccgaggacacattcttcccaagccccgagagcagctgcggctttaccagcgagagctaccagcagggcgtgctgagcgccaccatcctgtacgagatcctgctgggcaaggccaccctgtacgccgtgctggtgtctgccctggtgctgatggctatggtcaagcggaaggacagccggggataa

SEQ ID NO: 37984 - DNA, 1869 bp, synthetic construct
  source 1..1869: mol_type = other DNA
atggccttaccagtgaccgccttgctcctgccgctggccttgctgctccacgccgccaggccggacatccagttgacccagtcccccagctcactcagcgccagtgtgggggaccgggtgaccattacctgtaaagccagtcagagtgtggactatgagggggatagcttcctgaattggtatcagcagaagcctggcaaagccccaaagctgctgatctacgctgcatctaatctggagtcaggcgtgccttctaggttctccggtagtgggtctgggaccgatttcacattgaccatttcatccctccaacccgaggatttcgctacatattactgtcagcagtccaatgaggaccctctcacctttggccagggcaccaaagttgaaattaagagactcgaggacctgaagaacgtgttcccacctgaggtggccgtgttcgagcctagcgaggccgagatcagccacacccagaaagccaccctcgtgtgcctggctaccggcttctaccccgaccatgtggaactgtcttggtgggtcaacggcaaagaggtgcacagcggcgtgtgtaccgacccccagccactgaaagaacagcccgccctgaacgacagccggtactgcctgagcagcagactgagagtgtccgccaccttctggcagaacccccggaaccacttcagatgccaggtgcagttctacggcctgagcgagaacgacgagtggacccaggacagagccaagcccgtgacccagatcgtgtctgccgaagcctggggcagagccgattgcggctttaccagcgagagctaccagcagggcgtgctgagcgccaccaacctgagcgtgatcggcttcagaatcctgctgctgaaagtggccggctttaacctgctgatgaccctgcggctgtggtccagcagggccaagcgatctggatctggagcaacaaacttctcactactcaaacaagcaggtgacgtggaggagaatcccgggcctactagtatggactggatttggcgcatccttttccttgtcggcgctgctaccggcgcgcattccttcgaagaagtccaacttgtggagtctggagggggcctggtgcagcccggcggctctctcagactgtcttgtgcggcaagcggctacaccttcacctcttactggatagaatgggtgaggcaggcacctggaaagggactggagtggattggagagattctgccaggagggggagatacaaattacaatgaaatcttcaaggggcgggccaccttttcagcggataccagcaagaatacagcttacctgcagatgaatagcctccgggcagaagataccgctgtttattattgcacgagacgggtgccaataagactggactattgggggcaagggactcttgtcaccgtcagttcaacgcgtatccagaaccctgatcctgccgtgtaccagctgcgggatagcaagagcagcgacaagagcgtgtgtctgttcaccgacttcgacagccagaccaacgtgtcccagagcaaggactccgacgtgtacatcaccgataagtgcgtgctggacatgcggagcatggacttcaagagcaactccgccgtggcctggtccaacaagtccgatttcgcctgcgccaacgccttcaacaacagcattatccccgaggacacattcttcccaagccccgagagcagctgcgacgtgaagctggtggaaaagagcttcgagacagacaccaacctgaacttccagatcctgtacgagatcctgctgggcaaggccaccctgtacgccgtgctggtgtctgccctggtgctgatggctatggtcaagcggaaggacagccggggataa

SEQ ID NO: 37985 - DNA, 1869 bp, synthetic construct; identical to SEQ ID NO: 37983
  source 1..1869: mol_type = other DNA

SEQ ID NO: 37986 - DNA, 1869 bp, synthetic construct; identical to SEQ ID NO: 37984
  source 1..1869: mol_type = other DNA

SEQ ID NO: 37987 - DNA, 1866 bp, synthetic construct
  source 1..1866: mol_type = other DNA
atggccttaccagtgaccgccttgctcctgccgctggccttgctgctccacgccgccaggccggacatccagttgacccagtcccccagctcactcagcgccagtgtgggggaccgggtgaccattacctgtaaagccagtcagagtgtggactatgagggggatagcttcctgaattggtatcagcagaagcctggcaaagccccaaagctgctgatctacgctgcatctaatctggagtcaggcgtgccttctaggttctccggtagtgggtctgggaccgatttcacattgaccatttcatccctccaacccgaggatttcgctacatattactgtcagcagtccaatgaggaccctctcacctttggccagggcaccaaagttgaaattaagagactcgaggacctgaagaacgtgttcccacctgaggtggccgtgttcgagcctagcgaggccgagatcagccacacccagaaagccaccctcgtgtgcctggctaccggcttctaccccgaccatgtggaactgtcttggtgggtcaacggcaaagaggtgcacagcggcgtgtgtaccgacccccagccactgaaagaacagcccgccctgaacgacagccggtactgcctgagcagcagactgagagtgtccgccaccttctggcagaacccccggaaccacttcagatgccaggtgcagttctacggcctgagcgagaacgacgagtggacccaggacagagccaagcccgtgacccagatcgtgtctgccgaagcctggggcagagccgattgcgacgtgaagctggtggaaaagagcttcgagacagacaccaacctgaacttccagaacctgagcgtgatcggcttcagaatcctgctgctgaaagtggccggctttaacctgctgatgaccctgcggctgtggtccagcagggccaagcgatctggatctggagcaacaaacttctcactactcaaacaagcaggtgacgtggaggagaatcccgggcctactagtatggactggatttggcgcatccttttccttgtcggcgctgctaccggcgcgcattccttcgaagaagtccaacttgtggagtctggagggggcctggtgcagcccggcggctctctcagactgtcttgtgcggcaagcggctacaccttcacctcttactggatagaatgggtgaggcaggcacctggaaagggactggagtggattggagagattctgccaggagggggagatacaaattacaatgaaatcttcaaggggcgggccaccttttcagcggataccagcaagaatacagcttacctgcagatgaatagcctccgggcagaagataccgctgtttattattgcacgagacgggtgccaataagactggactattgggggcaagggactcttgtcaccgtcagttcaacgcgtatccagaaccctgatcctgccgtgtaccagctgcgggatagcaagagcagcgacaagagcgtgtgtctgttcaccgacttcgacagccagaccaacgtgtcccagagcaaggactccgacgtgtacatcaccgataagtgcgtgctggacatgcggagcatggacttcaagagcaactccgccgtggcctggtccaacaagtccgatttcgcctgcgccaacgccttcaacaacagcattatccccgaggacacattcttcccaagccccgagagcagctgcggctttaccagcgagagctaccagcagggcgtgctgagcgccaccatcctgtacgagatcctgctgggcaaggccaccctgtacgccgtgctggtgtctgccctggtgctgatggctatggtcaagcggaaggacagccgggga

SEQ ID NO: 37988 - DNA, 1878 bp, synthetic construct
  source 1..1878: mol_type = other DNA
atggccttaccagtgaccgccttgctcctgccgctggccttgctgctccacgccgccaggccggacatccagttgacccagtcccccagctcactcagcgccagtgtgggggaccgggtgaccattacctgtaaagccagtcagagtgtggactatgagggggatagcttcctgaattggtatcagcagaagcctggcaaagccccaaagctgctgatctacgctgcatctaatctggagtcaggcgtgccttctaggttctccggtagtgggtctgggaccgatttcacattgaccatttcatccctccaacccgaggatttcgctacatattactgtcagcagtccaatgaggaccctctcacctttggccagggcaccaaagttgaaattaagagactcgaggccgacgtgtcccccaagcctaccatcttcctgccctctatcgccgagacaaagctccagaaggccggcacctacctgtgcctgctggaaaagttcttcccagatgtgattaagatccactggcaggaaaagaagtccaacaccatcctgggcagccaggaaggcaacaccatgaagaccaacgacacctacatgaagttcagctggctgaccgtgcccgagaagtccctggacaaagaacacagatgcatcgtgcggcacgaaaacaacaagaacggcgtggaccaggaaatcatcttcccacccatcaagaccgatgtgattacaatggaccccaaggacaactgctccaaggacgccaacgataccctgctgctccagctgaccaacaccagcgcctactacatgtacttgttgctgctgctgaagtccgtggtgtacttcgccatcatcacatgctgcctgctgcggagaaccgccttctgctgcaacggcgagaagtctagggccaagcgatctggatctggagcaacaaacttctcactactcaaacaagcaggtgacgtggaggagaatcccgggcctactagtatggactggatttggcgcatccttttccttgtcggcgctgctaccggcgcgcattccttcgaagaagtccaacttgtggagtctggagggggcctggtgcagcccggcggctctctcagactgtcttgtgcggcaagcggctacaccttcacctcttactggatagaatgggtgaggcaggcacctggaaagggactggagtggattggagagattctgccaggagggggagatacaaattacaatgaaatcttcaaggggcgggccaccttttcagcggataccagcaagaatacagcttacctgcagatgaatagcctccgggcagaagataccgctgtttattattgcacgagacgggtgccaataagactggactattgggggcaagggactcttgtcaccgtcagttcaacgcgtagccagcctcacaccaagcccagcgtgttcgtgatgaagaacggcaccaacgtggcctgcctcgtgaaagagttctaccccaaggacatcaggatcaacctggtgtccagcaagaagatcaccgagttcgaccccgccatcgtgatctcccccagcggcaagtacaacgccgtgaagctggggaagtatgaggacagcaacagcgtgacctgctccgtgcagcacgacaacaagaccgtgcacagcaccgactttgaagtgaaaaccgactccaccgaccacgtgaagcccaaagagacagagaacaccaagcagcccagcaagagctgccacaagcccaaggccatcgtgcacaccgagaaagtgaacatgatgagcctgaccgtgatcggcttcagaatcctgctgctgaaagtggccggctttaacctgctgatgaccctgcggctgtggtccagctaa

SEQ ID NO: 37989 - DNA, 1878 bp, synthetic construct
  source 1..1878: mol_type = other DNA
atggccttaccagtgaccgccttgctcctgccgctggccttgctgctccacgccgccaggccggacatccagttgacccagtcccccagctcactcagcgccagtgtgggggaccgggtgaccattacctgtaaagccagtcagagtgtggactatgagggggatagcttcctgaattggtatcagcagaagcctggcaaagccccaaagctgctgatctacgctgcatctaatctggagtcaggcgtgccttctaggttctccggtagtgggtctgggaccgatttcacattgaccatttcatccctccaacccgaggatttcgctacatattactgtcagcagtccaatgaggaccctctcacctttggccagggcaccaaagttgaaattaagagactcgaggccgacgtgtcccccaagcctaccatcttcctgccctctatcgccgagacaaagctccagaaggccggcacctacctgtgcctgctggaaaagttcttcccagatgtgattaagatccactggcaggaaaagaagtccaacaccatcctgggcagccaggaaggcaacaccatgaagaccaacgacacctacatgaagttcagctggctgaccgtgcccgagaagtccctggacaaagaacacagatgcatcgtgcggcacgaaaacaacaagaacggcgtggaccaggaaatcatcttcccacccatcaagaccgatgtgattacaatggaccccaaggacaactgctccaaggacgccaacgataccctgctgctccagctgaccaacaccagcgcctactacatgtacttgttgctgctgctgaagtccgtggtgtacttcgccatcatcacatgctgcctgctgcggagaaccgccttctgctgcaacggcgagaagtctagggccaagcgatctggatctggagcaacaaacttctcactactcaaacaagcaggtgacgtggaggagaatcccgggcctactagtatggactggatttggcgcatccttttccttgtcggcgctgctaccggcgcgcattccttcgaagaagtccaacttgtggagtctggagggggcctggtgcagcccggcggctctctcagactgtcttgtgcggcaagcggctacaccttcacctcttactggatagaatgggtgaggcaggcacctggaaagggactggagtggattggagagattctgccaggagggggagatacaaattacaatgaaatcttcaaggggcgggccaccttttcagcggataccagcaagaatacagcttacctgcagatgaatagcctccgggcagaagataccgctgtttattattgcacgagacgggtgccaataagactggactattgggggcaagggactcttgtcaccgtcagttcaacgcgtagccagcctcacaccaagcccagcgtgttcgtgatgaagaacggcaccaacgtggcctgcctcgtgaaagagttctaccccaaggacatcaggatcaacctggtgtccagcaagaagatcaccgagttcgaccccgccatcgtgatctcccccagcggcaagtacaacgccgtgaagctggggaagtacgaggacagcaacagcgtgacctgctccgtgcagcacgacaacaagaccgtgcacagcaccgactttgaagtgaaaaccgactccaccgaccacgtgaagcccaaagagacagagaacaccaagcagcccagcaagagctgccacaagcccaaggccatcgtgcacaccgagaaagtgaacatgatgagcctgaccgtgctgggcttcagaatcctgctgctgaaagtggccggctttaacctgctgatgaccctgcggctgtggtccagctaa

SEQ ID NO: 37990 - DNA, 1866 bp, synthetic construct; identical to SEQ ID NO: 37987
  source 1..1866: mol_type = other DNA

SEQ ID NO: 37991 - DNA, 1878 bp, synthetic construct
  source 1..1878: mol_type = other DNA
atggccttaccagtgaccgccttgctcctgccgctggccttgctgctccacgccgccaggccggacatccagttgacccagtcccccagctcactcagcgccagtgtgggggaccgggtgaccattacctgtaaagccagtcagagtgtggactatgagggggatagcttcctgaattggtatcagcagaagcctggcaaagccccaaagctgctgatctacgctgcatctaatctggagtcaggcgtgccttctaggttctccggtagtgggtctgggaccgatttcacattgaccatttcatccctccaacccgaggatttcgctacatattactgtcagcagtccaatgaggaccctctcacctttggccagggcaccaaagttgaaattaagagactcgagatccagaaccctgatcctgccgtgtaccagctgcgggatagcaagagcagcgacaagagcgtgtgtctgttcaccgacttcgacagccagaccaacgtgtcccagagcaaggactccgacgtgtacatcaccgataagtgcgtgctggacatgcggagcatggacttcaagagcaactccgccgtggcctggtccaacaagtccgatttcgcctgcgccaacgccttcaacaacagcattatccccgaggacacattcttcccaagccccgagagcagctgcggctttaccagcgagagctaccagcagggcgtgctgagcgccaccatcctgtacgagatcctgctgggcaaggccaccctgtacgccgtgctggtgtctgccctggtgctgatggctatggtcaagcggaaggacagccggggacgcgccaagagaagcggatctggcgtgaagcagaccctgaatttcgacctgctgaagctggctggcgacgtggaatccaacccaggccctactagtatggactggatttggcgcatccttttccttgtcggcgctgctaccggcgcgcattccttcgaagaagtccaacttgtggagtctggagggggcctggtgcagcccggcggctctctcagactgtcttgtgcggcaagcggctacaccttcacctcttactggatagaatgggtgaggcaggcacctggaaagggactggagtggattggagagattctgccaggagggggagatacaaattacaatgaaatcttcaaggggcgggccaccttttcagcggataccagcaagaatacagcttacctgcagatgaatagcctccgggcagaagataccgctgtttattattgcacgagacgggtgccaataagactggactattgggggcaagggactcttgtcaccgtcagttcaacgcgtgaggacctgaagaacgtgttcccacctgaggtggccgtgttcgagcctagcgaggccgagatcagccacacccagaaagccaccctcgtgtgcctggctaccggcttctaccccgaccatgtggaactgtcttggtgggtcaacggcaaagaggtgcacagcggcgtgtgtaccgacccccagccactgaaagaacagcccgccctgaacgacagccggtactgcctgagcagcagactgagagtgtccgccaccttctggcagaacccccggaaccacttcagatgccaggtgcagttctacggcctgagcgagaacgacgagtggacccaggacagagccaagcccgtgacccagatcgtgtctgccgaagcctggggcagagccgattgcgacgtgaagctggtggaaaagagcttcgagacagacaccaacctgaacttccagaacctgagcgtgatcggcttcagaatcctgctgctgaaagtggccggctttaacctgctgatgaccctgcggctgtggtccagc

SEQ ID NO: 37992 - DNA, 2271 bp, synthetic construct
  source 1..2271: mol_type = other DNA
atggccttaccagtgaccgccttgctcctgccgctggccttgctgctccacgccgccaggccggaagtgcagctggttgaatctggcggaggactggttcagcctggcggatctctgagactgtcttgtgccgccagcggcttcagcttcagcgacttttggatgagctgggtccgacaggcccctggcaaaggacttgaatgggtcgccacaatcagccaggccggcagcgagaaggactacgtggactctgtgaagggcagattcaccatcagccgggacaacgccaagaagtccctgtacctccagatgaacagcctgagagccgaggacaccgccgtgtactattgtgcctctggcgtgtacagcttcgactacagaggccagggcaccctggtcacagtctcttctggtaccggcggaggcggatctggcggcggaggtagcggtggcggaggatctgaattcgacatccagttgacccagtcccccagctcactcagcgccagtgtgggggaccgggtgaccattacctgtaaagccagtcagagtgtggactatgagggggatagcttcctgaattggtatcagcagaagcctggcaaagccccaaagctgctgatctacgctgcatctaatctggagtcaggcgtgccttctaggttctccggtagtgggtctgggaccgatttcacattgaccatttcatccctccaacccgaggatttcgctacatattactgtcagcagtccaatgaggaccctctcacctttggccagggcaccaaagttgaaattaagagactcgaggacctgaagaacgtgttcccacctgaggtggccgtgttcgagcctagcgaggccgagatcagccacacccagaaagccaccctcgtgtgcctggctaccggcttctaccccgaccatgtggaactgtcttggtgggtcaacggcaaagaggtgcacagcggcgtgtgtaccgacccccagccactgaaagaacagcccgccctgaacgacagccggtactgcctgagcagcagactgagagtgtccgccaccttctggcagaacccccggaaccacttcagatgccaggtgcagttctacggcctgagcgagaacgacgagtggacccaggacagagccaagcccgtgacccagatcgtgtctgccgaagcctggggcagagccgattgcgacgtgaagctggtggaaaagagcttcgagacagacaccaacctgaacttccagaacctgagcgtgatcggcttcagaatcctgctgctgaaagtggccggctttaacctgctgatgaccctgcggctgtggtccagcagggccaagcgatctggatctggagcaacaaacttctcactactcaaacaagcaggtgacgtggaggagaatcccgggcctactagtatggactggatttggcgcatccttttccttgtcggcgctgctaccggcgcgcattccttcgaagaagtccaacttgtggagtctggagggggcctggtgcagcccggcggctctctcagactgtcttgtgcggcaagcggctacaccttcacctcttactggatagaatgggtgaggcaggcacctggaaagggactggagtggattggagagattctgccaggagggggagatacaaattacaatgaaatcttcaaggggcgggccaccttttcagcggataccagcaagaatacagcttacctgcagatgaatagcctccgggcagaagataccgctgtttattattgcacgagacgggtgccaataagactggactattgggggcaagggactcttgtcaccgtcagttcaacgcgtatccagaaccctgatcctgccgtgtaccagctgcgggatagcaagagcagcgacaagagcgtgtgtctgttcaccgacttcgacagccagaccaacgtgtcccagagcaaggactccgacgtgtacatcaccgataagtgcgtgctggacatgcggagcatggacttcaagagcaactccgccgtggcctggtccaacaagtccgatttcgcctgcgccaacgccttcaacaacagcattatccccgaggacacattcttcccaagccccgagagcagctgcggctttaccagcgagagctaccagcagggcgtgctgagcgccaccatcctgtacgagatcctgctgggcaaggccaccctgtacgccgtgctggtgtctgccctggtgctgatggctatggtcaagcggaaggacagccgggga

SEQ ID NO: 37993 - DNA, 2283 bp, synthetic construct
  source 1..2283: mol_type = other DNA
atggccttaccagtgaccgccttgctcctgccgctggccttgctgctccacgccgccaggccggaagtgcagctggttgaatctggcggaggactggttcagcctggcggatctctgagactgtcttgtgccgccagcggcttcagcttcagcgacttttggatgagctgggtccgacaggcccctggcaaaggacttgaatgggtcgccacaatcagccaggccggcagcgagaaggactacgtggactctgtgaagggcagattcaccatcagccgggacaacgccaagaagtccctgtacctccagatgaacagcctgagagccgaggacaccgccgtgtactattgtgcctctggcgtgtacagcttcgactacagaggccagggcaccctggtcacagtctcttctggtaccggcggaggcggatctggcggcggaggtagcggtggcggaggatctgaattcgacatccagttgacccagtcccccagctcactcagcgccagtgtgggggaccgggtgaccattacctgtaaagccagtcagagtgtggactatgagggggatagcttcctgaattggtatcagcagaagcctggcaaagccccaaagctgctgatctacgctgcatctaatctggagtcaggcgtgccttctaggttctccggtagtgggtctgggaccgatttcacattgaccatttcatccctccaacccgaggatttcgctacatattactgtcagcagtccaatgaggaccctctcacctttggccagggcaccaaagttgaaattaagagactcgagatccagaaccctgatcctgccgtgtaccagctgcgggatagcaagagcagcgacaagagcgtgtgtctgttcaccgacttcgacagccagaccaacgtgtcccagagcaaggactccgacgtgtacatcaccgataagtgcgtgctggacatgcggagcatggacttcaagagcaactccgccgtggcctggtccaacaagtccgatttcgcctgcgccaacgccttcaacaacagcattatccccgaggacacattcttcccaagccccgagagcagctgcggctttaccagcgagagctaccagcagggcgtgctgagcgccaccatcctgtacgagatcctgctgggcaaggccaccctgtacgccgtgctggtgtctgccctggtgctgatggctatggtcaagcggaaggacagccggggacgcgccaagagaagcggatctggcgtgaagcagaccctgaatttcgacctgctgaagctggctggcgacgtggaatccaacccaggccctactagtatggactggatttggcgcatccttttccttgtcggcgctgctaccggcgcgcattccttcgaagaagtccaacttgtggagtctggagggggcctggtgcagcccggcggctctctcagactgtcttgtgcggcaagcggctacaccttcacctcttactggatagaatgggtgaggcaggcacctggaaagggactggagtggattggagagattctgccaggagggggagatacaaattacaatgaaatcttcaaggggcgggccaccttttcagcggataccagcaagaatacagcttacctgcagatgaatagcctccgggcagaagataccgctgtttattattgcacgagacgggtgccaataagactggactattgggggcaagggactcttgtcaccgtcagttcaacgcgtgaggacctgaagaacgtgttcccacctgaggtggccgtgttcgagcctagcgaggccgagatcagccacacccagaaagccaccctcgtgtgcctggctaccggcttctaccccgaccatgtggaactgtcttggtgggtcaacggcaaagaggtgcacagcggcgtgtgtaccgacccccagccactgaaagaacagcccgccctgaacgacagccggtactgcctgagcagcagactgagagtgtccgccaccttctggcagaacccccggaaccacttcagatgccaggtgcagttctacggcctgagcgagaacgacgagtggacccaggacagagccaagcccgtgacccagatcgtgtctgccgaagcctggggcagagccgattgcgacgtgaagctggtggaaaagagcttcgagacagacaccaacctgaacttccagaacctgagcgtgatcggcttcagaatcctgctgctgaaagtggccggctttaacctgctgatgaccctgcggctgtggtccagc

SEQ ID NO: 37994 - DNA, 2682 bp, synthetic construct
  source 1..2682: mol_type = other DNA
atggccttaccagtgaccgccttgctcctgccgctggccttgctgctccacgccgccaggccggaagtgcagctggttgaatctggcggaggactggttcagcctggcggatctctgagactgtcttgtgccgccagcggcttcagcttcagcgacttttggatgagctgggtccgacaggcccctggcaaaggacttgaatgggtcgccacaatcagccaggccggcagcgagaaggactacgtggactctgtgaagggcagattcaccatcagccgggacaacgccaagaagtccctgtacctccagatgaacagcctgagagccgaggacaccgccgtgtactattgtgcctctggcgtgtacagcttcgactacagaggccagggcaccctggtcacagtctcttctggtaccggcggaggcggatctggcggcggaggtagcggtggcggaggatctgaattcgacatccagttgacccagtcccccagctcactcagcgccagtgtgggggaccgggtgaccattacctgtaaagccagtcagagtgtggactatgagggggatagcttcctgaattggtatcagcagaagcctggcaaagccccaaagctgctgatctacgctgcatctaatctggagtcaggcgtgccttctaggttctccggtagtgggtctgggaccgatttcacattgaccatttcatccctccaacccgaggatttcgctacatattactgtcagcagtccaatgaggaccctctcacctttggccagggcaccaaagttgaaattaagagactcgaggacctgaagaacgtgttcccacctgaggtggccgtgttcgagcctagcgaggccgagatcagccacacccagaaagccaccctcgtgtgcctggctaccggcttctaccccgaccatgtggaactgtcttggtgggtcaacggcaaagaggtgcacagcggcgtgtgtaccgacccccagccactgaaagaacagcccgccctgaacgacagccggtactgcctgagcagcagactgagagtgtccgccaccttctggcagaacccccggaaccacttcagatgccaggtgcagttctacggcctgagcgagaacgacgagtggacccaggacagagccaagcccgtgacccagatcgtgtctgccgaagcctggggcagagccgattgcgacgtgaagctggtggaaaagagcttcgagacagacaccaacctgaacttccagaacctgagcgtgatcggcttcagaatcctgctgctgaaagtggccggctttaacctgctgatgaccctgcggctgtggtccagcagggccaagcgatctggatctggagcaacaaacttctcactactcaaacaagcaggtgacgtggaggagaatcccgggcctactagtatggactggatttggcgcatccttttccttgtcggcgctgctaccggcgcgcattccgggccccagctccagctgcaagagtctggacctggcctggtcaagcctagcgagacactgagcctgacctgtaccgtgtccggcgatagcatcagcagcggcgattactactggggctggatcagacagcctcctggcaaaggactggaatggatcggccacatctactacagcggcgtgacctactacaaccccagcctgaagtccagagtgaccatcagcgtggacaccagccggaaccagttctccctgaagctgtctagcgtgacagccgccgataccgccgtgtactactgcaccagagaggacagcagcaactggcggagtagaggccagggaacactggtcacagttagctctggatccggcggaggcggaagtggaggcggaggatctggcggcggaggctctttcgaagaagtccaacttgtggagtctggagggggcctggtgcagcccggcggctctctcagactgtcttgtgcggcaagcggctacaccttcacctcttactggatagaatgggtgaggcaggcacctggaaagggactggagtggattggagagattctgccaggagggggagatacaaattacaatgaaatcttcaaggggcgggccaccttttcagcggataccagcaagaatacagcttacctgcagatgaatagcctccgggcagaagataccgctgtttattattgcacgagacgggtgccaataagactggactattgggggcaagggactcttgtcaccgtcagttcaacgcgtatccagaaccctgatcctgccgtgtaccagctgcgggatagcaagagcagcgacaagagcgtgtgtctgttcaccgacttcgacagccagaccaacgtgtcccagagcaaggactccgacgtgtacatcaccgataagtgcgtgctggacatgcggagcatggacttcaagagcaactccgccgtggcctggtccaacaagtccgatttcgcctgcgccaacgccttcaacaacagcattatccccgaggacacattcttcccaagccccgagagcagctgcggctttaccagcgagagctaccagcagggcgtgctgagcgccaccatcctgtacgagatcctgctgggcaaggccaccctgtacgccgtgctggtgtctgccctggtgctgatggctatggtcaagcggaaggacagccgggga

SEQ ID NO: 37995 - DNA, 2694 bp, synthetic construct
  source 1..2694: mol_type = other DNA
atggccttaccagtgaccgccttgctcctgccgctggccttgctgctccacgccgccaggccggaagtgcagctggttgaatctggcggaggactggttcagcctggcggatctctgagactgtcttgtgccgccagcggcttcagcttcagcgacttttggatgagctgggtccgacaggcccctggcaaaggacttgaatgggtcgccacaatcagccaggccggcagcgagaaggactacgtggactctgtgaagggcagattcaccatcagccgggacaacgccaagaagtccctgtacctccagatgaacagcctgagagccgaggacaccgccgtgtactattgtgcctctggcgtgtacagcttcgactacagaggccagggcaccctggtcacagtctcttctggtaccggcggaggcggatctggcggcggaggtagcggtggcggaggatctgaattcgacatccagttgacccagtcccccagctcactcagcgccagtgtgggggaccgggtgaccattacctgtaaagccagtcagagtgtggactatgagggggatagcttcctgaattggtatcagcagaagcctggcaaagccccaaagctgctgatctacgctgcatctaatctggagtcaggcgtgccttctaggttctccggtagtgggtctgggaccgatttcacattgaccatttcatccctccaacccgaggatttcgctacatattactgtcagcagtccaatgaggaccctctcacctttggccagggcaccaaagttgaaattaagagactcgagatccagaaccctgatcctgccgtgtaccagctgcgggatagcaagagcagcgacaagagcgtgtgtctgttcaccgacttcgacagccagaccaacgtgtcccagagcaaggactccgacgtgtacatcaccgataagtgcgtgctggacatgcggagcatggacttcaagagcaactccgccgtggcctggtccaacaagtccgatttcgcctgcgccaacgccttcaacaacagcattatccccgaggacacattcttcccaagccccgagagcagctgcggctttaccagcgagagctaccagcagggcgtgctgagcgccaccatcctgtacgagatcctgctgggcaaggccaccctgtacgccgtgctggtgtctgccctggtgctgatggctatggtcaagcggaaggacagccggggacgcgccaagagaagcggatctggcgtgaagcagaccctgaatttcgacctgctgaagctggctggcgacgtggaatccaacccaggccctactagtatggactggatttggcgcatccttttccttgtcggcgctgctaccggcgcgcattccgggccccagctccagctgcaagagtctggacctggcctggtcaagcctagcgagacactgagcctgacctgtaccgtgtccggcgatagcatcagcagcggcgattactactggggctggatcagacagcctcctggcaaaggactggaatggatcggccacatctactacagcggcgtgacctactacaaccccagcctgaagtccagagtgaccatcagcgtggacaccagccggaaccagttctccctgaagctgtctagcgtgacagccgccgataccgccgtgtactactgcaccagagaggacagcagcaactggcggagtagaggccagggaacactggtcacagttagctctggatccggcggaggcggaagtggaggcggaggatctggcggcggaggctctttcgaagaagtccaacttgtggagtctggagggggcctggtgcagcccggcggctctctcagactgtcttgtgcggcaagcggctacaccttcacctcttactggatagaatgggtgaggcaggcacctggaaagggactggagtggattggagagattctgccaggagggggagatacaaattacaatgaaatcttcaaggggcgggccaccttttcagcggataccagcaagaatacagcttacctgcagatgaatagcctccgggcagaagataccgctgtttattattgcacgagacgggtgccaataagactggactattgggggcaagggactcttgtcaccgtcagttcaacgcgtgaggacctgaagaacgtgttcccacctgaggtggccgtgttcgagcctagcgaggccgagatcagccacacccagaaagccaccctcgtgtgcctggctaccggcttctaccccgaccatgtggaactgtcttggtgggtcaacggcaaagaggtgcacagcggcgtgtgtaccgacccccagccactgaaagaacagcccgccctgaacgacagccggtactgcctgagcagcagactgagagtgtccgccaccttctggcagaacccccggaaccacttcagatgccaggtgcagttctacggcctgagcgagaacgacgagtggacccaggacagagccaagcccgtgacccagatcgtgtctgccgaagcctggggcagagccgattgcgacgtgaagctggtggaaaagagcttcgagacagacaccaacctgaacttccagaacctgagcgtgatcggcttcagaatcctgctgctgaaagtggccggctttaacctgctgatgaccctgcggctgtggtccagc

SEQ ID NO: 37996 - DNA, 2076 bp, synthetic construct
  source 1..2076: mol_type = other DNA
atggccttaccagtgaccgccttgctcctgccgctggccttgctgctccacgccgccaggccggacatccagttgacccagtcccccagctcactcagcgccagtgtgggggaccgggtgaccattacctgtaaagccagtcagagtgtggactatgagggggatagcttcctgaattggtatcagcagaagcctggcaaagccccaaagctgctgatctacgctgcatctaatctggagtcaggcgtgccttctaggttctccggtagtgggtctgggaccgatttcacattgaccatttcatccctccaacccgaggatttcgctacatattactgtcagcagtccaatgaggaccctctcacctttggccagggcaccaaagttgaaattaagagactcgaggacctgaagaacgtgttcccacctgaggtggccgtgttcgagcctagcgaggccgagatcagccacacccagaaagccaccctcgtgtgcctggctaccggcttctaccccgaccatgtggaactgtcttggtgggtcaacggcaaagaggtgcacagcggcgtgtgtaccgacccccagccactgaaagaacagcccgccctgaacgacagccggtactgcctgagcagcagactgagagtgtccgccaccttctggcagaacccccggaaccacttcagatgccaggtgcagttctacggcctgagcgagaacgacgagtggacccaggacagagccaagcccgtgacccagatcgtgtctgccgaagcctggggcagagccgattgcgacgtgaagctggtggaaaagagcttcgagacagacaccaacctgaacttccagaacctgagcgtgatcggcttcagaatcctgctgctgaaagtggccggctttaacctgctgatgaccctgcggctgtggtccagcagggccaagcgatctggatctggagcaacaaacttctcactactcaaacaagcaggtgacgtggaggagaatcccgggcctactagtatggactggatttggcgcatccttttccttgtcggcgctgctaccggcgcccattccgggcccatggaccccgacctggaaatcagagccgccttcctgcggcagagaaacacagccctgagaacagaggtggccgagctggaacaagaggtgcagcggctggaaaacgaggtgtcccagtacgagacaagatacggccctctcggaggcggaaaaggatccggcggcggaggatctggcggaggcggatctgggggcggaggctctttcgaagaagtccaacttgtggagtctggagggggcctggtgcagcccggcggctctctcagactgtcttgtgcggcaagcggctacaccttcacctcttactggatagaatgggtgaggcaggcacctggaaagggactggagtggattggagagattctgccaggagggggagatacaaattacaatgaaatcttcaaggggcgggccaccttttcagcggataccagcaagaatacagcttacctgcagatgaatagcctccgggcagaagataccgctgtttattattgcacgagacgggtgccaataagactggactattgggggcaagggactcttgtcaccgtcagttcaacgcgtatccagaaccctgatcctgccgtgtaccagctgcgggatagcaagagcagcgacaagagcgtgtgtctgttcaccgacttcgacagccagaccaacgtgtcccagagcaaggactccgacgtgtacatcaccgataagtgcgtgctggacatgcggagcatggacttcaagagcaactccgccgtggcctggtccaacaagtccgatttcgcctgcgccaacgccttcaacaacagcattatccccgaggacacattcttcccaagccccgagagcagctgcggctttaccagcgagagctaccagcagggcgtgctgagcgccaccatcctgtacgagatcctgctgggcaaggccaccctgtacgccgtgctggtgtctgccctggtgctgatggctatggtcaagcggaaggacagccgggga

SEQ ID NO: 37997 - DNA, 2088 bp, synthetic construct
  source 1..2088: mol_type = other DNA
atggccttaccagtgaccgccttgctcctgccgctggccttgctgctccacgccgccaggccggacatccagttgacccagtcccccagctcactcagcgccagtgtgggggaccgggtgaccattacctgtaaagccagtcagagtgtggactatgagggggatagcttcctgaattggtatcagcagaagcctggcaaagccccaaagctgctgatctacgctgcatctaatctggagtcaggcgtgccttctaggttctccggtagtgggtctgggaccgatttcacattgaccatttcatccctccaacccgaggatttcgctacatattactgtcagcagtccaatgaggaccctctcacctttggccagggcaccaaagttgaaattaagagactcgagatccagaaccctgatcctgccgtgtaccagctgcgggatagcaagagcagcgacaagagcgtgtgtctgttcaccgacttcgacagccagaccaacgtgtcccagagcaaggactccgacgtgtacatcaccgataagtgcgtgctggacatgcggagcatggacttcaagagcaactccgccgtggcctggtccaacaagtccgatttcgcctgcgccaacgccttcaacaacagcattatccccgaggacacattcttcccaagccccgagagcagctgcggctttaccagcgagagctaccagcagggcgtgctgagcgccaccatcctgtacgagatcctgctgggcaaggccaccctgtacgccgtgctggtgtctgccctggtgctgatggctatggtcaagcggaaggacagccggggacgcgccaagagaagcggatctggcgtgaagcagaccctgaatttcgacctgctgaagctggctggcgacgtggaatccaacccaggccctactagtatggactggatttggcgcatccttttccttgtcggcgctgctaccggcgcccattccgggcccatggaccccgacctggaaatcagagccgccttcctgcggcagagaaacacagccctgagaacagaggtggccgagctggaacaagaggtgcagcggctggaaaacgaggtgtcccagtacgagacaagatacggccctctcggaggcggaaaaggatccggcggcggaggatctggcggaggcggatctgggggcggaggctctttcgaagaagtccaacttgtggagtctggagggggcctggtgcagcccggcggctctctcagactgtcttgtgcggcaagcggctacaccttcacctcttactggatagaatgggtgaggcaggcacctggaaagggactggagtggattggagagattctgccaggagggggagatacaaattacaatgaaatcttcaaggggcgggccaccttttcagcggataccagcaagaatacagcttacctgcagatgaatagcctccgggcagaagataccgctgtttattattgcacgagacgggtgccaataagactggactattgggggcaagggactcttgtcaccgtcagttcaacgcgtgaggacctgaagaacgtgttcccacctgaggtggccgtgttcgagcctagcgaggccgagatcagccacacccagaaagccaccctcgtgtgcctggctaccggcttctaccccgaccatgtggaactgtcttggtgggtcaacggcaaagaggtgcacagcggcgtgtgtaccgacccccagccactgaaagaacagcccgccctgaacgacagccggtactgcctgagcagcagactgagagtgtccgccaccttctggcagaacccccggaaccacttcagatgccaggtgcagttctacggcctgagcgagaacgacgagtggacccaggacagagccaagcccgtgacccagatcgtgtctgccgaagcctggggcagagccgattgcgacgtgaagctggtggaaaagagcttcgagacagacaccaacctgaacttccagaacctgagcgtgatcggcttcagaatcctgctgctgaaagtggccggctttaacctgctgatgaccctgcggctgtggtccagc

SEQ ID NO: 37998 - DNA, 2007 bp, synthetic construct
  source 1..2007: mol_type = other DNA
atggccttaccagtgaccgccttgctcctgccgctggccttgctgctccacgccgccaggccggacatccagttgacccagtcccccagctcactcagcgccagtgtgggggaccgggtgaccattacctgtaaagccagtcagagtgtggactatgagggggatagcttcctgaattggtatcagcagaagcctggcaaagccccaaagctgctgatctacgctgcatctaatctggagtcaggcgtgccttctaggttctccggtagtgggtctgggaccgatttcacattgaccatttcatccctccaacccgaggatttcgctacatattactgtcagcagtccaatgaggaccctctcacctttggccagggcaccaaagttgaaattaagagactcgaggacctgaagaacgtgttcccacctgaggtggccgtgttcgagcctagcgaggccgagatcagccacacccagaaagccaccctcgtgtgcctggctaccggcttctaccccgaccatgtggaactgtcttggtgggtcaacggcaaagaggtgcacagcggcgtgtgtaccgacccccagccactgaaagaacagcccgccctgaacgacagccggtactgcctgagcagcagactgagagtgtccgccaccttctggcagaacccccggaaccacttcagatgccaggtgcagttctacggcctgagcgagaacgacgagtggacccaggacagagccaagcccgtgacccagatcgtgtctgccgaagcctggggcagagccgattgcgacgtgaagctggtggaaaagagcttcgagacagacaccaacctgaacttccagaacctgagcgtgatcggcttcagaatcctgctgctgaaagtggccggctttaacctgctgatgaccctgcggctgtggtccagcagggccaagcgatctggatctggagcaacaaacttctcactactcaaacaagcaggtgacgtggaggagaatcccgggcctactagtatggactggatttggcgcatccttttccttgtcggcgctgctaccggcgcccattccgggcccgaagttgctgccctcgagaaggaggtagcagctttggaaaaagaagtcgcagcccttgagaaagaagttgcggctctggagaagggatccggcggcggaggatctggcggaggcggatctgggggcggaggctctttcgaagaagtccaacttgtggagtctggagggggcctggtgcagcccggcggctctctcagactgtcttgtgcggcaagcggctacaccttcacctcttactggatagaatgggtgaggcaggcacctggaaagggactggagtggattggagagattctgccaggagggggagatacaaattacaatgaaatcttcaaggggcgggccaccttttcagcggataccagcaagaatacagcttacctgcagatgaatagcctccgggcagaagataccgctgtttattattgcacgagacgggtgccaataagactggactattgggggcaagggactcttgtcaccgtcagttcaacgcgtatccagaaccctgatcctgccgtgtaccagctgcgggatagcaagagcagcgacaagagcgtgtgtctgttcaccgacttcgacagccagaccaacgtgtcccagagcaaggactccgacgtgtacatcaccgataagtgcgtgctggacatgcggagcatggacttcaagagcaactccgccgtggcctggtccaacaagtccgatttcgcctgcgccaacgccttcaacaacagcattatccccgaggacacattcttcccaagccccgagagcagctgcggctttaccagcgagagctaccagcagggcgtgctgagcgccaccatcctgtacgagatcctgctgggcaaggccaccctgtacgccgtgctggtgtctgccctggtgctgatggctatggtcaagcggaaggacagccgggga

SEQ ID NO: 37999 - DNA, 2019 bp, synthetic construct
  source 1..2019: mol_type = other DNA
atggccttaccagtgaccgccttgctcctgccgctggccttgctgctccacgccgccaggccggacatccagttgacccagtcccccagctcactcagcgccagtgtgggggaccgggtgaccattacctgtaaagccagtcagagtgtggactatgagggggatagcttcctgaattggtatcagcagaagcctggcaaagccccaaagctgctgatctacgctgcatctaatctggagtcaggcgtgccttctaggttctccggtagtgggtctgggaccgatttcacattgaccatttcatccctccaacccgaggatttcgctacatattactgtcagcagtccaatgaggaccctctcacctttggccagggcaccaaagttgaaattaagagactcgagatccagaaccctgatcctgccgtgtaccagctgcgggatagcaagagcagcgacaagagcgtgtgtctgttcaccgacttcgacagccagaccaacgtgtcccagagcaaggactccgacgtgtacatcaccgataagtgcgtgctggacatgcggagcatggacttcaagagcaactccgccgtggcctggtccaacaagtccgatttcgcctgcgccaacgccttcaacaacagcattatccccgaggacacattcttcccaagccccgagagcagctgcggctttaccagcgagagctaccagcagggcgtgctgagcgccaccatcctgtacgagatcctgctgggcaaggccaccctgtacgccgtgctggtgtctgccctggtgctgatggctatggtcaagcggaaggacagccggggacgcgccaagagaagcggatctggcgtgaagcagaccctgaatttcgacctgctgaagctggctggcgacgtggaatccaacccaggccctactagtatggactggatttggcgcatccttttccttgtcggcgctgctaccggcgcccattccgggcccgaagttgctgccctcgagaaggaggtagcagctttggaaaaagaagtcgcagcccttgagaaagaagttgcggctctggagaagggatccggcggcggaggatctggcggaggcggatctgggggcggaggctctttcgaagaagtccaacttgtggagtctggagggggcctggtgcagcccggcggctctctcagactgtcttgtgcggcaagcggctacaccttcacctcttactggatagaatgggtgaggcaggcacctggaaagggactggagtggattggagagattctgccaggagggggagatacaaattacaatgaaatcttcaaggggcgggccaccttttcagcggataccagcaagaatacagcttacctgcagatgaatagcctccgggcagaagataccgctgtttattattgcacgagacgggtgccaataagactggactattgggggcaagggactcttgtcaccgtcagttcaacgcgtgaggacctgaagaacgtgttcccacctgaggtggccgtgttcgagcctagcgaggccgagatcagccacacccagaaagccaccctcgtgtgcctggctaccggcttctaccccgaccatgtggaactgtcttggtgggtcaacggcaaagaggtgcacagcggcgtgtgtaccgacccccagccactgaaagaacagcccgccctgaacgacagccggtactgcctgagcagcagactgagagtgtccgccaccttctggcagaacccccggaaccacttcagatgccaggtgcagttctacggcctgagcgagaacgacgagtggacccaggacagagccaagcccgtgacccagatcgtgtctgccgaagcctggggcagagccgattgcgacgtgaagctggtggaaaagagcttcgagacagacaccaacctgaacttccagaacctgagcgtgatcggcttcagaatcctgctgctgaaagtggccggctttaacctgctgatgaccctgcggctgtggtccagc

SEQ ID NO: 38000 - DNA, 2277 bp, synthetic construct
  source 1..2277: mol_type = other DNA
atggccttaccagtgaccgccttgctcctgccgctggccttgctgctccacgccgccaggccggacatccagttgacccagtcccccagctcactcagcgccagtgtgggggaccgggtgaccattacctgtaaagccagtcagagtgtggactatgagggggatagcttcctgaattggtatcagcagaagcctggcaaagccccaaagctgctgatctacgctgcatctaatctggagtcaggcgtgccttctaggttctccggtagtgggtctgggaccgatttcacattgaccatttcatccctccaacccgaggatttcgctacatattactgtcagcagtccaatgaggaccctctcacctttggccagggcaccaaagttgaaattaagagactcgaggacctgaagaacgtgttcccacctgaggtggccgtgttcgagcctagcgaggccgagatcagccacacccagaaagccaccctcgtgtgcctggctaccggcttctaccccgaccatgtggaactgtcttggtgggtcaacggcaaagaggtgcacagcggcgtgtgtaccgacccccagccactgaaagaacagcccgccctgaacgacagccggtactgcctgagcagcagactgagagtgtccgccaccttctggcagaacccccggaaccacttcagatgccaggtgcagttctacggcctgagcgagaacgacgagtggacccaggacagagccaagcccgtgacccagatcgtgtctgccgaagcctggggcagagccgattgcgacgtgaagctggtggaaaagagcttcgagacagacaccaacctgaacttccagaacctgagcgtgatcggcttcagaatcctgctgctgaaagtggccggctttaacctgctgatgaccctgcggctgtggtccagcagggccaagcgatctggatctggagcaacaaacttctcactactcaaacaagcaggtgacgtggaggagaatcccgggcctactagtatggactggatttggcgcatccttttccttgtcggcgctgctaccggcgcccattccgggccccaggttcagctgcaagagtctggcggaggacttgctcaagctggcggaagcctgagactgtcttgtgccgcctctggcagaaccttcagcatgggctggtttagacaggcccctggcaaagagagagagttcgtcgccgccatcacatacagcggcggcagcccttactacgcctcttctgtcagaggccggttcaccatcagccgggacaacgccaagaacaccgtgtacctccagatgaacagcctgaagccagaggacaccgccgtgtactactgtgccgccaatccaacctacggcagcgactggaatgccgagaattggggccagggcacccaagtgacagtgtctagtggatccggcggcggaggatctggcggaggcggatctgggggcggaggctctttcgaagaagtccaacttgtggagtctggagggggcctggtgcagcccggcggctctctcagactgtcttgtgcggcaagcggctacaccttcacctcttactggatagaatgggtgaggcaggcacctggaaagggactggagtggattggagagattctgccaggagggggagatacaaattacaatgaaatcttcaaggggcgggccaccttttcagcggataccagcaagaatacagcttacctgcagatgaatagcctccgggcagaagataccgctgtttattattgcacgagacgggtgccaataagactggactattgggggcaagggactcttgtcaccgtcagttcaacgcgtatccagaaccctgatcctgccgtgtaccagctgcgggatagcaagagcagcgacaagagcgtgtgtctgttcaccgacttcgacagccagaccaacgtgtcccagagcaaggactccgacgtgtacatcaccgataagtgcgtgctggacatgcggagcatggacttcaagagcaactccgccgtggcctggtccaacaagtccgatttcgcctgcgccaacgccttcaacaacagcattatccccgaggacacattcttcccaagccccgagagcagctgcggctttaccagcgagagctaccagcagggcgtgctgagcgccaccatcctgtacgagatcctgctgggcaaggccaccctgtacgccgtgctggtgtctgccctggtgctgatggctatggtcaagcggaaggacagccgggga

SEQ ID NO: 38001 - DNA, 2289 bp, synthetic construct
  source 1..2289: mol_type = other DNA
atggccttaccagtgaccgccttgctcctgccgctggccttgctgctccacgccgccaggccggacatccagttgacccagtcccccagctcactcagcgccagtgtgggggaccgggtgaccattacctgtaaagccagtcagagtgtggactatgagggggatagcttcctgaattggtatcagcagaagcctggcaaagccccaaagctgctgatctacgctgcatctaatctggagtcaggcgtgccttctaggttctccggtagtgggtctgggaccgatttcacattgaccatttcatccctccaacccgaggatttcgctacatattactgtcagcagtccaatgaggaccctctcacctttggccagggcaccaaagttgaaattaagagactcgagatccagaaccctgatcctgccgtgtaccagctgcgggatagcaagagcagcgacaagagcgtgtgtctgttcaccgacttcgacagccagaccaacgtgtcccagagcaaggactccgacgtgtacatcaccgataagtgcgtgctggacatgcggagcatggacttcaagagcaactccgccgtggcctggtccaacaagtccgatttcgcctgcgccaacgccttcaacaacagcattatccccgaggacacattcttcccaagccccgagagcagctgcggctttaccagcgagagctaccagcagggcgtgctgagcgccaccatcctgtacgagatcctgctgggcaaggccaccctgtacgccgtgctggtgtctgccctggtgctgatggctatggtcaagcggaaggacagccggggacgcgccaagagaagcggatctggcgtgaagcagaccctgaatttcgacctgctgaagctggctggcgacgtggaatccaacccaggccctactagtatggactggatttggcgcatccttttccttgtcggcgctgctaccggcgcccattccgggccccaggttcagctgcaagagtctggcggaggacttgctcaagctggcggaagcctgagactgtcttgtgccgcctctggcagaaccttcagcatgggctggtttagacaggcccctggcaaagagagagagttcgtcgccgccatcacatacagcggcggcagcccttactacgcctcttctgtcagaggccggttcaccatcagccgggacaacgccaagaacaccgtgtacctccagatgaacagcctgaagccagaggacaccgccgtgtactactgtgccgccaatccaacctacggcagcgactggaatgccgagaattggggccagggcacccaagtgacagtgtctagtggatccggcggcggaggatctggcggaggcggatctgggggcggaggctctttcgaagaagtccaacttgtggagtctggagggggcctggtgcagcccggcggctctctcagactgtcttgtgcggcaagcggctacaccttcacctcttactggatagaatgggtgaggcaggcacctggaaagggactggagtggattggagagattctgccaggagggggagatacaaattacaatgaaatcttcaaggggcgggccaccttttcagcggataccagcaagaatacagcttacctgcagatgaatagcctccgggcagaagataccgctgtttattattgcacgagacgggtgccaataagactggactattgggggcaagggactcttgtcaccgtcagttcaacgcgtgaggacctgaagaacgtgttcccacctgaggtggccgtgttcgagcctagcgaggccgagatcagccacacccagaaagccaccctcgtgtgcctggctaccggcttctaccccgaccatgtggaactgtcttggtgggtcaacggcaaagaggtgcacagcggcgtgtgtaccgacccccagccactgaaagaacagcccgccctgaacgacagccggtactgcctgagcagcagactgagagtgtccgccaccttctggcagaacccccggaaccacttcagatgccaggtgcagttctacggcctgagcgagaacgacgagtggacccaggacagagccaagcccgtgacccagatcgtgtctgccgaagcctggggcagagccgattgcgacgtgaagctggtggaaaagagcttcgagacagacaccaacctgaacttccagaacctgagcgtgatcggcttcagaatcctgctgctgaaagtggccggctttaacctgctgatgaccctgcggctgtggtccagc

SEQ ID NO: 38002 - DNA, 2295 bp, synthetic construct
  source 1..2295: mol_type = other DNA
atggccttaccagtgaccgccttgctcctgccgctggccttgctgctccacgccgccaggccggaagtgcaactggtggaatctggaggctctctggtgcagccagggggaagcctgagactgtcttgtgccgcttccggcttcaccttcgacgactacgccatgagctgggtgcgccaggtgccaggcaaaggcctggaatgggtgtccagcatcaactggagcggcacccacaccgattacgccgactccgtgaaaggcagattcacaatcagcagaaacaacgccaacaataccctgtacctgcagatgaactccctgaagtctgaggatacagcagtgtattattgcgccaagaactggcgggacgccggcaccacttggtttgagaaaagcggctctgccggacagggaacccaagtgacagtgtcctccggtaccggcggaggcggatctggcggcggaggtagcggtggcggaggatctgaattcgacatccagttgacccagtcccccagctcactcagcgccagtgtgggggaccgggtgaccattacctgtaaagccagtcagagtgtggactatgagggggatagcttcctgaattggtatcagcagaagcctggcaaagccccaaagctgctgatctacgctgcatctaatctggagtcaggcgtgccttctaggttctccggtagtgggtctgggaccgatttcacattgaccatttcatccctccaacccgaggatttcgctacatattactgtcagcagtccaatgaggaccctctcacctttggccagggcaccaaagttgaaattaagagactcgaggacctgaagaacgtgttcccacctgaggtggccgtgttcgagcctagcgaggccgagatcagccacacccagaaagccaccctcgtgtgcctggctaccggcttctaccccgaccatgtggaactgtcttggtgggtcaacggcaaagaggtgcacagcggcgtgtgtaccgacccccagccactgaaagaacagcccgccctgaacgacagccggtactgcctgagcagcagactgagagtgtccgccaccttctggcagaacccccggaaccacttcagatgccaggtgcagttctacggcctgagcgagaacgacgagtggacccaggacagagccaagcccgtgacccagatcgtgtctgccgaagcctggggcagagccgattgcgacgtgaagctggtggaaaagagcttcgagacagacaccaacctgaacttccagaacctgagcgtgatcggcttcagaatcctgctgctgaaagtggccggctttaacctgctgatgaccctgcggctgtggtccagcagggccaagcgatctggatctggagcaacaaacttctcactactcaaacaagcaggtgacgtggaggagaatcccgggcctactagtatggactggatttggcgcatccttttccttgtcggcgctgctaccggcgcgcattccttcgaagaagtccaacttgtggagtctggagggggcctggtgcagcccggcggctctctcagactgtcttgtgcggcaagcggctacaccttcacctcttactggatagaatgggtgaggcaggcacctggaaagggactggagtggattggagagattctgccaggagggggagatacaaattacaatgaaatcttcaaggggcgggccaccttttcagcggataccagcaagaatacagcttacctgcagatgaatagcctccgggcagaagataccgctgtttattattgcacgagacgggtgccaataagactggactattgggggcaagggactcttgtcaccgtcagttcaacgcgtatccagaaccctgatcctgccgtgtaccagctgcgggatagcaagagcagcgacaagagcgtgtgtctgttcaccgacttcgacagccagaccaacgtgtcccagagcaaggactccgacgtgtacatcaccgataagtgcgtgctggacatgcggagcatggacttcaagagcaactccgccgtggcctggtccaacaagtccgatttcgcctgcgccaacgccttcaacaacagcattatccccgaggacacattcttcccaagccccgagagcagctgcggctttaccagcgagagctaccagcagggcgtgctgagcgccaccatcctgtacgagatcctgctgggcaaggccaccctgtacgccgtgctggtgtctgccctggtgctgatggctatggtcaagcggaaggacagccgggga

SEQ ID NO: 38003 - DNA, 2307 bp, synthetic construct
  source 1..2307: mol_type = other DNA
atggccttaccagtgaccgccttgctcctgccgctggccttgctgctccacgccgccaggccggaagtgcaactggtggaatctggaggctctctggtgcagccagggggaagcctgagactgtcttgtgccgcttccggcttcaccttcgacgactacgccatgagctgggtgcgccaggtgccaggcaaaggcctggaatgggtgtccagcatcaactggagcggcacccacaccgattacgccgactccgtgaaaggcagattcacaatcagcagaaacaacgccaacaataccctgtacctgcagatgaactccctgaagtctgaggatacagcagtgtattattgcgccaagaactggcgggacgccggcaccacttggtttgagaaaagcggctctgccggacagggaacccaagtgacagtgtcctccggtaccggcggaggcggatctggcggcggaggtagcggtggcggaggatctgaattcgacatccagttgacccagtcccccagctcactcagcgccagtgtgggggaccgggtgaccattacctgtaaagccagtcagagtgtggactatgagggggatagcttcctgaattggtatcagcagaagcctggcaaagccccaaagctgctgatctacgctgcatctaatctggagtcaggcgtgccttctaggttctccggtagtgggtctgggaccgatttcacattgaccatttcatccctccaacccgaggatttcgctacatattactgtcagcagtccaatgaggaccctctcacctttggccagggcaccaaagttgaaattaagagactcgagatccagaaccctgatcctgccgtgtaccagctgcgggatagcaagagcagcgacaagagcgtgtgtctgttcaccgacttcgacagccagaccaacgtgtcccagagcaaggactccgacgtgtacatcaccgataagtgcgtgctggacatgcggagcatggacttcaagagcaactccgccgtggcctggtccaacaagtccgatttcgcctgcgccaacgccttcaacaacagcattatccccgaggacacattcttcccaagccccgagagcagctgcggctttaccagcgagagctaccagcagggcgtgctgagcgccaccatcctgtacgagatcctgctgggcaaggccaccctgtacgccgtgctggtgtctgccctggtgctgatggctatggtcaagcggaaggacagccggggacgcgccaagagaagcggatctggcgtgaagcagaccctgaatttcgacctgctgaagctggctggcgacgtggaatccaacccaggccctactagtatggactggatttggcgcatccttttccttgtcggcgctgctaccggcgcgcattccttcgaagaagtccaacttgtggagtctggagggggcctggtgcagcccggcggctctctcagactgtcttgtgcggcaagcggctacaccttcacctcttactggatagaatgggtgaggcaggcacctggaaagggactggagtggattggagagattctgccaggagggggagatacaaattacaatgaaatcttcaaggggcgggccaccttttcagcggataccagcaagaatacagcttacctgcagatgaatagcctccgggcagaagataccgctgtttattattgcacgagacgggtgccaataagactggactattgggggcaagggactcttgtcaccgtcagttcaacgcgtgaggacctgaagaacgtgttcccacctgaggtggccgtgttcgagcctagcgaggccgagatcagccacacccagaaagccaccctcgtgtgcctggctaccggcttctaccccgaccatgtggaactgtcttggtgggtcaacggcaaagaggtgcacagcggcgtgtgtaccgacccccagccactgaaagaacagcccgccctgaacgacagccggtactgcctgagcagcagactgagagtgtccgccaccttctggcagaacccccggaaccacttcagatgccaggtgcagttctacggcctgagcgagaacgacgagtggacccaggacagagccaagcccgtgacccagatcgtgtctgccgaagcctggggcagagccgattgcgacgtgaagctggtggaaaagagcttcgagacagacaccaacctgaacttccagaacctgagcgtgatcggcttcagaatcctgctgctgaaagtggccggctttaacctgctgatgaccctgcggctgtggtccagc

SEQ ID NO: 38004 - DNA, 2289 bp, synthetic construct
  source 1..2289: mol_type = other DNA
atggccttaccagtgaccgccttgctcctgccgctggccttgctgctccacgccgccaggccggaagttcagctgcttgagtctggcggaggactggttcaacctggcggaagcctgagactgtcttgtgccgccagcggcttcatcttcagcagctacgccatgagctgggtccgacaggctcctggaaagggccaagaatgggtttccggcgttagcggcacaggcgtgaacacctactacgccgatagcgtgaagggcagattcaccatcagccgggacaacagcaagaacaccctgtacctccagatgaacagcctgagagccgaggacaccgccgtgtactattgtgcctctggcaaaggctgggacagcggctcttggtacgaggactatagaggccagggcaccctggtcacagtttcttcaggtaccggcggaggcggatctggcggcggaggtagcggtggcggaggatctgaattcgacatccagttgacccagtcccccagctcactcagcgccagtgtgggggaccgggtgaccattacctgtaaagccagtcagagtgtggactatgagggggatagcttcctgaattggtatcagcagaagcctggcaaagccccaaagctgctgatctacgctgcatctaatctggagtcaggcgtgccttctaggttctccggtagtgggtctgggaccgatttcacattgaccatttcatccctccaacccgaggatttcgctacatattactgtcagcagtccaatgaggaccctctcacctttggccagggcaccaaagttgaaattaagagactcgaggacctgaagaacgtgttcccacctgaggtggccgtgttcgagcctagcgaggccgagatcagccacacccagaaagccaccctcgtgtgcctggctaccggcttctaccccgaccatgtggaactgtcttggtgggtcaacggcaaagaggtgcacagcggcgtgtgtaccgacccccagccactgaaagaacagcccgccctgaacgacagccggtactgcctgagcagcagactgagagtgtccgccaccttctggcagaacccccggaaccacttcagatgccaggtgcagttctacggcctgagcgagaacgacgagtggacccaggacagagccaagcccgtgacccagatcgtgtctgccgaagcctggggcagagccgattgcgacgtgaagctggtggaaaagagcttcgagacagacaccaacctgaacttccagaacctgagcgtgatcggcttcagaatcctgctgctgaaagtggccggctttaacctgctgatgaccctgcggctgtggtccagcagggccaagcgatctggatctggagcaacaaacttctcactactcaaacaagcaggtgacgtggaggagaatcccgggcctactagtatggactggatttggcgcatccttttccttgtcggcgctgctaccggcgcgcattccttcgaagaagtccaacttgtggagtctggagggggcctggtgcagcccggcggctctctcagactgtcttgtgcggcaagcggctacaccttcacctcttactggatagaatgggtgaggcaggcacctggaaagggactggagtggattggagagattctgccaggagggggagatacaaattacaatgaaatcttcaaggggcgggccaccttttcagcggataccagcaagaatacagcttacctgcagatgaatagcctccgggcagaagataccgctgtttattattgcacgagacgggtgccaataagactggactattgggggcaagggactcttgtcaccgtcagttcaacgcgtatccagaaccctgatcctgccgtgtaccagctgcgggatagcaagagcagcgacaagagcgtgtgtctgttcaccgacttcgacagccagaccaacgtgtcccagagcaaggactccgacgtgtacatcaccgataagtgcgtgctggacatgcggagcatggacttcaagagcaactccgccgtggcctggtccaacaagtccgatttcgcctgcgccaacgccttcaacaacagcattatccccgaggacacattcttcccaagccccgagagcagctgcggctttaccagcgagagctaccagcagggcgtgctgagcgccaccatcctgtacgagatcctgctgggcaaggccaccctgtacgccgtgctggtgtctgccctggtgctgatggctatggtcaagcggaaggacagccgggga

SEQ ID NO: 38005 - DNA, 2301 bp, synthetic construct
  source 1..2301: mol_type = other DNA
atggccttaccagtgaccgccttgctcctgccgctggccttgctgctccacgccgccaggccggaagttcagctgcttgagtctggcggaggactggttcaacctggcggaagcctgagactgtcttgtgccgccagcggcttcatcttcagcagctacgccatgagctgggtccgacaggctcctggaaagggccaagaatgggtttccggcgttagcggcacaggcgtgaacacctactacgccgatagcgtgaagggcagattcaccatcagccgggacaacagcaagaacaccctgtacctccagatgaacagcctgagagccgaggacaccgccgtgtactattgtgcctctggcaaaggctgggacagcggctcttggtacgaggactatagaggccagggcaccctggtcacagtttcttcaggtaccggcggaggcggatctggcggcggaggtagcggtggcggaggatctgaattcgacatccagttgacccagtcccccagctcactcagcgccagtgtgggggaccgggtgaccattacctgtaaagccagtcagagtgtggactatgagggggatagcttcctgaattggtatcagcagaagcctggcaaagccccaaagctgctgatctacgctgcatctaatctggagtcaggcgtgccttctaggttctccggtagtgggtctgggaccgatttcacattgaccatttcatccctccaacccgaggatttcgctacatattactgtcagcagtccaatgaggaccctctcacctttggccagggcaccaaagttgaaattaagagactcgagatccagaaccctgatcctgccgtgtaccagctgcgggatagcaagagcagcgacaagagcgtgtgtctgttcaccgacttcgacagccagaccaacgtgtcccagagcaaggactccgacgtgtacatcaccgataagtgcgtgctggacatgcggagcatggacttcaagagcaactccgccgtggcctggtccaacaagtccgatttcgcctgcgccaacgccttcaacaacagcattatccccgaggacacattcttcccaagccccgagagcagctgcggctttaccagcgagagctaccagcagggcgtgctgagcgccaccatcctgtacgagatcctgctgggcaaggccaccctgtacgccgtgctggtgtctgccctggtgctgatggctatggtcaagcggaaggacagccggggacgcgccaagagaagcggatctggcgtgaagcagaccctgaatttcgacctgctgaagctggctggcgacgtggaatccaacccaggccctactagtatggactggatttggcgcatccttttccttgtcggcgctgctaccggcgcgcattccttcgaagaagtccaacttgtggagtctggagggggcctggtgcagcccggcggctctctcagactgtcttgtgcggcaagcggctacaccttcacctcttactggatagaatgggtgaggcaggcacctggaaagggactggagtggattggagagattctgccaggagggggagatacaaattacaatgaaatcttcaaggggcgggccaccttttcagcggataccagcaagaatacagcttacctgcagatgaatagcctccgggcagaagataccgctgtttattattgcacgagacgggtgccaataagactggactattgggggcaagggactcttgtcaccgtcagttcaacgcgtgaggacctgaagaacgtgttcccacctgaggtggccgtgttcgagcctagcgaggccgagatcagccacacccagaaagccaccctcgtgtgcctggctaccggcttctaccccgaccatgtggaactgtcttggtgggtcaacggcaaagaggtgcacagcggcgtgtgtaccgacccccagccactgaaagaacagcccgccctgaacgacagccggtactgcctgagcagcagactgagagtgtccgccaccttctggcagaacccccggaaccacttcagatgccaggtgcagttctacggcctgagcgagaacgacgagtggacccaggacagagccaagcccgtgacccagatcgtgtctgccgaagcctggggcagagccgattgcgacgtgaagctggtggaaaagagcttcgagacagacaccaacctgaacttccagaacctgagcgtgatcggcttcagaatcctgctgctgaaagtggccggctttaacctgctgatgaccctgcggctgtggtccagc

SEQ ID NO: 38006 - DNA, 2193 bp, synthetic construct
  source 1..2193: mol_type = other DNA
atggccttaccagtgaccgccttgctcctgccgctggccttgctgctccacgccgccaggccgatgctgcccgctcctaagaatctggtggtgtccagaatcaccgaggacagcgccagactgtcttggacagctcctgatgccgccttcgacagcttccccatccggtacatcgagacactgatctggggcgaagccatctggctggatgtgcctggaagcgagagaagctacgacctgaccggactgaagcctggcacagagtatgccgtggtcatcaccggcgtgaaaggcggcagattctctagccctctggtggcctctttcaccaccggtaccggcggaggcggatctggcggcggaggtagcggtggcggaggatctgaattcgacatccagttgacccagtcccccagctcactcagcgccagtgtgggggaccgggtgaccattacctgtaaagccagtcagagtgtggactatgagggggatagcttcctgaattggtatcagcagaagcctggcaaagccccaaagctgctgatctacgctgcatctaatctggagtcaggcgtgccttctaggttctccggtagtgggtctgggaccgatttcacattgaccatttcatccctccaacccgaggatttcgctacatattactgtcagcagtccaatgaggaccctctcacctttggccagggcaccaaagttgaaattaagagactcgaggacctgaagaacgtgttcccacctgaggtggccgtgttcgagcctagcgaggccgagatcagccacacccagaaagccaccctcgtgtgcctggctaccggcttctaccccgaccatgtggaactgtcttggtgggtcaacggcaaagaggtgcacagcggcgtgtgtaccgacccccagccactgaaagaacagcccgccctgaacgacagccggtactgcctgagcagcagactgagagtgtccgccaccttctggcagaacccccggaaccacttcagatgccaggtgcagttctacggcctgagcgagaacgacgagtggacccaggacagagccaagcccgtgacccagatcgtgtctgccgaagcctggggcagagccgattgcgacgtgaagctggtggaaaagagcttcgagacagacaccaacctgaacttccagaacctgagcgtgatcggcttcagaatcctgctgctgaaagtggccggctttaacctgctgatgaccctgcggctgtggtccagcagggccaagcgatctggatctggagcaacaaacttctcactactcaaacaagcaggtgacgtggaggagaatcccgggcctactagtatggactggatttggcgcatccttttccttgtcggcgctgctaccggcgcgcattccttcgaagaagtccaacttgtggagtctggagggggcctggtgcagcccggcggctctctcagactgtcttgtgcggcaagcggctacaccttcacctcttactggatagaatgggtgaggcaggcacctggaaagggactggagtggattggagagattctgccaggagggggagatacaaattacaatgaaatcttcaaggggcgggccaccttttcagcggataccagcaagaatacagcttacctgcagatgaatagcctccgggcagaagataccgctgtttattattgcacgagacgggtgccaataagactggactattgggggcaagggactcttgtcaccgtcagttcaacgcgtatccagaaccctgatcctgccgtgtaccagctgcgggatagcaagagcagcgacaagagcgtgtgtctgttcaccgacttcgacagccagaccaacgtgtcccagagcaaggactccgacgtgtacatcaccgataagtgcgtgctggacatgcggagcatggacttcaagagcaactccgccgtggcctggtccaacaagtccgatttcgcctgcgccaacgccttcaacaacagcattatccccgaggacacattcttcccaagccccgagagcagctgcggctttaccagcgagagctaccagcagggcgtgctgagcgccaccatcctgtacgagatcctgctgggcaaggccaccctgtacgccgtgctggtgtctgccctggtgctgatggctatggtcaagcggaaggacagccgggga

SEQ ID NO: 38007 - DNA, 2205 bp, synthetic construct
  source 1..2205: mol_type = other DNA
atggccttaccagtgaccgccttgctcctgccgctggccttgctgctccacgccgccaggccgatgctgcccgctcctaagaatctggtggtgtccagaatcaccgaggacagcgccagactgtcttggacagctcctgatgccgccttcgacagcttccccatccggtacatcgagacactgatctggggcgaagccatctggctggatgtgcctggaagcgagagaagctacgacctgaccggactgaagcctggcacagagtatgccgtggtcatcaccggcgtgaaaggcggcagattctctagccctctggtggcctctttcaccaccggtaccggcggaggcggatctggcggcggaggtagcggtggcggaggatctgaattcgacatccagttgacccagtcccccagctcactcagcgccagtgtgggggaccgggtgaccattacctgtaaagccagtcagagtgtggactatgagggggatagcttcctgaattggtatcagcagaagcctggcaaagccccaaagctgctgatctacgctgcatctaatctggagtcaggcgtgccttctaggttctccggtagtgggtctgggaccgatttcacattgaccatttcatccctccaacccgaggatttcgctacatattactgtcagcagtccaatgaggaccctctcacctttggccagggcaccaaagttgaaattaagagactcgagatccagaaccctgatcctgccgtgtaccagctgcgggatagcaagagcagcgacaagagcgtgtgtctgttcaccgacttcgacagccagaccaacgtgtcccagagcaaggactccgacgtgtacatcaccgataagtgcgtgctggacatgcggagcatggacttcaagagcaactccgccgtggcctggtccaacaagtccgatttcgcctgcgccaacgccttcaacaacagcattatccccgaggacacattcttcccaagccccgagagcagctgcggctttaccagcgagagctaccagcagggcgtgctgagcgccaccatcctgtacgagatcctgctgggcaaggccaccctgtacgccgtgctggtgtctgccctggtgctgatggctatggtcaagcggaaggacagccggggacgcgccaagagaagcggatctggcgtgaagcagaccctgaatttcgacctgctgaagctggctggcgacgtggaatccaacccaggccctactagtatggactggatttggcgcatccttttccttgtcggcgctgctaccggcgcgcattccttcgaagaagtccaacttgtggagtctggagggggcctggtgcagcccggcggctctctcagactgtcttgtgcggcaagcggctacaccttcacctcttactggatagaatgggtgaggcaggcacctggaaagggactggagtggattggagagattctgccaggagggggagatacaaattacaatgaaatcttcaaggggcgggccaccttttcagcggataccagcaagaatacagcttacctgcagatgaatagcctccgggcagaagataccgctgtttattattgcacgagacgggtgccaataagactggactattgggggcaagggactcttgtcaccgtcagttcaacgcgtgaggacctgaagaacgtgttcccacctgaggtggccgtgttcgagcctagcgaggccgagatcagccacacccagaaagccaccctcgtgtgcctggctaccggcttctaccccgaccatgtggaactgtcttggtgggtcaacggcaaagaggtgcacagcggcgtgtgtaccgacccccagccactgaaagaacagcccgccctgaacgacagccggtactgcctgagcagcagactgagagtgtccgccaccttctggcagaacccccggaaccacttcagatgccaggtgcagttctacggcctgagcgagaacgacgagtggacccaggacagagccaagcccgtgacccagatcgtgtctgccgaagcctggggcagagccgattgcgacgtgaagctggtggaaaagagcttcgagacagacaccaacctgaacttccagaacctgagcgtgatcggcttcagaatcctgctgctgaaagtggccggctttaacctgctgatgaccctgcggctgtggtccagc

SEQ ID NO: 38008 - DNA, 2280 bp, synthetic construct
  source 1..2280: mol_type = other DNA
atggccttaccagtgaccgccttgctcctgccgctggccttgctgctccacgccgccaggccggaggtgcagctggttgaatctggcggaggactggttcagcctggcggatctctgagactgtcttgtgccgccagcggcttcaacatcaaggatacctgtatcggctgggttcgcagagcccctggcaaagaggaagaactggtcgccaaaatctgcaagtacagcggccacaccagatacgccgacagcgtgaagggcagattcaccatcagcgccgacaccagcaagaacaccgcctacctccagatgaacagcctgagagccgaggacaccgccgtgtactattgtgccgctgtgtccgtcagagatgggcactacaattactggggccagggcaccaccgtgaccgtttcttcaggtaccggcggaggcggatctggcggcggaggtagcggtggcggaggatctgaattcgacatccagttgacccagtcccccagctcactcagcgccagtgtgggggaccgggtgaccattacctgtaaagccagtcagagtgtggactatgagggggatagcttcctgaattggtatcagcagaagcctggcaaagccccaaagctgctgatctacgctgcatctaatctggagtcaggcgtgccttctaggttctccggtagtgggtctgggaccgatttcacattgaccatttcatccctccaacccgaggatttcgctacatattactgtcagcagtccaatgaggaccctctcacctttggccagggcaccaaagttgaaattaagagactcgaggacctgaagaacgtgttcccacctgaggtggccgtgttcgagcctagcgaggccgagatcagccacacccagaaagccaccctcgtgtgcctggctaccggcttctaccccgaccatgtggaactgtcttggtgggtcaacggcaaagaggtgcacagcggcgtgtgtaccgacccccagccactgaaagaacagcccgccctgaacgacagccggtactgcctgagcagcagactgagagtgtccgccaccttctggcagaacccccggaaccacttcagatgccaggtgcagttctacggcctgagcgagaacgacgagtggacccaggacagagccaagcccgtgacccagatcgtgtctgccgaagcctggggcagagccgattgcgacgtgaagctggtggaaaagagcttcgagacagacaccaacctgaacttccagaacctgagcgtgatcggcttcagaatcctgctgctgaaagtggccggctttaacctgctgatgaccctgcggctgtggtccagcagggccaagcgatctggatctggagcaacaaacttctcactactcaaacaagcaggtgacgtggaggagaatcccgggcctactagtatggactggatttggcgcatccttttccttgtcggcgctgctaccggcgcgcattccttcgaagaagtccaacttgtggagtctggagggggcctggtgcagcccggcggctctctcagactgtcttgtgcggcaagcggctacaccttcacctcttactggatagaatgggtgaggcaggcacctggaaagggactggagtggattggagagattctgccaggagggggagatacaaattacaatgaaatcttcaaggggcgggccaccttttcagcggataccagcaagaatacagcttacctgcagatgaatagcctccgggcagaagataccgctgtttattattgcacgagacgggtgccaataagactggactattgggggcaagggactcttgtcaccgtcagttcaacgcgtatccagaaccctgatcctgccgtgtaccagctgcgggatagcaagagcagcgacaagagcgtgtgtctgttcaccgacttcgacagccagaccaacgtgtcccagagcaaggactccgacgtgtacatcaccgataagtgcgtgctggacatgcggagcatggacttcaagagcaactccgccgtggcctggtccaacaagtccgatttcgcctgcgccaacgccttcaacaacagcattatccccgaggacacattcttcccaagccccgagagcagctgcggctttaccagcgagagctaccagcagggcgtgctgagcgccaccatcctgtacgagatcctgctgggcaaggccaccctgtacgccgtgctggtgtctgccctggtgctgatggctatggtcaagcggaaggacagccgggga

SEQ ID NO: 38009 - DNA, 2292 bp, synthetic construct
  source 1..2292: mol_type = other DNA
atggccttaccagtgaccgccttgctcctgccgctggccttgctgctccacgccgccaggccggaggtgcagctggttgaatctggcggaggactggttcagcctggcggatctctgagactgtcttgtgccgccagcggcttcaacatcaaggatacctgtatcggctgggttcgcagagcccctggcaaagaggaagaactggtcgccaaaatctgcaagtacagcggccacaccagatacgccgacagcgtgaagggcagattcaccatcagcgccgacaccagcaagaacaccgcctacctccagatgaacagcctgagagccgaggacaccgccgtgtactattgtgccgctgtgtccgtcagagatgggcactacaattactggggccagggcaccaccgtgaccgtttcttcaggtaccggcggaggcggatctggcggcggaggtagcggtggcggaggatctgaattcgacatccagttgacccagtcccccagctcactcagcgccagtgtgggggaccgggtgaccattacctgtaaagccagtcagagtgtggactatgagggggatagcttcctgaattggtatcagcagaagcctggcaaagccccaaagctgctgatctacgctgcatctaatctggagtcaggcgtgccttctaggttctccggtagtgggtctgggaccgatttcacattgaccatttcatccctccaacccgaggatttcgctacatattactgtcagcagtccaatgaggaccctctcacctttggccagggcaccaaagttgaaattaagagactcgagatccagaaccctgatcctgccgtgtaccagctgcgggatagcaagagcagcgacaagagcgtgtgtctgttcaccgacttcgacagccagaccaacgtgtcccagagcaaggactccgacgtgtacatcaccgataagtgcgtgctggacatgcggagcatggacttcaagagcaactccgccgtggcctggtccaacaagtccgatttcgcctgcgccaacgccttcaacaacagcattatccccgaggacacattcttcccaagccccgagagcagctgcggctttaccagcgagagctaccagcagggcgtgctgagcgccaccatcctgtacgagatcctgctgggcaaggccaccctgtacgccgtgctggtgtctgccctggtgctgatggctatggtcaagcggaaggacagccggggacgcgccaagagaagcggatctggcgtgaagcagaccctgaatttcgacctgctgaagctggctggcgacgtggaatccaacccaggccctactagtatggactggatttggcgcatccttttccttgtcggcgctgctaccggcgcgcattccttcgaagaagtccaacttgtggagtctggagggggcctggtgcagcccggcggctctctcagactgtcttgtgcggcaagcggctacaccttcacctcttactggatagaatgggtgaggcaggcacctggaaagggactggagtggattggagagattctgccaggagggggagatacaaattacaatgaaatcttcaaggggcgggccaccttttcagcggataccagcaagaatacagcttacctgcagatgaatagcctccgggcagaagataccgctgtttattattgcacgagacgggtgccaataagactggactattgggggcaagggactcttgtcaccgtcagttcaacgcgtgaggacctgaagaacgtgttcccacctgaggtggccgtgttcgagcctagcgaggccgagatcagccacacccagaaagccaccctcgtgtgcctggctaccggcttctaccccgaccatgtggaactgtcttggtgggtcaacggcaaagaggtgcacagcggcgtgtgtaccgacccccagccactgaaagaacagcccgccctgaacgacagccggtactgcctgagcagcagactgagagtgtccgccaccttctggcagaacccccggaaccacttcagatgccaggtgcagttctacggcctgagcgagaacgacgagtggacccaggacagagccaagcccgtgacccagatcgtgtctgccgaagcctggggcagagccgattgcgacgtgaagctggtggaaaagagcttcgagacagacaccaacctgaacttccagaacctgagcgtgatcggcttcagaatcctgctgctgaaagtggccggctttaacctgctgatgaccctgcggctgtggtccagc

SEQ ID NO: 38010 - DNA, 3396 bp, synthetic construct
  source 1..3396: mol_type = other DNA
atggccttaccagtgaccgccttgctcctgccgctggccttgctgctccacgccgccaggccggaagtgcagctggttgaatctggcggaggactggttcaggctggcggatctctgagactgtcttgtgccgccagcggcagaacctttagcatgggctggtttagacaggcccctggcaaagagagagagttcgtcgccgccatcacatactctggcggcagcccttactacgccgactctgtgaagggcagattcaccatcagccgggacaacgccaagaacaccgtgtacctccagatgaacagcctgaagcctgaggacaccgccgtgtactactgcgccgccaatccaacatacggcagcgactggaacgccgagaattggggccagggaacccaagtgacagtgtctagcggtaccggcggaggcggatctggcggcggaggtagcggtggcggaggatctgaattcgacatccagttgacccagtcccccagctcactcagcgccagtgtgggggaccgggtgaccattacctgtaaagccagtcagagtgtggactatgagggggatagcttcctgaattggtatcagcagaagcctggcaaagccccaaagctgctgatctacgctgcatctaatctggagtcaggcgtgccttctaggttctccggtagtgggtctgggaccgatttcacattgaccatttcatccctccaacccgaggatttcgctacatattactgtcagcagtccaatgaggaccctctcacctttggccagggcaccaaagttgaaattaagagactcgaggacctgaagaacgtgttcccacctgaggtggccgtgttcgagcctagcgaggccgagatcagccacacccagaaagccaccctcgtgtgcctggctaccggcttctaccccgaccatgtggaactgtcttggtgggtcaacggcaaagaggtgcacagcggcgtgtgtaccgacccccagccactgaaagaacagcccgccctgaacgacagccggtactgcctgagcagcagactgagagtgtccgccaccttctggcagaacccccggaaccacttcagatgccaggtgcagttctacggcctgagcgagaacgacgagtggacccaggacagagccaagcccgtgacccagatcgtgtctgccgaagcctggggcagagccgattgcgacgtgaagctggtggaaaagagcttcgagacagacaccaacctgaacttccagaacctgagcgtgatcggcttcagaatcctgctgctgaaagtggccggctttaacctgctgatgaccctgcggctgtggtccagcagggccaagcgatctggatctggagcaacaaacttctcactactcaaacaagcaggtgacgtggaggagaatcccgggcctactagtgccaccatggactggatttggcgcatccttttccttgtcggcgctgctaccggcgcccattccgggcccgaagtgcaactggttgaatccggtggcggcctggtgcaagcaggcggatctctcagacttagctgtgccgcctccggcagaaccttcacaatgggatggtttaggcaggctccagggaaagagagagagttcgtcgccgccatctctctgtctcccacactggcctactacgccgactctgtgaaaggccggttcaccatctccagagataatgccaagaacaccgtggtgctgcaaatgaactctctgaaacccgaggatacagccctgtactattgtgccgctgaccggaagtccgtgatgagcatcagacccgattactggggacagggcacacaagtcacagtgtcctctggatccggcggcggaggatctggcggaggcggatctgggggcggaggctctttcgaagaagtccaacttgtggagtctggagggggcctggtgcagcccggcggctctctcagactgtcttgtgcggcaagcggctacaccttcacctcttactggatagaatgggtgaggcaggcacctggaaagggactggagtggattggagagattctgccaggagggggagatacaaattacaatgaaatcttcaaggggcgggccaccttttcagcggataccagcaagaatacagcttacctgcagatgaatagcctccgggcagaagataccgctgtttattattgcacgagacgggtgccaataagactggactattgggggcaagggactcttgtcaccgtcagttcaacgcgtatccagaaccctgatcctgccgtgtaccagctgcgggatagcaagagcagcgacaagagcgtgtgtctgttcaccgacttcgacagccagaccaacgtgtcccagagcaaggactccgacgtgtacatcaccgataagtgcgtgctggacatgcggagcatggacttcaagagcaactccgccgtggcctggtccaacaagtccgatttcgcctgcgccaacgccttcaacaacagcattatccccgaggacacattcttcccaagccccgagagcagctgcggctttaccagcgagagctaccagcagggcgtgctgagcgccaccatcctgtacgagatcctgctgggcaaggccaccctgtacgccgtgctggtgtctgccctggtgctgatggctatggtcaagcggaaggacagccggggacgcgccaagagaagcggatctggcgtgaagcagaccctgaatttcgacctgctgaagctggctggcgacgtggaatccaacccaggcccttctagaggccatatgaccgagtacaagcccacggtgcgcctcgccacccgcgacgacgtccccagggccgtacgcaccctcgccgccgcgttcgccgactaccccgccacgcgccacaccgtcgatccggaccgccacatcgagcgggtcaccgagctgcaagaactcttcctcacgcgcgtcgggctcgacatcggcaaggtgtgggtcgcggacgacggcgccgcggtggcggtctggaccacgccggagagcgtcgaagcgggggcggtgttcgccgagatcggcccgcgcatggccgagttgagcggttcccggctggccgcgcagcaacagatggaaggcctcctggcgccgcaccggcccaaggagcccgcgtggttcctggccaccgtcggcgtctcgcccgaccaccagggcaagggtctgggcagcgccgtcgtgctccccggagtggaggcggccgagcgcgccggggtgcccgccttcctggagacctccgcgccccgcaacctccccttctacgagcggctcggcttcaccgtcaccgccgacgtcgaggtgcccgaaggaccgcgcacctggtgcatgacccgcaagcccggtgcctga

SEQ ID NO: 38011 - DNA, 2310 bp, synthetic construct
  source 1..2310: mol_type = other DNA
atggccttaccagtgaccgccttgctcctgccgctggccttgctgctccacgccgccaggccggaagtgcagctggttgaatctggcggaggactggttcagcctggcggatctctgagactgtcttgtgccgcctctggcttcgccagcgactactatatcatcggctggttcagacaggcccctggcaaagagagagagggcgtcagctgtatcagcagcagatacgccaacaccaactacgccgacagcgtgaagggcagattcaccatcagccgggacaacgccaagaacaccgtgtacctccagatgaacagcctgaagcctgaggacaccgccgtgtactactgtgccgccgacaccagaagatacacctgtcctgacattgccaccatgcaccggaacttcgattcttggggccagggcacactggtcaccgtttcttctggtaccggcggaggcggatctggcggcggaggtagcggtggcggaggatctgaattcgacatccagttgacccagtcccccagctcactcagcgccagtgtgggggaccgggtgaccattacctgtaaagccagtcagagtgtggactatgagggggatagcttcctgaattggtatcagcagaagcctggcaaagccccaaagctgctgatctacgctgcatctaatctggagtcaggcgtgccttctaggttctccggtagtgggtctgggaccgatttcacattgaccatttcatccctccaacccgaggatttcgctacatattactgtcagcagtccaatgaggaccctctcacctttggccagggcaccaaagttgaaattaagagactcgaggacctgaagaacgtgttcccacctgaggtggccgtgttcgagcctagcgaggccgagatcagccacacccagaaagccaccctcgtgtgcctggctaccggcttctaccccgaccatgtggaactgtcttggtgggtcaacggcaaagaggtgcacagcggcgtgtgtaccgacccccagccactgaaagaacagcccgccctgaacgacagccggtactgcctgagcagcagactgagagtgtccgccaccttctggcagaacccccggaaccacttcagatgccaggtgcagttctacggcctgagcgagaacgacgagtggacccaggacagagccaagcccgtgacccagatcgtgtctgccgaagcctggggcagagccgattgcgacgtgaagctggtggaaaagagcttcgagacagacaccaacctgaacttccagaacctgagcgtgatcggcttcagaatcctgctgctgaaagtggccggctttaacctgctgatgaccctgcggctgtggtccagcagggccaagcgatctggatctggagcaacaaacttctcactactcaaacaagcaggtgacgtggaggagaatcccgggcctactagtatggactggatttggcgcatccttttccttgtcggcgctgctaccggcgcgcattccttcgaagaagtccaacttgtggagtctggagggggcctggtgcagcccggcggctctctcagactgtcttgtgcggcaagcggctacaccttcacctcttactggatagaatgggtgaggcaggcacctggaaagggactggagtggattggagagattctgccaggagggggagatacaaattacaatgaaatcttcaaggggcgggccaccttttcagcggataccagcaagaatacagcttacctgcagatgaatagcctccgggcagaagataccgctgtttattattgcacgagacgggtgccaataagactggactattgggggcaagggactcttgtcaccgtcagttcaacgcgtatccagaaccctgatcctgccgtgtaccagctgcgggatagcaagagcagcgacaagagcgtgtgtctgttcaccgacttcgacagccagaccaacgtgtcccagagcaaggactccgacgtgtacatcaccgataagtgcgtgctggacatgcggagcatggacttcaagagcaactccgccgtggcctggtccaacaagtccgatttcgcctgcgccaacgccttcaacaacagcattatccccgaggacacattcttcccaagccccgagagcagctgcggctttaccagcgagagctaccagcagggcgtgctgagcgccaccatcctgtacgagatcctgctgggcaaggccaccctgtacgccgtgctggtgtctgccctggtgctgatggctatggtcaagcggaaggacagccggggataa

SEQ ID NO: 38012 - DNA, 2310 bp, synthetic construct
  source 1..2310: mol_type = other DNA
atggccttaccagtgaccgccttgctcctgccgctggccttgctgctccacgccgccaggccggaagtgcagctggttgaatctggcggaggactggttcagcctggcggatctctgagactgagctgtgaagccagcggcttcgccagcgacgattacatcatcggctggttcagacaggcccctggcaaagagagagagggcgtcagctgcatcagctctaagtacgccaacaccgtgtacaccgacagcgtgaagggcagattcagactgagcagaggcaccgccaagaataccgtgtacctccagatgagcgccctgaagcctgaggataccgccgtgtactactgcgctatggacagccgcagagtgacatgccctgagatcagcaccatgcaccggaacttcgattcttggggccagggcacactggtcacagtgtcatctggtaccggcggaggcggatctggcggcggaggtagcggtggcggaggatctgaattcgacatccagttgacccagtcccccagctcactcagcgccagtgtgggggaccgggtgaccattacctgtaaagccagtcagagtgtggactatgagggggatagcttcctgaattggtatcagcagaagcctggcaaagccccaaagctgctgatctacgctgcatctaatctggagtcaggcgtgccttctaggttctccggtagtgggtctgggaccgatttcacattgaccatttcatccctccaacccgaggatttcgctacatattactgtcagcagtccaatgaggaccctctcacctttggccagggcaccaaagttgaaattaagagactcgaggacctgaagaacgtgttcccacctgaggtggccgtgttcgagcctagcgaggccgagatcagccacacccagaaagccaccctcgtgtgcctggctaccggcttctaccccgaccatgtggaactgtcttggtgggtcaacggcaaagaggtgcacagcggcgtgtgtaccgacccccagccactgaaagaacagcccgccctgaacgacagccggtactgcctgagcagcagactgagagtgtccgccaccttctggcagaacccccggaaccacttcagatgccaggtgcagttctacggcctgagcgagaacgacgagtggacccaggacagagccaagcccgtgacccagatcgtgtctgccgaagcctggggcagagccgattgcgacgtgaagctggtggaaaagagcttcgagacagacaccaacctgaacttccagaacctgagcgtgatcggcttcagaatcctgctgctgaaagtggccggctttaacctgctgatgaccctgcggctgtggtccagcagggccaagcgatctggatctggagcaacaaacttctcactactcaaacaagcaggtgacgtggaggagaatcccgggcctactagtatggactggatttggcgcatccttttccttgtcggcgctgctaccggcgcgcattccttcgaagaagtccaacttgtggagtctggagggggcctggtgcagcccggcggctctctcagactgtcttgtgcggcaagcggctacaccttcacctcttactggatagaatgggtgaggcaggcacctggaaagggactggagtggattggagagattctgccaggagggggagatacaaattacaatgaaatcttcaaggggcgggccaccttttcagcggataccagcaagaatacagcttacctgcagatgaatagcctccgggcagaagataccgctgtttattattgcacgagacgggtgccaataagactggactattgggggcaagggactcttgtcaccgtcagttcaacgcgtatccagaaccctgatcctgccgtgtaccagctgcgggatagcaagagcagcgacaagagcgtgtgtctgttcaccgacttcgacagccagaccaacgtgtcccagagcaaggactccgacgtgtacatcaccgataagtgcgtgctggacatgcggagcatggacttcaagagcaactccgccgtggcctggtccaacaagtccgatttcgcctgcgccaacgccttcaacaacagcattatccccgaggacacattcttcccaagccccgagagcagctgcggctttaccagcgagagctaccagcagggcgtgctgagcgccaccatcctgtacgagatcctgctgggcaaggccaccctgtacgccgtgctggtgtctgccctggtgctgatggctatggtcaagcggaaggacagccggggataa

SEQ ID NO: 38013 - DNA, 2307 bp, synthetic construct
  source 1..2307: mol_type = other DNA
atggccttaccagtgaccgccttgctcctgccgctggccttgctgctccacgccgccaggccggaagtgcagctggttgaatctggcggaggactggttcagcctggcggatctctgagactgtcttgtgccgcctctggcttcgccagcgactactatatcatcggctggttcagacaggcccctggcaaagagagagagggcgtcagctgtatcagcagcagatacgccaacaccaactacgccgacagcgtgaagggcagattcaccatcagccgggacaacgccaagaacaccgtgtacctccagatgaacagcctgaagcctgaggacaccgccgtgtactactgtgccgccgacaccagaagatacacctgtcctgacattgccaccatgcaccggaacttcgattcttggggccagggcacactggtcaccgtttcttctggtaccggcggaggcggatctggcggcggaggtagcggtggcggaggatctgaattcgacatccagttgacccagtcccccagctcactcagcgccagtgtgggggaccgggtgaccattacctgtaaagccagtcagagtgtggactatgagggggatagcttcctgaattggtatcagcagaagcctggcaaagccccaaagctgctgatctacgctgcatctaatctggagtcaggcgtgccttctaggttctccggtagtgggtctgggaccgatttcacattgaccatttcatccctccaacccgaggatttcgctacatattactgtcagcagtccaatgaggaccctctcacctttggccagggcaccaaagttgaaattaagagactcgagatccagaaccctgatcctgccgtgtaccagctgcgggatagcaagagcagcgacaagagcgtgtgtctgttcaccgacttcgacagccagaccaacgtgtcccagagcaaggactccgacgtgtacatcaccgataagtgcgtgctggacatgcggagcatggacttcaagagcaactccgccgtggcctggtccaacaagtccgatttcgcctgcgccaacgccttcaacaacagcattatccccgaggacacattcttcccaagccccgagagcagctgcggctttaccagcgagagctaccagcagggcgtgctgagcgccaccatcctgtacgagatcctgctgggcaaggccaccctgtacgccgtgctggtgtctgccctggtgctgatggctatggtcaagcggaaggacagccggggaagggccaagcgatctggatctggagcaacaaacttctcactactcaaacaagcaggtgacgtggaggagaatcccgggcctactagtatggactggatttggcgcatccttttccttgtcggcgctgctaccggcgcgcattccttcgaagaagtccaacttgtggagtctggagggggcctggtgcagcccggcggctctctcagactgtcttgtgcggcaagcggctacaccttcacctcttactggatagaatgggtgaggcaggcacctggaaagggactggagtggattggagagattctgccaggagggggagatacaaattacaatgaaatcttcaaggggcgggccaccttttcagcggataccagcaagaatacagcttacctgcagatgaatagcctccgggcagaagataccgctgtttattattgcacgagacgggtgccaataagactggactattgggggcaagggactcttgtcaccgtcagttcaacgcgtgacctgaagaacgtgttcccacctgaggtggccgtgttcgagcctagcgaggccgagatcagccacacccagaaagccaccctcgtgtgcctggctaccggcttctaccccgaccatgtggaactgtcttggtgggtcaacggcaaagaggtgcacagcggcgtgtgtaccgacccccagccactgaaagaacagcccgccctgaacgacagccggtactgcctgagcagcagactgagagtgtccgccaccttctggcagaacccccggaaccacttcagatgccaggtgcagttctacggcctgagcgagaacgacgagtggacccaggacagagccaagcccgtgacccagatcgtgtctgccgaagcctggggcagagccgattgcgacgtgaagctggtggaaaagagcttcgagacagacaccaacctgaacttccagaacctgagcgtgatcggcttcagaatcctgctgctgaaagtggccggctttaacctgctgatgaccctgcggctgtggtccagc

SEQ ID NO: 38014 - DNA, 2307 bp, synthetic construct
  source 1..2307: mol_type = other DNA
atggccttaccagtgaccgccttgctcctgccgctggccttgctgctccacgccgccaggccggaagtgcagctggttgaatctggcggaggactggttcagcctggcggatctctgagactgagctgtgaagccagcggcttcgccagcgacgattacatcatcggctggttcagacaggcccctggcaaagagagagagggcgtcagctgcatcagctctaagtacgccaacaccgtgtacaccgacagcgtgaagggcagattcagactgagcagaggcaccgccaagaataccgtgtacctccagatgagcgccctgaagcctgaggataccgccgtgtactactgcgctatggacagccgcagagtgacatgccctgagatcagcaccatgcaccggaacttcgattcttggggccagggcacactggtcacagtgtcatctggtaccggcggaggcggatctggcggcggaggtagcggtggcggaggatctgaattcgacatccagttgacccagtcccccagctcactcagcgccagtgtgggggaccgggtgaccattacctgtaaagccagtcagagtgtggactatgagggggatagcttcctgaattggtatcagcagaagcctggcaaagccccaaagctgctgatctacgctgcatctaatctggagtcaggcgtgccttctaggttctccggtagtgggtctgggaccgatttcacattgaccatttcatccctccaacccgaggatttcgctacatattactgtcagcagtccaatgaggaccctctcacctttggccagggcaccaaagttgaaattaagagactcgagatccagaaccctgatcctgccgtgtaccagctgcgggatagcaagagcagcgacaagagcgtgtgtctgttcaccgacttcgacagccagaccaacgtgtcccagagcaaggactccgacgtgtacatcaccgataagtgcgtgctggacatgcggagcatggacttcaagagcaactccgccgtggcctggtccaacaagtccgatttcgcctgcgccaacgccttcaacaacagcattatccccgaggacacattcttcccaagccccgagagcagctgcggctttaccagcgagagctaccagcagggcgtgctgagcgccaccatcctgtacgagatcctgctgggcaaggccaccctgtacgccgtgctggtgtctgccctggtgctgatggctatggtcaagcggaaggacagccggggaagggccaagcgatctggatctggagcaacaaacttctcactactcaaacaagcaggtgacgtggaggagaatcccgggcctactagtatggactggatttggcgcatccttttccttgtcggcgctgctaccggcgcgcattccttcgaagaagtccaacttgtggagtctggagggggcctggtgcagcccggcggctctctcagactgtcttgtgcggcaagcggctacaccttcacctcttactggatagaatgggtgaggcaggcacctggaaagggactggagtggattggagagattctgccaggagggggagatacaaattacaatgaaatcttcaaggggcgggccaccttttcagcggataccagcaagaatacagcttacctgcagatgaatagcctccgggcagaagataccgctgtttattattgcacgagacgggtgccaataagactggactattgggggcaagggactcttgtcaccgtcagttcaacgcgtgacctgaagaacgtgttcccacctgaggtggccgtgttcgagcctagcgaggccgagatcagccacacccagaaagccaccctcgtgtgcctggctaccggcttctaccccgaccatgtggaactgtcttggtgggtcaacggcaaagaggtgcacagcggcgtgtgtaccgacccccagccactgaaagaacagcccgccctgaacgacagccggtactgcctgagcagcagactgagagtgtccgccaccttctggcagaacccccggaaccacttcagatgccaggtgcagttctacggcctgagcgagaacgacgagtggacccaggacagagccaagcccgtgacccagatcgtgtctgccgaagcctggggcagagccgattgcgacgtgaagctggtggaaaagagcttcgagacagacaccaacctgaacttccagaacctgagcgtgatcggcttcagaatcctgctgctgaaagtggccggctttaacctgctgatgaccctgcggctgtggtccagc

SEQ ID NO: 38015 - DNA, 2280 bp, synthetic construct
  source 1..2280: mol_type = other DNA
atggccttaccagtgaccgccttgctcctgccgctggccttgctgctccacgccgccaggccgcaagtcaaactggaagaaagcggtggcggcctggtgcaacctggcgaatctctgagactgagctgtagcgccagcggctccatcttcaaggtgttcagagtgttcgccatgagctggtacaggcaaggccctggcaagcagagagagctggtcgcctctatcagcagcggcgagacaaccacatacgccgaatctgtgaaaggccggttcaccatcagccgggataatgccaagaataccgcctatctccagatggactccctgaagcctgaagatacagctgtgtactactgcaacgccgaccataccttcaccggcgatttttggggccagggaacccaagtgaccgtgtctagtggtaccggcggaggcggatctggcggcggaggtagcggtggcggaggatctgaattcgacatccagttgacccagtcccccagctcactcagcgccagtgtgggggaccgggtgaccattacctgtaaagccagtcagagtgtggactatgagggggatagcttcctgaattggtatcagcagaagcctggcaaagccccaaagctgctgatctacgctgcatctaatctggagtcaggcgtgccttctaggttctccggtagtgggtctgggaccgatttcacattgaccatttcatccctccaacccgaggatttcgctacatattactgtcagcagtccaatgaggaccctctcacctttggccagggcaccaaagttgaaattaagagactcgagatccagaaccctgatcctgccgtgtaccagctgcgggatagcaagagcagcgacaagagcgtgtgtctgttcaccgacttcgacagccagaccaacgtgtcccagagcaaggactccgacgtgtacatcaccgataagtgcgtgctggacatgcggagcatggacttcaagagcaactccgccgtggcctggtccaacaagtccgatttcgcctgcgccaacgccttcaacaacagcattatccccgaggacacattcttcccaagccccgagagcagctgcggctttaccagcgagagctaccagcagggcgtgctgagcgccaccatcctgtacgagatcctgctgggcaaggccaccctgtacgccgtgctggtgtctgccctggtgctgatggctatggtcaagcggaaggacagccggggaagggccaagcgatctggatctggagcaacaaacttctcactactcaaacaagcaggtgacgtggaggagaatcccgggcctactagtatggactggatttggcgcatccttttccttgtcggcgctgctaccggcgcgcattccttcgaagaagtccaacttgtggagtctggagggggcctggtgcagcccggcggctctctcagactgtcttgtgcggcaagcggctacaccttcacctcttactggatagaatgggtgaggcaggcacctggaaagggactggagtggattggagagattctgccaggagggggagatacaaattacaatgaaatcttcaaggggcgggccaccttttcagcggataccagcaagaatacagcttacctgcagatgaatagcctccgggcagaagataccgctgtttattattgcacgagacgggtgccaataagactggactattgggggcaagggactcttgtcaccgtcagttcaacgcgtgacctgaagaacgtgttcccacctgaggtggccgtgttcgagcctagcgaggccgagatcagccacacccagaaagccaccctcgtgtgcctggctaccggcttctaccccgaccatgtggaactgtcttggtgggtcaacggcaaagaggtgcacagcggcgtgtgtaccgacccccagccactgaaagaacagcccgccctgaacgacagccggtactgcctgagcagcagactgagagtgtccgccaccttctggcagaacccccggaaccacttcagatgccaggtgcagttctacggcctgagcgagaacgacgagtggacccaggacagagccaagcccgtgacccagatcgtgtctgccgaagcctggggcagagccgattgcgacgtgaagctggtggaaaagagcttcgagacagacaccaacctgaacttccagaacctgagcgtgatcggcttcagaatcctgctgctgaaagtggccggctttaacctgctgatgaccctgcggctgtggtccagc

SEQ ID NO: 38016 - DNA, 2286 bp, synthetic construct
  source 1..2286: mol_type = other DNA
atggccttaccagtgaccgccttgctcctgccgctggccttgctgctccacgccgccaggccggacatccagttgacccagtcccccagctcactcagcgccagtgtgggggaccgggtgaccattacctgtaaagccagtcagagtgtggactatgagggggatagcttcctgaattggtatcagcagaagcctggcaaagccccaaagctgctgatctacgctgcatctaatctggagtcaggcgtgccttctaggttctccggtagtgggtctgggaccgatttcacattgaccatttcatccctccaacccgaggatttcgctacatattactgtcagcagtccaatgaggaccctctcacctttggccagggcaccaaagttgaaattaagagactcgaggacctgaagaacgtgttcccacctgaggtggccgtgttcgagcctagcgaggccgagatcagccacacccagaaagccaccctcgtgtgcctggctaccggcttctaccccgaccatgtggaactgtcttggtgggtcaacggcaaagaggtgcacagcggcgtgtgtaccgacccccagccactgaaagaacagcccgccctgaacgacagccggtactgcctgagcagcagactgagagtgtccgccaccttctggcagaacccccggaaccacttcagatgccaggtgcagttctacggcctgagcgagaacgacgagtggacccaggacagagccaagcccgtgacccagatcgtgtctgccgaagcctggggcagagccgattgcgacgtgaagctggtggaaaagagcttcgagacagacaccaacctgaacttccagaacctgagcgtgatcggcttcagaatcctgctgctgaaagtggccggctttaacctgctgatgaccctgcggctgtggtccagcagggccaagcgatctggatctggagcaacaaacttctcactactcaaacaagcaggtgacgtggaggagaatcccgggcctactagtgccaccatggactggatttggcgcatccttttccttgtcggcgctgctaccggcgcccattccgggcccgaagtgcagctggttgaatctggcggaggactggttcaggctggcggatctctgagactgtcttgtgccgccagcggcagaacctttagcatgggctggtttagacaggcccctggcaaagagagagagttcgtcgccgccatcacatactctggcggcagcccttactacgccgactctgtgaagggcagattcaccatcagccgggacaacgccaagaacaccgtgtacctccagatgaacagcctgaagcctgaggacaccgccgtgtactactgcgccgccaatccaacatacggcagcgactggaacgccgagaattggggccagggaacccaagtgacagtgtctagcggatccggcggcggaggatctggcggaggcggatctgggggcggaggctctttcgaagaagtccaacttgtggagtctggagggggcctggtgcagcccggcggctctctcagactgtcttgtgcggcaagcggctacaccttcacctcttactggatagaatgggtgaggcaggcacctggaaagggactggagtggattggagagattctgccaggagggggagatacaaattacaatgaaatcttcaaggggcgggccaccttttcagcggataccagcaagaatacagcttacctgcagatgaatagcctccgggcagaagataccgctgtttattattgcacgagacgggtgccaataagactggactattgggggcaagggactcttgtcaccgtcagttcaacgcgtatccagaaccctgatcctgccgtgtaccagctgcgggatagcaagagcagcgacaagagcgtgtgtctgttcaccgacttcgacagccagaccaacgtgtcccagagcaaggactccgacgtgtacatcaccgataagtgcgtgctggacatgcggagcatggacttcaagagcaactccgccgtggcctggtccaacaagtccgatttcgcctgcgccaacgccttcaacaacagcattatccccgaggacacattcttcccaagccccgagagcagctgcggctttaccagcgagagctaccagcagggcgtgctgagcgccaccatcctgtacgagatcctgctgggcaaggccaccctgtacgccgtgctggtgtctgccctggtgctgatggctatggtcaagcggaaggacagccggggataa

SEQ ID NO: 38017 - DNA, 2289 bp, synthetic construct
  source 1..2289: mol_type = other DNA
atggccttaccagtgaccgccttgctcctgccgctggccttgctgctccacgccgccaggccggacatccagttgacccagtcccccagctcactcagcgccagtgtgggggaccgggtgaccattacctgtaaagccagtcagagtgtggactatgagggggatagcttcctgaattggtatcagcagaagcctggcaaagccccaaagctgctgatctacgctgcatctaatctggagtcaggcgtgccttctaggttctccggtagtgggtctgggaccgatttcacattgaccatttcatccctccaacccgaggatttcgctacatattactgtcagcagtccaatgaggaccctctcacctttggccagggcaccaaagttgaaattaagagactcgaggacctgaagaacgtgttcccacctgaggtggccgtgttcgagcctagcgaggccgagatcagccacacccagaaagccaccctcgtgtgcctggctaccggcttctaccccgaccatgtggaactgtcttggtgggtcaacggcaaagaggtgcacagcggcgtgtgtaccgacccccagccactgaaagaacagcccgccctgaacgacagccggtactgcctgagcagcagactgagagtgtccgccaccttctggcagaacccccggaaccacttcagatgccaggtgcagttctacggcctgagcgagaacgacgagtggacccaggacagagccaagcccgtgacccagatcgtgtctgccgaagcctggggcagagccgattgcgacgtgaagctggtggaaaagagcttcgagacagacaccaacctgaacttccagaacctgagcgtgatcggcttcagaatcctgctgctgaaagtggccggctttaacctgctgatgaccctgcggctgtggtccagcagggccaagcgatctggatctggagcaacaaacttctcactactcaaacaagcaggtgacgtggaggagaatcccgggcctactagtgccaccatggactggatttggcgcatccttttccttgtcggcgctgctaccggcgcccattccgggcccgaagtgcaactggtggaatctgggggcggactggtgcagccaggcggaagtctgaggctgtcttgtgccgcctccggcagcatcttcggcttcaacgacatggcctggtatcggcaggctcccggaaaacagcgcgagctggtggctctgattagcagagtgggcgtgaccagcagcgccgactctgtgaagggcagattcacaatctccagagtgaacgccaaggatacagtgtacctccagatgaactctctgaaacctgaggatacagcagtgtactattgctacatggaccagcggctggacggcagcacactggcctactggggacagggaactcaagtgacagtgtctagcggatccggcggcggaggatctggcggaggcggatctgggggcggaggctctttcgaagaagtccaacttgtggagtctggagggggcctggtgcagcccggcggctctctcagactgtcttgtgcggcaagcggctacaccttcacctcttactggatagaatgggtgaggcaggcacctggaaagggactggagtggattggagagattctgccaggagggggagatacaaattacaatgaaatcttcaaggggcgggccaccttttcagcggataccagcaagaatacagcttacctgcagatgaatagcctccgggcagaagataccgctgtttattattgcacgagacgggtgccaataagactggactattgggggcaagggactcttgtcaccgtcagttcaacgcgtatccagaaccctgatcctgccgtgtaccagctgcgggatagcaagagcagcgacaagagcgtgtgtctgttcaccgacttcgacagccagaccaacgtgtcccagagcaaggactccgacgtgtacatcaccgataagtgcgtgctggacatgcggagcatggacttcaagagcaactccgccgtggcctggtccaacaagtccgatttcgcctgcgccaacgccttcaacaacagcattatccccgaggacacattcttcccaagccccgagagcagctgcggctttaccagcgagagctaccagcagggcgtgctgagcgccaccatcctgtacgagatcctgctgggcaaggccaccctgtacgccgtgctggtgtctgccctggtgctgatggctatggtcaagcggaaggacagccggggataa

SEQ ID NO: 38018 - DNA, 2277 bp, synthetic construct
  source 1..2277: mol_type = other DNA
atggccttaccagtgaccgccttgctcctgccgctggccttgctgctccacgccgccaggccggacatccagttgacccagtcccccagctcactcagcgccagtgtgggggaccgggtgaccattacctgtaaagccagtcagagtgtggactatgagggggatagcttcctgaattggtatcagcagaagcctggcaaagccccaaagctgctgatctacgctgcatctaatctggagtcaggcgtgccttctaggttctccggtagtgggtctgggaccgatttcacattgaccatttcatccctccaacccgaggatttcgctacatattactgtcagcagtccaatgaggaccctctcacctttggccagggcaccaaagttgaaattaagagactcgaggacctgaagaacgtgttcccacctgaggtggccgtgttcgagcctagcgaggccgagatcagccacacccagaaagccaccctcgtgtgcctggctaccggcttctaccccgaccatgtggaactgtcttggtgggtcaacggcaaagaggtgcacagcggcgtgtgtaccgacccccagccactgaaagaacagcccgccctgaacgacagccggtactgcctgagcagcagactgagagtgtccgccaccttctggcagaacccccggaaccacttcagatgccaggtgcagttctacggcctgagcgagaacgacgagtggacccaggacagagccaagcccgtgacccagatcgtgtctgccgaagcctggggcagagccgattgcgacgtgaagctggtggaaaagagcttcgagacagacaccaacctgaacttccagaacctgagcgtgatcggcttcagaatcctgctgctgaaagtggccggctttaacctgctgatgaccctgcggctgtggtccagcagggccaagcgatctggatctggagcaacaaacttctcactactcaaacaagcaggtgacgtggaggagaatcccgggcctactagtgccaccatggactggatttggcgcatccttttccttgtcggcgctgctaccggcgcccattccgggcccgaggtgcagctggttgaatctggcggaggactggttcaggctggcggatctctgagactgtcttgtgccgccagcggctctgtgttcagcggcaatgtgatgggctggtacagacaggcccctggcaaagaaagagagtgggttgccgccattgccagcggcggcagcatctactacagagactctgtgaagggcagattcaccatcagccgggacaacgccaagaacaccgtgtacctccagatgaacagcctgaagcctgaggacaccgccgtgtactactgcaactctcaccctcctacactgccctattggggcctgggaacccaagtgacagtgtcctctggatccggcggcggaggatctggcggaggcggatctgggggcggaggctctttcgaagaagtccaacttgtggagtctggagggggcctggtgcagcccggcggctctctcagactgtcttgtgcggcaagcggctacaccttcacctcttactggatagaatgggtgaggcaggcacctggaaagggactggagtggattggagagattctgccaggagggggagatacaaattacaatgaaatcttcaaggggcgggccaccttttcagcggataccagcaagaatacagcttacctgcagatgaatagcctccgggcagaagataccgctgtttattattgcacgagacgggtgccaataagactggactattgggggcaagggactcttgtcaccgtcagttcaacgcgtatccagaaccctgatcctgccgtgtaccagctgcgggatagcaagagcagcgacaagagcgtgtgtctgttcaccgacttcgacagccagaccaacgtgtcccagagcaaggactccgacgtgtacatcaccgataagtgcgtgctggacatgcggagcatggacttcaagagcaactccgccgtggcctggtccaacaagtccgatttcgcctgcgccaacgccttcaacaacagcattatccccgaggacacattcttcccaagccccgagagcagctgcggctttaccagcgagagctaccagcagggcgtgctgagcgccaccatcctgtacgagatcctgctgggcaaggccaccctgtacgccgtgctggtgtctgccctggtgctgatggctatggtcaagcggaaggacagccggggataa

SEQ ID NO: 38019 - DNA, 2271 bp, synthetic construct
  source 1..2271: mol_type = other DNA
atggccttaccagtgaccgccttgctcctgccgctggccttgctgctccacgccgccaggccggacatccagttgacccagtcccccagctcactcagcgccagtgtgggggaccgggtgaccattacctgtaaagccagtcagagtgtggactatgagggggatagcttcctgaattggtatcagcagaagcctggcaaagccccaaagctgctgatctacgctgcatctaatctggagtcaggcgtgccttctaggttctccggtagtgggtctgggaccgatttcacattgaccatttcatccctccaacccgaggatttcgctacatattactgtcagcagtccaatgaggaccctctcacctttggccagggcaccaaagttgaaattaagagactcgaggacctgaagaacgtgttcccacctgaggtggccgtgttcgagcctagcgaggccgagatcagccacacccagaaagccaccctcgtgtgcctggctaccggcttctaccccgaccatgtggaactgtcttggtgggtcaacggcaaagaggtgcacagcggcgtgtgtaccgacccccagccactgaaagaacagcccgccctgaacgacagccggtactgcctgagcagcagactgagagtgtccgccaccttctggcagaacccccggaaccacttcagatgccaggtgcagttctacggcctgagcgagaacgacgagtggacccaggacagagccaagcccgtgacccagatcgtgtctgccgaagcctggggcagagccgattgcgacgtgaagctggtggaaaagagcttcgagacagacaccaacctgaacttccagaacctgagcgtgatcggcttcagaatcctgctgctgaaagtggccggctttaacctgctgatgaccctgcggctgtggtccagcagggccaagcgatctggatctggagcaacaaacttctcactactcaaacaagcaggtgacgtggaggagaatcccgggcctactagtgccaccatggactggatttggcgcatccttttccttgtcggcgctgctaccggcgcccattccgggcccgaagttcagctgctggaatctggcggaggactcgttcaacctggcggctctctgagactgagctgtgccgcttctggcttcagcttctctagctacgccctgagctgggttcgacaagctcccggaaagggccttgaatgggtgtccagcatcggcgagaatgacggcaccacagactatgccgatgccgtgaaaggccggtttaccatcagcagagacaattccaagaacacgctctatctgcaaatgaactccctgcgcgtggaagatacagccgtgtattattgcgtgaaggacggcatccactggggacagggaaccctggttacagtgtctagcggatccggcggcggaggatctggcggaggcggatctgggggcggaggctctttcgaagaagtccaacttgtggagtctggagggggcctggtgcagcccggcggctctctcagactgtcttgtgcggcaagcggctacaccttcacctcttactggatagaatgggtgaggcaggcacctggaaagggactggagtggattggagagattctgccaggagggggagatacaaattacaatgaaatcttcaaggggcgggccaccttttcagcggataccagcaagaatacagcttacctgcagatgaatagcctccgggcagaagataccgctgtttattattgcacgagacgggtgccaataagactggactattgggggcaagggactcttgtcaccgtcagttcaacgcgtatccagaaccctgatcctgccgtgtaccagctgcgggatagcaagagcagcgacaagagcgtgtgtctgttcaccgacttcgacagccagaccaacgtgtcccagagcaaggactccgacgtgtacatcaccgataagtgcgtgctggacatgcggagcatggacttcaagagcaactccgccgtggcctggtccaacaagtccgatttcgcctgcgccaacgccttcaacaacagcattatccccgaggacacattcttcccaagccccgagagcagctgcggctttaccagcgagagctaccagcagggcgtgctgagcgccaccatcctgtacgagatcctgctgggcaaggccaccctgtacgccgtgctggtgtctgccctggtgctgatggctatggtcaagcggaaggacagccggggataa

SEQ ID NO: 38020 - DNA, 3378 bp, synthetic construct
  source 1..3378: mol_type = other DNA
atgggacccagactgctgttttgggctctgctgtgtctgctcggcacaggacctgttgaagctggcgtgacacagagccccacacacctgattaagaccagaggccagcaggccacactgagatgcagccctatcagcggccacaccagcgtgtactggtatcagcaggctctcggactgggcctccagttcctgctttggtacgacgagggcgaagagagaaaccggggcaacttccctcctcggttttccggcagacagttccccaactacagcagcgagctgaacgtgaacgccctggaactggaagatagcgccctgtacctgtgtgcctcttctcttggtggacctcgcggactggctggactgagaggggatgagcagtttttcggccctggcaccagactgaccgtgctggaaggtaccggcggaggcggatctggcggcggagaattcgacatccagttgacccagtcccccagctcactcagcgccagtgtgggggaccgggtgaccattacctgtaaagccagtcagagtgtggactatgagggggatagcttcctgaattggtatcagcagaagcctggcaaagccccaaagctgctgatctacgctgcatctaatctggagtcaggcgtgccttctaggttctccggtagtgggtctgggaccgatttcacattgaccatttcatccctccaacccgaggatttcgctacatattactgtcagcagtccaatgaggaccctctcacctttggccagggcaccaaagttgaaattaagagactcgaggacctgaagaacgtgttcccacctgaggtggccgtgttcgagcctagcgaggccgagatcagccacacccagaaagccaccctcgtgtgcctggctaccggcttctaccccgaccatgtggaactgtcttggtgggtcaacggcaaagaggtgcacagcggcgtgtgtaccgacccccagccactgaaagaacagcccgccctgaacgacagccggtactgcctgagcagcagactgagagtgtccgccaccttctggcagaacccccggaaccacttcagatgccaggtgcagttctacggcctgagcgagaacgacgagtggacccaggacagagccaagcccgtgacccagatcgtgtctgccgaagcctggggcagagccgattgcgacgtgaagctggtggaaaagagcttcgagacagacaccaacctgaacttccagaacctgagcgtgatcggcttcagaatcctgctgctgaaagtggccggctttaacctgctgatgaccctgcggctgtggtccagcagggccaagcgatctggatctggagcaacaaacttctcactactcaaacaagcaggtgacgtggaggagaatcccgggcctactagtgccaccatggactggatttggcgcatccttttccttgtcggcgctgctaccggcgcccattccgggcccgaagtgcagctggttgaatctggcggaggactggttcaggctggcggatctctgagactgtcttgtgccgccagcggcagaacctttagcatgggctggtttagacaggcccctggcaaagagagagagttcgtcgccgccatcacatactctggcggcagcccttactacgccgactctgtgaagggcagattcaccatcagccgggacaacgccaagaacaccgtgtacctccagatgaacagcctgaagcctgaggacaccgccgtgtactactgcgccgccaatccaacatacggcagcgactggaacgccgagaattggggccagggaacccaagtgacagtgtctagcggatccggcggcggaggatctggcggaggcggatctgggggcggaggctctttcgaagaagtccaacttgtggagtctggagggggcctggtgcagcccggcggctctctcagactgtcttgtgcggcaagcggctacaccttcacctcttactggatagaatgggtgaggcaggcacctggaaagggactggagtggattggagagattctgccaggagggggagatacaaattacaatgaaatcttcaaggggcgggccaccttttcagcggataccagcaagaatacagcttacctgcagatgaatagcctccgggcagaagataccgctgtttattattgcacgagacgggtgccaataagactggactattgggggcaagggactcttgtcaccgtcagttcaacgcgtatccagaaccctgatcctgccgtgtaccagctgcgggatagcaagagcagcgacaagagcgtgtgtctgttcaccgacttcgacagccagaccaacgtgtcccagagcaaggactccgacgtgtacatcaccgataagtgcgtgctggacatgcggagcatggacttcaagagcaactccgccgtggcctggtccaacaagtccgatttcgcctgcgccaacgccttcaacaacagcattatccccgaggacacattcttcccaagccccgagagcagctgcggctttaccagcgagagctaccagcagggcgtgctgagcgccaccatcctgtacgagatcctgctgggcaaggccaccctgtacgccgtgctggtgtctgccctggtgctgatggctatggtcaagcggaaggacagccggggacgcgccaagagaagcggatctggcgtgaagcagaccctgaatttcgacctgctgaagctggctggcgacgtggaatccaacccaggcccttctagaggccatatgaccgagtacaagcccacggtgcgcctcgccacccgcgacgacgtccccagggccgtacgcaccctcgccgccgcgttcgccgactaccccgccacgcgccacaccgtcgatccggaccgccacatcgagcgggtcaccgagctgcaagaactcttcctcacgcgcgtcgggctcgacatcggcaaggtgtgggtcgcggacgacggcgccgcggtggcggtctggaccacgccggagagcgtcgaagcgggggcggtgttcgccgagatcggcccgcgcatggccgagttgagcggttcccggctggccgcgcagcaacagatggaaggcctcctggcgccgcaccggcccaaggagcccgcgtggttcctggccaccgtcggcgtctcgcccgaccaccagggcaagggtctgggcagcgccgtcgtgctccccggagtggaggcggccgagcgcgccggggtgcccgccttcctggagacctccgcgccccgcaacctccccttctacgagcggctcggcttcaccgtcaccgccgacgtcgaggtgcccgaaggaccgcgcacctggtgcatgacccgcaagcccggtgcctga

SEQ ID NO: 38021 - DNA, 3375 bp, synthetic construct
  source 1..3375: mol_type = other DNA
atgggacccagactgctgttttgggctctgctgtgtctgctcggcacaggacctgttgaagctggcgtgacacagagccccacacacctgattaagaccagaggccagcaggccacactgagatgcagccctatcagcggccacaccagcgtgtactggtatcagcaggctctcggactgggcctccagttcctgctttggtacgacgagggcgaagagagaaaccggggcaacttccctcctcggttttccggcagacagttccccaactacagcagcgagctgaacgtgaacgccctggaactggaagatagcgccctgtacctgtgtgccagctctctcggcggagatgaactgggagccgatggcaacgagcagttctttggccctggcaccagactgaccgtgctggaaggtaccggcggaggcggatctggcggcggaagcgaattcgacatccagttgacccagtcccccagctcactcagcgccagtgtgggggaccgggtgaccattacctgtaaagccagtcagagtgtggactatgagggggatagcttcctgaattggtatcagcagaagcctggcaaagccccaaagctgctgatctacgctgcatctaatctggagtcaggcgtgccttctaggttctccggtagtgggtctgggaccgatttcacattgaccatttcatccctccaacccgaggatttcgctacatattactgtcagcagtccaatgaggaccctctcacctttggccagggcaccaaagttgaaattaagagactcgaggacctgaagaacgtgttcccacctgaggtggccgtgttcgagcctagcgaggccgagatcagccacacccagaaagccaccctcgtgtgcctggctaccggcttctaccccgaccatgtggaactgtcttggtgggtcaacggcaaagaggtgcacagcggcgtgtgtaccgacccccagccactgaaagaacagcccgccctgaacgacagccggtactgcctgagcagcagactgagagtgtccgccaccttctggcagaacccccggaaccacttcagatgccaggtgcagttctacggcctgagcgagaacgacgagtggacccaggacagagccaagcccgtgacccagatcgtgtctgccgaagcctggggcagagccgattgcgacgtgaagctggtggaaaagagcttcgagacagacaccaacctgaacttccagaacctgagcgtgatcggcttcagaatcctgctgctgaaagtggccggctttaacctgctgatgaccctgcggctgtggtccagcagggccaagcgatctggatctggagcaacaaacttctcactactcaaacaagcaggtgacgtggaggagaatcccgggcctactagtgccaccatggactggatttggcgcatccttttccttgtcggcgctgctaccggcgcccattccgggcccgaagtgcagctggttgaatctggcggaggactggttcaggctggcggatctctgagactgtcttgtgccgccagcggcagaacctttagcatgggctggtttagacaggcccctggcaaagagagagagttcgtcgccgccatcacatactctggcggcagcccttactacgccgactctgtgaagggcagattcaccatcagccgggacaacgccaagaacaccgtgtacctccagatgaacagcctgaagcctgaggacaccgccgtgtactactgcgccgccaatccaacatacggcagcgactggaacgccgagaattggggccagggaacccaagtgacagtgtctagcggatccggcggcggaggatctggcggaggcggatctgggggcggaggctctttcgaagaagtccaacttgtggagtctggagggggcctggtgcagcccggcggctctctcagactgtcttgtgcggcaagcggctacaccttcacctcttactggatagaatgggtgaggcaggcacctggaaagggactggagtggattggagagattctgccaggagggggagatacaaattacaatgaaatcttcaaggggcgggccaccttttcagcggataccagcaagaatacagcttacctgcagatgaatagcctccgggcagaagataccgctgtttattattgcacgagacgggtgccaataagactggactattgggggcaagggactcttgtcaccgtcagttcaacgcgtatccagaaccctgatcctgccgtgtaccagctgcgggatagcaagagcagcgacaagagcgtgtgtctgttcaccgacttcgacagccagaccaacgtgtcccagagcaaggactccgacgtgtacatcaccgataagtgcgtgctggacatgcggagcatggacttcaagagcaactccgccgtggcctggtccaacaagtccgatttcgcctgcgccaacgccttcaacaacagcattatccccgaggacacattcttcccaagccccgagagcagctgcggctttaccagcgagagctaccagcagggcgtgctgagcgccaccatcctgtacgagatcctgctgggcaaggccaccctgtacgccgtgctggtgtctgccctggtgctgatggctatggtcaagcggaaggacagccggggacgcgccaagagaagcggatctggcgtgaagcagaccctgaatttcgacctgctgaagctggctggcgacgtggaatccaacccaggcccttctagaggccatatgaccgagtacaagcccacggtgcgcctcgccacccgcgacgacgtccccagggccgtacgcaccctcgccgccgcgttcgccgactaccccgccacgcgccacaccgtcgatccggaccgccacatcgagcgggtcaccgagctgcaagaactcttcctcacgcgcgtcgggctcgacatcggcaaggtgtgggtcgcggacgacggcgccgcggtggcggtctggaccacgccggagagcgtcgaagcgggggcggtgttcgccgagatcggcccgcgcatggccgagttgagcggttcccggctggccgcgcagcaacagatggaaggcctcctggcgccgcaccggcccaaggagcccgcgtggttcctggccaccgtcggcgtctcgcccgaccaccagggcaagggtctgggcagcgccgtcgtgctccccggagtggaggcggccgagcgcgccggggtgcccgccttcctggagacctccgcgccccgcaacctccccttctacgagcggctcggcttcaccgtcaccgccgacgtcgaggtgcccgaaggaccgcgcacctggtgcatgacccgcaagcccggtgcctga

SEQ ID NO: 38022 - DNA, 2850 bp, synthetic construct
  source 1..2850: mol_type = other DNA
atggccttaccagtgaccgccttgctcctgccgctggccttgctgctccacgccgccaggccggacatccagttgacccagtcccccagctcactcagcgccagtgtgggggaccgggtgaccattacctgtaaagccagtcagagtgtggactatgagggggatagcttcctgaattggtatcagcagaagcctggcaaagccccaaagctgctgatctacgctgcatctaatctggagtcaggcgtgccttctaggttctccggtagtgggtctgggaccgatttcacattgaccatttcatccctccaacccgaggatttcgctacatattactgtcagcagtccaatgaggaccctctcacctttggccagggcaccaaagttgaaattaagagactcgaggacctgaagaacgtgttcccacctgaggtggccgtgttcgagcctagcgaggccgagatcagccacacccagaaagccaccctcgtgtgcctggctaccggcttctaccccgaccatgtggaactgtcttggtgggtcaacggcaaagaggtgcacagcggcgtgtgtaccgacccccagccactgaaagaacagcccgccctgaacgacagccggtactgcctgagcagcagactgagagtgtccgccaccttctggcagaacccccggaaccacttcagatgccaggtgcagttctacggcctgagcgagaacgacgagtggacccaggacagagccaagcccgtgacccagatcgtgtctgccgaagcctggggcagagccgattgcgacgtgaagctggtggaaaagagcttcgagacagacaccaacctgaacttccagaacctgagcgtgatcggcttcagaatcctgctgctgaaagtggccggctttaacctgctgatgaccctgcggctgtggtccagcagggccaagcgatctggatctggagcaacaaacttctcactactcaaacaagcaggtgacgtggaggagaatcccgggcctactagtgccaccatggactggatttggcgcatccttttccttgtcggcgctgctaccggcgcccattccgggcccatgggaagctggcttgagttctaccacagactcaacgccattgacagcaggctgtgggcacttggcggaagcgaagctgaactcgccgcttttgaaaaagaaattgccgctttcgagtccgagcttcaggcttacaaaggcaaagggaatcctgaggtcgagagcctgagagatcacgctgcccacattagagagtggttgcaggcataccggcacaatggatccggcggcggaggatctggcggaggcggatctgggggcggaggctctttcgaagaagtccaacttgtggagtctggagggggcctggtgcagcccggcggctctctcagactgtcttgtgcggcaagcggctacaccttcacctcttactggatagaatgggtgaggcaggcacctggaaagggactggagtggattggagagattctgccaggagggggagatacaaattacaatgaaatcttcaaggggcgggccaccttttcagcggataccagcaagaatacagcttacctgcagatgaatagcctccgggcagaagataccgctgtttattattgcacgagacgggtgccaataagactggactattgggggcaagggactcttgtcaccgtcagttcaacgcgtatccagaaccctgatcctgccgtgtaccagctgcgggatagcaagagcagcgacaagagcgtgtgtctgttcaccgacttcgacagccagaccaacgtgtcccagagcaaggactccgacgtgtacatcaccgataagtgcgtgctggacatgcggagcatggacttcaagagcaactccgccgtggcctggtccaacaagtccgatttcgcctgcgccaacgccttcaacaacagcattatccccgaggacacattcttcccaagccccgagagcagctgcggctttaccagcgagagctaccagcagggcgtgctgagcgccaccatcctgtacgagatcctgctgggcaaggccaccctgtacgccgtgctggtgtctgccctggtgctgatggctatggtcaagcggaaggacagccggggacgcgccaagagaagcggatctggcgtgaagcagaccctgaatttcgacctgctgaagctggctggcgacgtggaatccaacccaggcccttctagaggccatatgaccgagtacaagcccacggtgcgcctcgccacccgcgacgacgtccccagggccgtacgcaccctcgccgccgcgttcgccgactaccccgccacgcgccacaccgtcgatccggaccgccacatcgagcgggtcaccgagctgcaagaactcttcctcacgcgcgtcgggctcgacatcggcaaggtgtgggtcgcggacgacggcgccgcggtggcggtctggaccacgccggagagcgtcgaagcgggggcggtgttcgccgagatcggcccgcgcatggccgagttgagcggttcccggctggccgcgcagcaacagatggaaggcctcctggcgccgcaccggcccaaggagcccgcgtggttcctggccaccgtcggcgtctcgcccgaccaccagggcaagggtctgggcagcgccgtcgtgctccccggagtggaggcggccgagcgcgccggggtgcccgccttcctggagacctccgcgccccgcaacctccccttctacgagcggctcggcttcaccgtcaccgccgacgtcgaggtgcccgaaggaccgcgcacctggtgcatgacccgcaagcccggtgcctga

SEQ ID NO: 38023 - DNA, 2850 bp, synthetic construct
  source 1..2850: mol_type = other DNA
atggccttaccagtgaccgccttgctcctgccgctggccttgctgctccacgccgccaggccggcatgcatgggcagttggttcgagttctacgaccggctgaatgccatcgacgccagactgtgggctctcggaggatctgaagctgagctggccgccttcgagaaagagatcgccgcctttgagagcgagctgcaagcctacaaaggcaagggcaaccccgaggtggaaaacctgagagtgcacgccgctgccatcagagaatggctccaggcttacagacacaacggtaccggcggaggcggatctggcggcggaggtagcggtggcggaggatctgaattcgacatccagttgacccagtcccccagctcactcagcgccagtgtgggggaccgggtgaccattacctgtaaagccagtcagagtgtggactatgagggggatagcttcctgaattggtatcagcagaagcctggcaaagccccaaagctgctgatctacgctgcatctaatctggagtcaggcgtgccttctaggttctccggtagtgggtctgggaccgatttcacattgaccatttcatccctccaacccgaggatttcgctacatattactgtcagcagtccaatgaggaccctctcacctttggccagggcaccaaagttgaaattaagagactcgaggacctgaagaacgtgttcccacctgaggtggccgtgttcgagcctagcgaggccgagatcagccacacccagaaagccaccctcgtgtgcctggctaccggcttctaccccgaccatgtggaactgtcttggtgggtcaacggcaaagaggtgcacagcggcgtgtgtaccgacccccagccactgaaagaacagcccgccctgaacgacagccggtactgcctgagcagcagactgagagtgtccgccaccttctggcagaacccccggaaccacttcagatgccaggtgcagttctacggcctgagcgagaacgacgagtggacccaggacagagccaagcccgtgacccagatcgtgtctgccgaagcctggggcagagccgattgcgacgtgaagctggtggaaaagagcttcgagacagacaccaacctgaacttccagaacctgagcgtgatcggcttcagaatcctgctgctgaaagtggccggctttaacctgctgatgaccctgcggctgtggtccagcagggccaagcgatctggatctggagcaacaaacttctcactactcaaacaagcaggtgacgtggaggagaatcccgggcctactagtatggactggatttggcgcatccttttccttgtcggcgctgctaccggcgcgcattccttcgaagaagtccaacttgtggagtctggagggggcctggtgcagcccggcggctctctcagactgtcttgtgcggcaagcggctacaccttcacctcttactggatagaatgggtgaggcaggcacctggaaagggactggagtggattggagagattctgccaggagggggagatacaaattacaatgaaatcttcaaggggcgggccaccttttcagcggataccagcaagaatacagcttacctgcagatgaatagcctccgggcagaagataccgctgtttattattgcacgagacgggtgccaataagactggactattgggggcaagggactcttgtcaccgtcagttcaacgcgtatccagaaccctgatcctgccgtgtaccagctgcgggatagcaagagcagcgacaagagcgtgtgtctgttcaccgacttcgacagccagaccaacgtgtcccagagcaaggactccgacgtgtacatcaccgataagtgcgtgctggacatgcggagcatggacttcaagagcaactccgccgtggcctggtccaacaagtccgatttcgcctgcgccaacgccttcaacaacagcattatccccgaggacacattcttcccaagccccgagagcagctgcggctttaccagcgagagctaccagcagggcgtgctgagcgccaccatcctgtacgagatcctgctgggcaaggccaccctgtacgccgtgctggtgtctgccctggtgctgatggctatggtcaagcggaaggacagccggggacgcgccaagagaagcggatctggcgtgaagcagaccctgaatttcgacctgctgaagctggctggcgacgtggaatccaacccaggcccttctagaggccatatgaccgagtacaagcccacggtgcgcctcgccacccgcgacgacgtccccagggccgtacgcaccctcgccgccgcgttcgccgactaccccgccacgcgccacaccgtcgatccggaccgccacatcgagcgggtcaccgagctgcaagaactcttcctcacgcgcgtcgggctcgacatcggcaaggtgtgggtcgcggacgacggcgccgcggtggcggtctggaccacgccggagagcgtcgaagcgggggcggtgttcgccgagatcggcccgcgcatggccgagttgagcggttcccggctggccgcgcagcaacagatggaaggcctcctggcgccgcaccggcccaaggagcccgcgtggttcctggccaccgtcggcgtctcgcccgaccaccagggcaagggtctgggcagcgccgtcgtgctccccggagtggaggcggccgagcgcgccggggtgcccgccttcctggagacctccgcgccccgcaacctccccttctacgagcggctcggcttcaccgtcaccgccgacgtcgaggtgcccgaaggaccgcgcacctggtgcatgacccgcaagcccggtgcctga

SEQ ID NO: 38024 - DNA, 3201 bp, synthetic construct
  source 1..3201: mol_type = other DNA
atggccttaccagtgaccgccttgctcctgccgctggccttgctgctccacgccgccaggccggcatgcatggaccccgacctggaaatcagagccgccttcctgcggcagagaaacacagccctgagaacagaggtggccgagctggaacaagaggtgcagcggctggaaaacgaggtgtcccagtacgagacaagatacggccctctcggaggcggaaaaggtaccggcggaggcggatctggcggcggaggtagcggtggcggaggatctgaattcgacatccagttgacccagtcccccagctcactcagcgccagtgtgggggaccgggtgaccattacctgtaaagccagtcagagtgtggactatgagggggatagcttcctgaattggtatcagcagaagcctggcaaagccccaaagctgctgatctacgctgcatctaatctggagtcaggcgtgccttctaggttctccggtagtgggtctgggaccgatttcacattgaccatttcatccctccaacccgaggatttcgctacatattactgtcagcagtccaatgaggaccctctcacctttggccagggcaccaaagttgaaattaagagactcgaggacctgaagaacgtgttcccacctgaggtggccgtgttcgagcctagcgaggccgagatcagccacacccagaaagccaccctcgtgtgcctggctaccggcttctaccccgaccatgtggaactgtcttggtgggtcaacggcaaagaggtgcacagcggcgtgtgtaccgacccccagccactgaaagaacagcccgccctgaacgacagccggtactgcctgagcagcagactgagagtgtccgccaccttctggcagaacccccggaaccacttcagatgccaggtgcagttctacggcctgagcgagaacgacgagtggacccaggacagagccaagcccgtgacccagatcgtgtctgccgaagcctggggcagagccgattgcgacgtgaagctggtggaaaagagcttcgagacagacaccaacctgaacttccagaacctgagcgtgatcggcttcagaatcctgctgctgaaagtggccggctttaacctgctgatgaccctgcggctgtggtccagcagggccaagcgatctggatctggagcaacaaacttctcactactcaaacaagcaggtgacgtggaggagaatcccgggcctactagtgccaccatggactggatttggcgcatccttttccttgtcggcgctgctaccggcgcccattccgggcccgaagtgcagctggttgaatctggcggaggactggttcaggctggcggatctctgagactgtcttgtgccgccagcggcagaacctttagcatgggctggtttagacaggcccctggcaaagagagagagttcgtcgccgccatcacatactctggcggcagcccttactacgccgactctgtgaagggcagattcaccatcagccgggacaacgccaagaacaccgtgtacctccagatgaacagcctgaagcctgaggacaccgccgtgtactactgcgccgccaatccaacatacggcagcgactggaacgccgagaattggggccagggaacccaagtgacagtgtctagcggatccggcggcggaggatctggcggaggcggatctgggggcggaggctctttcgaagaagtccaacttgtggagtctggagggggcctggtgcagcccggcggctctctcagactgtcttgtgcggcaagcggctacaccttcacctcttactggatagaatgggtgaggcaggcacctggaaagggactggagtggattggagagattctgccaggagggggagatacaaattacaatgaaatcttcaaggggcgggccaccttttcagcggataccagcaagaatacagcttacctgcagatgaatagcctccgggcagaagataccgctgtttattattgcacgagacgggtgccaataagactggactattgggggcaagggactcttgtcaccgtcagttcaacgcgtatccagaaccctgatcctgccgtgtaccagctgcgggatagcaagagcagcgacaagagcgtgtgtctgttcaccgacttcgacagccagaccaacgtgtcccagagcaaggactccgacgtgtacatcaccgataagtgcgtgctggacatgcggagcatggacttcaagagcaactccgccgtggcctggtccaacaagtccgatttcgcctgcgccaacgccttcaacaacagcattatccccgaggacacattcttcccaagccccgagagcagctgcggctttaccagcgagagctaccagcagggcgtgctgagcgccaccatcctgtacgagatcctgctgggcaaggccaccctgtacgccgtgctggtgtctgccctggtgctgatggctatggtcaagcggaaggacagccggggacgcgccaagagaagcggatctggcgtgaagcagaccctgaatttcgacctgctgaagctggctggcgacgtggaatccaacccaggcccttctagaggccatatgaccgagtacaagcccacggtgcgcctcgccacccgcgacgacgtccccagggccgtacgcaccctcgccgccgcgttcgccgactaccccgccacgcgccacaccgtcgatccggaccgccacatcgagcgggtcaccgagctgcaagaactcttcctcacgcgcgtcgggctcgacatcggcaaggtgtgggtcgcggacgacggcgccgcggtggcggtctggaccacgccggagagcgtcgaagcgggggcggtgttcgccgagatcggcccgcgcatggccgagttgagcggttcccggctggccgcgcagcaacagatggaaggcctcctggcgccgcaccggcccaaggagcccgcgtggttcctggccaccgtcggcgtctcgcccgaccaccagggcaagggtctgggcagcgccgtcgtgctccccggagtggaggcggccgagcgcgccggggtgcccgccttcctggagacctccgcgccccgcaacctccccttctacgagcggctcggcttcaccgtcaccgccgacgtcgaggtgcccgaaggaccgcgcacctggtgcatgacccgcaagcccggtgcctga

SEQ ID NO: 38025 - DNA, 2850 bp, synthetic construct
  source 1..2850: mol_type = other DNA
atggccttaccagtgaccgccttgctcctgccgctggccttgctgctccacgccgccaggccggacatccagttgacccagtcccccagctcactcagcgccagtgtgggggaccgggtgaccattacctgtaaagccagtcagagtgtggactatgagggggatagcttcctgaattggtatcagcagaagcctggcaaagccccaaagctgctgatctacgctgcatctaatctggagtcaggcgtgccttctaggttctccggtagtgggtctgggaccgatttcacattgaccatttcatccctccaacccgaggatttcgctacatattactgtcagcagtccaatgaggaccctctcacctttggccagggcaccaaagttgaaattaagagactcgaggacctgaagaacgtgttcccacctgaggtggccgtgttcgagcctagcgaggccgagatcagccacacccagaaagccaccctcgtgtgcctggctaccggcttctaccccgaccatgtggaactgtcttggtgggtcaacggcaaagaggtgcacagcggcgtgtgtaccgacccccagccactgaaagaacagcccgccctgaacgacagccggtactgcctgagcagcagactgagagtgtccgccaccttctggcagaacccccggaaccacttcagatgccaggtgcagttctacggcctgagcgagaacgacgagtggacccaggacagagccaagcccgtgacccagatcgtgtctgccgaagcctggggcagagccgattgcgacgtgaagctggtggaaaagagcttcgagacagacaccaacctgaacttccagaacctgagcgtgatcggcttcagaatcctgctgctgaaagtggccggctttaacctgctgatgaccctgcggctgtggtccagcagggccaagcgatctggatctggagcaacaaacttctcactactcaaacaagcaggtgacgtggaggagaatcccgggcctactagtgccaccatggactggatttggcgcatccttttccttgtcggcgctgctaccggcgcccattccgggcccatgggatcttggagcgagttttacgatcggctgcacgccattcaccaccggctgtatgctctcggaggaagcgaagctgagctggccgcttttgaaaaagaaattgccgctttcgagtccgagcttcaggcttacaaaggcaaagggaatcctgaggtcgaggccctgagagataccgccgccttcatcagaacccggttgcaggcataccggcacaacggatccggcggcggaggatctggcggaggcggatctgggggcggaggctctttcgaagaagtccaacttgtggagtctggagggggcctggtgcagcccggcggctctctcagactgtcttgtgcggcaagcggctacaccttcacctcttactggatagaatgggtgaggcaggcacctggaaagggactggagtggattggagagattctgccaggagggggagatacaaattacaatgaaatcttcaaggggcgggccaccttttcagcggataccagcaagaatacagcttacctgcagatgaatagcctccgggcagaagataccgctgtttattattgcacgagacgggtgccaataagactggactattgggggcaagggactcttgtcaccgtcagttcaacgcgtatccagaaccctgatcctgccgtgtaccagctgcgggatagcaagagcagcgacaagagcgtgtgtctgttcaccgacttcgacagccagaccaacgtgtcccagagcaaggactccgacgtgtacatcaccgataagtgcgtgctggacatgcggagcatggacttcaagagcaactccgccgtggcctggtccaacaagtccgatttcgcctgcgccaacgccttcaacaacagcattatccccgaggacacattcttcccaagccccgagagcagctgcggctttaccagcgagagctaccagcagggcgtgctgagcgccaccatcctgtacgagatcctgctgggcaaggccaccctgtacgccgtgctggtgtctgccctggtgctgatggctatggtcaagcggaaggacagccggggacgcgccaagagaagcggatctggcgtgaagcagaccctgaatttcgacctgctgaagctggctggcgacgtggaatccaacccaggcccttctagaggccatatgaccgagtacaagcccacggtgcgcctcgccacccgcgacgacgtccccagggccgtacgcaccctcgccgccgcgttcgccgactaccccgccacgcgccacaccgtcgatccggaccgccacatcgagcgggtcaccgagctgcaagaactcttcctcacgcgcgtcgggctcgacatcggcaaggtgtgggtcgcggacgacggcgccgcggtggcggtctggaccacgccggagagcgtcgaagcgggggcggtgttcgccgagatcggcccgcgcatggccgagttgagcggttcccggctggccgcgcagcaacagatggaaggcctcctggcgccgcaccggcccaaggagcccgcgtggttcctggccaccgtcggcgtctcgcccgaccaccagggcaagggtctgggcagcgccgtcgtgctccccggagtggaggcggccgagcgcgccggggtgcccgccttcctggagacctccgcgccccgcaacctccccttctacgagcggctcggcttcaccgtcaccgccgacgtcgaggtgcccgaaggaccgcgcacctggtgcatgacccgcaagcccggtgcctga
